United States Patent Application Publication US 2014/0057251 A1 - sequence listing, part 154

SEQ ID NO: 299329 - DNA, 5450 bp, Cannabis indica
aactgagttggattcacttggaaatgacagcattatatctttggcttttgatccatctcaaaattccatagacatttctacagaattcaagttagtgacagttgaggcatttgagattggaggagaagaagaacaagaagaaaaaaagtgcttcacattcgaaatatactcttcaagaacaaaagaatggttgaaatcaaaagagatttgtcaatgcaacaacaacataataaacaacaaaagtatcttcatcaaaggaatattatattggcaaacagatggtgacaacattctcacatttgatttagacaaagagctatcttggttgatatcagtaccagttccagctgcagaattcaagaccattcctcaaacatgtattggtgaatgtggaggacaacttaactatgtcatgatctcagaagaaggacttcatctatggtgtctcgaggactctttcgagtctgaatggacacttaagtattggaaatcgttagagatgatggaaaaagagtttccaaagctcttctacaacttacgcggacgagtaatgcaagatgtgagcatttgtgacactccatggatgaatcccatggctttcaatggtggaattttgctgctgagagtttctgccaaaatctatttgtatcactttgaaagtggtaaaatggaagtggtttgtgttgctcctaagttgggtttgagtgccatgtttcaacctattctacttccttattccatgagcttggttccactcaagtaactgacattaactaacactacacattttgttaggtttaaaccattttggttacaagttttatatgcttttagtataaaaaggtgacaaatgtttttgacctctaatgggactgttgtatcaaacacatgctattaaagtagttgttaattactcaattgaccaaaatttaagaaaaacttccaaaaatactttcatttttacattttggacttttttatagtaaaaataataaaccgtttattttggttgtttcataattatcatgagattaatttttcattgtaacaaaaattgtatttttgtaaataaaaactttaagctataaaattgtaaataaacattaaaaaaaaaggtatttatgaaaactcccccattgaattttccatattttgccacaaaatttgttacaagaaaatcaagcttgaactaatggaaaaatctttcaaaattatagataataataatctaccattgtttacattacaaggaaagaaagacaaaaatgaaaagagagacttgtttgcaagccatgaaatcttattataaatataaaagaaaggattttaatgtgttgttgaaagctgaaaccactcttcttcttcttgatatttttacttctgcaaattatatactactggacctttctttatgagcttccaaagtgcagcttttgcttcttctaatgtctcgacggaatgcccttcatcgaacgaaactctctgtatgttgaactgcatacgataatcgaaatcaaatcaagttacaactatacaaggataaaacaaaggacattgcaaagttatcggtttaaacgaaagactattaatacctgtgcaccttgacgaacccgacatcggttcctttgctatctatagatatgagtgcagcatcatccacttcagtttcagcagataacagttcttttaaaggcttcgaaaatattgcattgagttcctaaaaaaaaccacaataagaaacaaaagactcgtaaaaagaatgcatatcgcgtagaacaaagtatgaacctttaggttctgttcgccaccatcaactgcaatcttatcgggctgaatggcttcgtattccttgacatcgacccaagcaacagtaccaaacccgccaatgaaatatatgtcactgccagtaaggaattagcacaattgagtcctaaagagattcatttattgaagaaaactataaaaaccgaaatgtgaatactacagctcaagtcatgaaaccgataaggactgataaggctatgccacctaaatctgagtacgtggaaatcgagatgtaaaccaattttgaactttaaaacgcagtaaattgggacgtaaaatactccacttcgggaaaagcaaagatctaatggagttgaaaccaatgtctgattaaacatgttagctatgtcacaacaattgtttgtgtcaaattcaatttccctcaatcagcacaagtaaaaaaaaactaggcttgattataatgaagagtcaccccacgatttgtctcgacaaataaagttcgttcgaaaaagaagtaaagaacaaggtattggtgtaaacggtttttcccactaatcaaagttcattaaacagctgagaaattaagattttctgtggccgagctctatgcaaaggccgagatcaagacaaattaatagcgaaccttatgttttgcatcctaaagtagtaaaaattcccccattgttgagatggcccttgctgatgtttagctatgtattgcttatgagcccactcctgcaatatgcaaacaccacaatgagcaaaaagagagagaaacttatattctgaatccttaaaaggaacaaaatgatctataagagaaaacccgaaaaacatgtatagccaagtggggtgtcattgtcagataataaaattaaaagtaacctgttggtgttctggaagtggatagacatcaccgaaaattgtaacccttgcgtttgacaatccactccatccgggaatctgtgaattcttacttgtcactaaaatcgatatagaagaaagaaaatgaaagcaaagcttgcccgaatgcttagactcaagaaaatcaattacttacctgcacaactagggtgcacctcggatcagctagcaaattccgcgtatggatggccaatggagaaaatgaaaatataggatctgatgagaagtatgatgtcagaaaccgaaataaaaagcaaacacaatttaaagtaaaggatcaaagacttacgtccagaaggatcgggtgcaaaatctactagcgaaccaaaaggataaccttcacgtcgatggtgcattcgagacattacagtgcataaatgagcaaacctagccttaaattcagaagaagatacaacgcaacagattcagttaagaacataaacgaattggtgaagaaaagaaataatatcgatcctttctttacctgctccataagattacgaacagctaaggctggacgaggtaagccatgagctgaagtagcactttgtacaccacccgaaataggtgttctaaaaagcccggctctagttcctcctgctgctgcagcactacttccacattgagatgaaagagacgagtccacagttggttccaaatttaaatgagtgtcactgtttttgcgttgacttaaatcacccttcagaagacaatataggccattaaaactctgaaggagccattcgatactcctagacattctctatttcccagaaagaagaaaagtagttcattacatttgatgaacatacatggagaacaaagacatccttacacggatacatacacaaacatgtatgtatatatgaccaacctttctatggaagcatagacaaatgtataaaacgtttcgggttaacccctctactactcaagaatggtgtgtcactgtcaatagattaagaaaccaccaactagcaatgacagtaagttcttttgtttggtaatacacaaaaacaaaaatcaaataagttaaagattgtgacaagaacccatttcaaagataaaaacttgatctaacataaaactctcaacaagaaaattattaaaaattctctgactgctttaaccccataatacaatttatcacaattttatgtgttaataaaccatgaaattcaaacaagccaagctacttaagattctatggagactttattgcaaaaatttaaactttattgtcccttttgaggtggcgtttggttggaggtaatgaaatggaagataaataattttcatttcattcaattctttggttgcattttaaagtgttagaatatcattttaatggaatggcctttccaccattctggtggaataattattcgaaaagaccattccaagatatcaattttttgtatccattttaaattttattccattcatattcccattcttattctaactaaatgccaactaagtgttgttagttggtcaatgcctttgaaatcaaacatagtgtaccaagagaaaagccacaaatttcacacttctataagttcaatttaaagcctaaaaatattcagtatcaccttgcatattcataatactcaaaatcacaatgatatgaatctctacatagcttaaccaataatatactaaagttcattcacttcccaattttcttaaatactaaatataaacaaaaacactcaaaatgcactcaaaagcttcatgaatcaaatcacaaacttgcacttgaagcctcaaaatatgaaatcaaatcacaactttcacacttcaataattccaatttaaagcctaaaaaattctcaatataaccttacattcataacattcaaaattctcaatgataaaaaatcattataactatatagcttaaaacaaaaccaacacccaaaattcattcattccccaattttaaaaaacactcaaaatgcacaataaagcttcatgtatcaaaatcaaaaataaaaatcattacttgagagagagagacaacatcttcagaagaaagtaagccaaacccattattcaatggcttgtcatcctcagtttcaccggacccagaagcctcactgggagtggggacagcatgagtacgaagtttataaagaccacaactttcactgattttcaagcacccaattcgcttagtgattgttctaactgaagaagattgagtattattgataagtggatgatgttctggaaagttgggaataaacacagagtttgccagggcttccatggaagacaacacaaagagaaaaaaagatgttttttctttttgttttgggtttggaaaaacctttttaaatacagtaagagagaatgaaagaaagggtttttcgttgtgggttttgtgaaagagagagtgggagagattctcccccctttattttctttattatttatttaccctaatttagattttttttttttttaatttttgattttgtttttctttatgggtttttgggtttaatttgaattttgtcaacttgtacatttcacatgtaataaattatgcattctaaattttttaggtcgtcaaaaattttattcaaactgttgagattattagatttaaaaatttttatctaattttactaaacaaaatttgatgtagataaaaatttaagggtttgtttggaacaccgtattaggtcgtatattgtattgtattttatgcaatatttttatgtaaaactatatgt

SEQ ID NO: 299330 - DNA, 2339 bp, Cannabis indica
tctacctagctacttcttcatatatatacatatattcttgttacgtaagctagcatagacttcgaatatgacgatgaaacatgcatgtaacgtaaattacatatacatacacacataaattaattttctaaacccaaaatattatttattattttctctcgtcattttatatatatatatatatatatataattaaattcataatgttattacagaaagatacatggagtgaagatgaggacataattctgattgaggcccacaaagagctgggaaatcgatgggccgagatcgcaaaaaggctggatggaaggtctgagaacaccatcaagaaccactggaacgccaccaagaggaggcaaacctccaagaacaagaagaacagagacccaaaccacaaagccagtactcttctccaggactacataaggagcctccacccaataataaacgccaacaattccaccaccaattcctcaaacgacaacaatgtcgatgatgatcaccaagtccaccaacaacccggtgcaggtaatcagttttattatcctgatcttaatagtcaggactatggttatgaatccaatgctgctgttgttctgttggagcatcgtgaccagaatgattatgataatgatgaagatgaagacgatgatgaagactggactgataacttctacaatgttgatcttgatcatatggaggagaatggtacaaacgacaacaatctttactctgagacttatggttttaagtctttgcttgaggaaatgtcgtatgggtctggtcatgtggctaatgagattaacaatagtggtgtggatttacagatgaggaatgagatcgagagcattatgcgaggacctggtgaggctgtgaagaaggagatggatctgatggagatgatctgcctggaaaacctttcttcaacaaattgagatgcatccgtaaattgaataataagtagtactgtgtgtctgtggcttttctatatatttagatatttgtccagaaacacaagtcgtactttttcgtttcaaaatgacgtcgttttatatagtttctgctgtcagtgtcttttaatctttagtttttattttaataatgtttgtgtcgttgtgttgtcgttattgctgcttgtgtcgtctttgccctttatttacagatttgtgtgtctgtatttgggggctaattgtcgtcttaattactccacaaagacgaaaaaaatgtctacttgcttcgtgggagagtccgtcgacgtaattttctctttgtattatggataatttggacaacttatgttaatttgctttttgggttatttatatttctctctcttttatatatatatatatatataataaattggttatttaacgattataagtgatgtcaaatacatatatcggttacaaattacaacatgaagttattattattattattcataataacttctccttttcagaattaaaacaaaaacaaacaaaggatgcataaaaataaaaatatggaaataaaataaagaaaacaaacacttttttttttttctcatttcaaacatgcattggtggctatagatataatcatgactttttctatatatcatcatttcttttttgcttggtttgattcgtttggctcccgagtataagaagactcaaggaaaagccattagctagtcataaacacattattaatatgaacaaatgaatattagtacacagtacacaccaaaatcaaatttaatgatcaaattatatatgtataaaagactgaattatatatatatatatatatatatttatagtccgactatagtactcgttttacatttatagctttttgccgcgtgggtttaaggtgataccatttgtagaatcatataagatgataccatttgtagaattggaacgttactaccgaccacaacaattaaagccaactaaaggagcgcagaccatttgagcttaatacttcagcaaacgacctattgataaagagaaatgctatggggaatcttatagtgacaagtatcgtgagagtgacatgttattataggtgtaaatatataatttgattttataaataaataaatattattttagattttacgttttagaaaagttactaattgtactctctattttgttaaatgataaaatagatcctaaactgattttttatcaaaataaagatatatctaatttgatttgaatttaaaatttaaattcaaatataaatatataataaccgaatatcaaaatatcagtagatcttttattttaataattatcattttaattttttttttgaaataattatcattttaattaaat

SEQ ID NO: 299331 - DNA, 6819 bp, Cannabis indica
aaaaaaaaaaacacacacacattttgcataatatgaatttggctccaaaacgacaacgaaaggagttgatgacaacaaaaacgattatgtttgctttgagaaatttcttagaaggatcttagaaagagtggtttgtaaatcggtgaaaactgtgtgctcatgtcagaaataacatcataattaataatccaaaattgcttcattgttaatcccagagatgaacaaactatctccaaaaccaaaattgaggaaactccttggtcttcatcgttatcaccgagatttttcttgcataaaaacatgcttccaagaaatgaggatgaggcatttacagctttgatgtttgaaaatgtcgacggaagcaaataacaatttcaaaattgaaacgcaaagccaaggaatttattgaattaaaaactaagtcggctggcattaactatgtccggaaatgaagaatcattatgttaagcaaaatctatcataatcgtctgtaaaggcttattgtgcagaacatgaccaattcaatgttatatcttctaattacttttctttaacatgaattgtaaaggtgatgtaaacaacaatgccaaaattgaccctcaaacctgaggaatttggaggaatataacaaaatctaatgacacactactataaatacataactaataaatgaagttatgacaaaattgaaactctttctctttcatgtgttaaggcttgacactctttcatgtattccatcaactccactatcacggtagtaatttataggcacggcacattatatgatccactgcatgcaaacaaaaatcaacagaaaattcatcagaagaggaaaatgaatgaacaaagaagcaatatacatgtgaatatttgcaggaaattaccttgccccagctgatgaacaatcaaaggtgatatgcgagtacagaaaagagaagtcaacttcacttcctcctcttcctgccttttcctagttgtccagaattgaaagcatgttgttgttcttcaaggaaagctttcactttgtgatacttctcagttctttcttctgccatcagtgccttctcctttgccttaacctcgtgtaagaaataattgtccttacggagttctcgaatagcccctttagattcttcttttaaaagtttcttcaactttttcatctcggccctttcacggtctggatcataatctctaccctttacaaatctgcagaacaacaagaccaattcaatactcaattccaaccatccagtctaagtaatacatgccataacaaaagaaagtaaaattaagttacccttcttcgaatttgggtgtaagcattctgataggcactggcttttgtttccgcatttgaagaggttgtcttgatatgtaacattcatgaactttagtcgtgatgagctcagcaacatcttcaatcttatcttgcaatagaccaactatgttttcttgctgtgccacttcacgtagcaacatcgaaaatgggaaaaaattttcaggaaaagaactcaagtcttcatatatgttgacatatccttgcagagtttcaacagctgtcatcaatatactagtcctgcaaattgcaataaaagaaacaaaacgtagcaaatattaataatggaagttgatgttactgcgaaaaataccataaaatcaaatcaaaacagtaccaatgtgtatcctcattaaagcaatttcgagagcacccaaaattgctataaattggacagtccgcacaaaatatgaactaattgagaaaaccttattaagtactaacctaaaactgtcagtgtcaaaaaaggaagagtcctctggcaggtccaatatagtgaagaaattcagtggcttgatctcatttacatgtccacgtatagaaagcaggggcttgagctcatttatttccataagataatagtactgcgacaataaatcaaaagagatgaaaaagttatttaaatgccaaaacaaactacgcatagactggaattacttcatatgatatcagcaattgaccatagattcatatattactcataataggttatcctatacatctacaaattacataatgtataacgaaaacaatcttacttgagtatcctgatatgacatgggtttttcatctttcgctgccatcagcagcattcgcagaaacccaattgcttcaggacagaacttcttagattgtttagcaacctgcatcatgaattacttaattatagagtctgcaattttattttttatgcttttgctgaacaaatagagcctgcaattgctaaatgaaatgactcacgacccaaggaaatccatatgcacgtgtcacatgaacatttataataatagaaaatgcttcattaaataaattaaatgaacaagttgaaaagtatatatatagaatgaaaacatacagagaaaagcattgagcaaatgaaagagccaactgcaatgtcacgaccagacacaatggggcaacgcataagatattcacacatcagtagtatagctggagtcatgaccacatgacggaagtcggaacagggaaatattagagaccaaagcctcaaaagaattaaagtcttcgaagaaggccagcaactattttctgtaaggataaagcaaatcagaccatgtgataagacagcagctacacaatcattaagtgatcaactttctgagagaaataaataaaagaccatctaatagcatcatggccaacctgggttcttgataatctcacaaaattgtgttcgagttcgtaaaattctttgacgagcacatattgcagcaaagtaaggaatctccacactcatttccatcaatggcttcaccaacaaatccagcaagtcaatattcaatggtcttttattccccagtacagcaaaatactgcagcaacacaccataaaacacctgaaaattgcacagaagtacaggtaagagctaagaaaataccactacggcaatagccaatatacttaggcaaaaattcttcaaatatgcaattgatcaaaatatatatgtttaaaagtctcatacttgcatcttcttccgattttctgctgcaagcttgattgcattgctcactcgaatgcgattgattatcaacattatgtcactattagaacaattatccaataatgcagagaattcttccaaggactttggagcttcaattaaataaggaatatctaaccgagtatcggactttttttcatcagcatccttttttctggagcccaaggaatctttatgtctttcacttgttttaacagacagaatgtcctgtgatttatttgaatctcttggttccactaccttcttgttaccaacatcatcctcatcactctcttcaccatcctcttcctcatcatcttctgccccatgtaactcagtttcaacattatcatcatcactctgttcccagtccttgatagatggattcttatcactatcttcgtcagacccttcactgccattttcagaactctctgaatcctcagaagaatcgccttcttcattctcatcatctctttcttcaagaatctcatcaacccaaccccttttctttgacttaggctcttcatcaagcaaaaaggaatcaccaagatcatcaccggatattgctcttggcctctgagtagatggcttctcagcatcctcatcctcttcatcactagagccatcggtggcaagcatcctcttctgtctttcttcctgtacataattacattgtacattatacataattacaatattgaatttcatcttcctgtaagttgaatttaagttgttcacaacaaacattatacataactacaatattatataccattctagaaagaattataaattgtaagatactaaattgaatatcatctttctgaacaagaaaggcaatggtaattaattaaactctacataatgacacagcaagctaagtacacggcaggtgcatttataaataagatgtttgctagaaaaaaatggaataataacttttaacatactaatctaaattgattctttcagaaaaagaatatatgacccgtaattaaaatataaataataaaacataaattttccaacaaaagtaagcatttactaaaccactgcatataaaagacttggtccaacaatctttagcaagcacgtcccattcataaatgaaagcaacaaaagagcagatcaggtacctctaattgctctaatctttctctctcctcctgggctatctcctcaggtgtttttgtcctatctgacggacgagcacgcatttccaatgccatttctttaaccattttgtcatatatatcaggcttttcctgataccaaaatgtataagtaaattgtttcagtttcccataataaaagttccagatgtaaactactagcaaattgaagctatacaattctttttattaaaaataaaggatgaagaaatatactagtaagtaaacaaagagacattagaccttggggaagtacctaaccaaccaaaacgcaaatgatgcaacttgcaggttgaaatttaaaaataatagttataattgagtacagaattttcaacattatataatagtactgaagacaaaggttcatttaagaatgaatagcacaaacctaacaggtaaaagttgtcactagacataaaaaagatcttgtatttaaacagcagacctgattagaaaaatcccattttgtagtggtagaacaatcatccctcgtcacttggtcactcggaatgctctttttcacaagagactttaaagcattcatcttcccaggatcagtaagagatgataaggcttttgattgcaccaaggatgtgaagtttttgtccaactcttccatcaaatgttcattttcttccttatcttttgctttttgtgcctatgaaaagataatgaaataaacagagcaaaagaaatactattaaaggtcagaaaaaaaacacactcaacattacatcaagaattcaaaattggtgaagaaaaaaatatccaccttgaaatatttgctctttgatatgatctcctccatcacttccttcttggttttgtgtttctatggcaagaaagtaataatcaagtgaaaatatcagacatacatccttcacagataaaaacacaccaatgattgggaataaaaagaataaaagacaaattaagcaataaggatcaccaatatagagtaataacactccaaatcgcaatggggtgcacatagttttgaaaaccaaaaaggttaagcggaggaatgtttatgagcctcaaaagtttaaaatgttaagatagtaacaaaaaaaaatgcttacattttcaccaccatcacttcccctttccatgatattcttttcaaatccagctgaatcttctgcatagaaaaaagcacgcaacttcagctccattagcatagttgttctaaataagctagagcaatttaagctgtacaaaataacatatcataaaactatgatcctaatagggtttataaataagcacatactcccaatgtcaggagcttcttcaccaccgtaatcatcatcatagggcaacatctcgtcttcaaaatcatctctctcagaaaatgcaccaagtcccggaatatccaaatcatcttcttctccatccgataagttatacttgctttttttgctcagtttcaactattgaagaatacagtacacgcattaaacagcaagaaagcaaagaaaaatgataaataaataaacttgaattacatccccaagtccattcataggttcttacaaaaaccatacaagcttaaccattgttttttcatcaatagagagaaagagccatcaactcttttaaccattgttttttcatcaatagagagaaagagccatcaactcacctggcgctctctttgggaacggagaatggccttatcgaactcgcctagatcatcgttctgctctccaatacgcttatcaacaaacaccgaagactttccactctgctcgtactctttcagcaatgtatttttcctctgcaccgaaaatcagtgacagcatacataagaagaattcgagtaaaatttaaccgagcggtagcgagctaaattgagttgtaccttatcgatggcgcgagagcgagcgagacctactctaagctcttctcctttacgttttttgccgagaatatcgaattttctcctagaccatattgtttcaaaaggattgggtttagaggcctgaactttcatagctacggactctggacctgacttcttctttttgccattcttcttgctgggattggcgtcgccgcttccagctttcgatgtcttcgccatgggtttacagggtttaaagctaaatgaccttaatatgttttaacctatattctttatcagccacacttaaacctttcctcgaaacctttatattccaataatacccttcgagactctctcaaatatcactcttttatttttattttttttggctaaacgtcaaatgtcactcttattactccaaaatgaatctaaatctttatatatattaaaagtgattatgtaactgtaatttttggttaaacaaatttgttattttttattctgtttaactttaacgaaaccattcattcctactattcaaattaaaatgcatctgaacttttgttctcaaccaaaaaaaaaaacaaaaatatattatgattcatcttttttctctaacaaaaacatattgccatttttaattctagcaattctccatccccacaagaaatgggataagttgataattaccttttttttttgggttaattaaccaaaattaccctcaaaa

SEQ ID NO: 299332 - DNA, 5904 bp, Cannabis indica
tatacattaaacataatcatgaaataaatcatgtgagccatgcaacataaaagcaatttttgatcttttattaattagtaaatctgattatattgaaatgggttttatttagggcacaaaaacccaacaagtttgatgtatgctatctcaaaccaaactgaacaaagcattttggttcgaagctttgtcatatgcaacccatatcgtcaataaactacctaccactacattggatggtaaaatacctaaagaggtatgccttagaaaatcgatttgtgattatgattccttacgaatatttggatgtcttgcatatttcaatgtcaatgaatctaaactggatcgtagagcaaagatagctattttcttgggcttaaatgaaggagtcaaaggtttttcgacttgtgtgtggtgaattgaagaatatcgtcttaagtcgagatttcacatttgacgagtttattttgctaagacagactaccttagagatagagaatgaaagcccaaatattctttctaaggtggagcttgagataccggaaggatctaaaaaatattattgatgttcacggtgaagatgaaagtgatggttaagaagagatctcagttgaggtagagctttcgtcaccttcaccaccagtcaatcagcaattaaaatctattgtcgctacttgaccgggaaggaagattattcaaaggcctgctagatacgcagatatggtagcatttgcactcctagtaattgatgatgacgtcccatgcacttacagagaagctgtgcagagtgtgacgacaagaaatggaagttggcaatgatgaagagatgaagtctcttcgccaaataaattaaacgtgggtgttggttcgacctcctaaaggaaagaaggttattggctgcaaatgggtatattccaagaaggaaggagttcttagtaaagacaacatccaatacaaagccagactggtagtaaaagattatacccagaaagaagggaatgttattctcttgaaagtcaaaattgcagaaaaccctacagatatgcttacaaagtttcaacattttttgaacttgatcaagatcgcgtagggtgcatgtggaggtagcatttttggttttggtttctttttttgccaaggtggagattgttggatttggctcaaaagtcaaattgtcttgaagttacaaatatttggttcaactttcaagagatttaggacttactatttgccacatttgtcaatgaagctatgcaatagctattgacttatgctgtctcatttattacatatggttggaactacttctaattattatatatggttaggagataaactatcttacatggattacatatggatggaagatgagatacctctcattattatatatggctgggaggtgatgttttccttctataaatatggagctcttaataggccatttgtaattaagtacatagcggttctgtgtgtacaaatatgaggtgaacaattcgagcacaactttgtacaatcaggtttattgggaaatctgcgagagagagtatagccaaacttcagaaacactcgagagatattatttgtaggaaatttgtatctatattatgtatattgcctactcagattaataatatcagttgtcttccatcaagtaagcaaattgtcgaaccacgtaattctttattttattatttaccgctttaaaatatatttatcgttatctttcgctatttattacttccacgcataaaaggtggatgcactaaggtttttactaaggttttgaagacaagaaatttgctctctttctgtaattttaaattcattaatagatgtaacattgattatgtggacaatcttgctttgttggcaagaatttcattctccgtgatgaataatattgaaaacatccacaactcagtgcttgtgttgctttttttgtgtcacttgtacatgtgtataaatatgtagcaagatatttgaatcttgtttggagaatctaaattattaggaatatcatgtgtaatatacaaaaaataagcatccataaatagtgataaaaaaatacccaacaattttttaactcatatataagcttaaatagaaatatacctagaaacatgtaaattttaaaatgcaaaaataaattaagaaataaatggggaccatccttttttatgaaaagaaaataaataaatcataaaaaatactttgcaaagataactatactcagcttaaaatgagctattgccaatgagccacaaccagtcagcagaaacacctgaaaatatgcctccaagaagaaacaccactaggatattacctagagcattttgctcagggccctgcaaaaagttccaaggaaaatatatcaataaatattcaagaggtgtccaacaaaaatacaagaattagaaacaaaatcaaaaactgaatttagtgaccaaccttgtaacctttaggtgcagctgtaagaacacaaacagtgagatgaccattggttaatcctaatagggaagtaagcaatatcatccatccttgatcaccatatttggctgtgaagtaaaatgctgggatgaacaagaaacgagcaagaatggccaccataagtccctttcttgatttaatatttaagcatttcacaaggggagtgtatcttgatataaaatccaatagattgtacattgccatcaatactaggggatacctgccaatattaagtgtaaggtttagtcaaagtcaaaggtaaaattttattgctgagtgtaataaatatgactgttgccaatatattgttattgcctacaacattaagaggagaatagtttcttatgattggtcagcatgtaaaagttatcaagtagtcgacttttacaaattgtcaacaaacaagaaatgccacatcagaacaaccctttaggtgggaattgtctcatgtctggcattatagttcaccaagtaatctcatgtttaatttttaattttttttggggcaaaactcctataattatatttttctttataaatttaaagcgtcaattaaatctcacggttaatatcactatgtacatctgtatatactattgtcttcgaaattttacttatatacaaatgcacaatgattatcctaattaacatttaacaataaaatttaactggtgcgcatcaaatttacaaacaaaattaaggagacattgcaacaaaaaaaaaatgtgggtgtaaaacttaaaaaataatggagttttgctgacaattaccctaaaagaatatgtagttcatagagtttagtgatagtgaaggaaagcactaaaatcttaccatgtgcccaactggtgttttcctgtattttcataaaggaagccagggaagatggacaatgtgaggatataaatcaggtacaaaccaatagcataatcgagattctctactagtaattgcttgttggtcttccgtacttcatcaacctatacatacacataagttattattatctatataactaacaaaattccaaactgtttggattctagaaaatggttagcaatgttacttggccttcttgtgtttcaacaccggcagccgcaagatcagatttcactgttttcgatccttgtgaggctgctttactccggaagtgtttcactattggtagctttggaaagataaatgcgtatagtagaatgcaaatgaactcaaacgatgcagagattgcaagaaataacactgcataacataacaccaataacattatacaattatgtaaactaaccaaatttaaaaaggccaaatttaattggcatccctttagcacatttgtacttacaagtgccttttcgaagaccatggttggttttgtcaaaggctgctctagtgactagccttaaaccagaggttaaaacgccagatgcagccaagccagcgaagaaggactataaaaaacaataatcaaaactgtacacataaatcttactaattaaccatagtgatactagcaaaagttacagaatatgtataaattaacctgcatgaattcagggagcataaaagccatgtctccaaccatgccaccttgaacaagggcatctgccaatccaaaagcacctacaagtacacatatgcctagataaggtcccagtcctcccttaccagatgtgaccaagtcaacctattatattataaatagataaaatcagattaattaattcactaatatttttataaatttaatgaagtaagaaacaaaaaagtaaaaaattagagcttacaactatgagtagcattgtacttgtgaagaagagagtgtatccaatcaaattgcgctttctagtgtcgattttggcttcattgtatgcaagtagtatcattgttccaacagcaaacggttgataaaccagggtaagtacccttgaaggatggtaattcttccatagtaaacaacaaaatattttagttgctatttacattctcaataccatttagggagtggatttattccttctccattacggttgttaattatgagaagtcaaagtacatcaattacttagcacagagtatatactatactagaaagtagggtctaagtcagtcggtttggtcaggttatgctatgtaaagatcgaattacaaaaatttaaatactactcggctaattaaaaaaaataaaaatagtaatccaacttagtctgattaacccgtccaaaccattcactaatattttttttatttttacattcaatggctaacccgtccaaacagtccatttagatctgattattcatttttaattgaaaggataaaaaatccattctcaatagatacacaaatgtaaaagaatctaagatttgtataatcccaaaaaagaatggggtgagagaggctcgaactctcgacctcaggatcactctatatagctatgagacctacgcgctagccaactgcgccaccaccccaatatattcaatgactgtactattatgtttaacaatgtcagtaaaataatttgataatgttcattaagaattaatcaccgggaataatgaatagtagtaatctccaatggtcagcatactgttccacgccacaagagaacccaatcccagaaaccaacatactactattgctgcattccttccctgcttacacaaatattattggtccccaaatcaaaaaaataattatatgatgaaaacaataaaatatgaaataaaaattaattgagaaaactaaaagtaaaatcaataataatacttaacctcatgcctgaagacatccccggtttcatccgcagtcgacgtcatgttttgaagctatagtctttgggccaaggttaggactctgcttcactataatattgtgacattaaattagattgattctctatactagttaattccgattcaaatagcaagagatcattatttaatgattaattacaatttaaatatttataatatctataatatcgcacgaatttatgaagaatacctaaaaaatattatttacttttggatattttgtagttttcagtttttttttaaacaaattggtttgataaattggtttgcactttgcattgtataatacgtaatttacttaatttaaataaactccaaaattataacaaagttagaattgttttggcaatttaaaaaaggaacttacacgaaattaattttttcaaaaaaaaaataaaataaaatggcaagcttatgttatgtacagctagggatgcacattttcccacggggatggcccccgcggggactcgcccctaatgggacgggggattccccgtctaaatggggaacggggcggggacgaggatcactttttgtccccgaatgttaaacggggcgggacggggatcacactcccgccccgacggggacccgtttagtattt

SEQ ID NO: 299333 - DNA, 1831 bp, Cannabis indica
attgctctcataggagaaagtgccttgtttgttttaactgagccgtcacctgaagtgcctggggaatttctatccgttatacgggacttggttaaagaatgattctcaagataaatccacgttctctgctccccttgctaaatggttccaagactgggtgttccaaaaacagctaggtaaagatctgatgcttcgcaaccaactaaaggttcagaatgccattaggaatggtgaaaatgatgagatgagggaatgcagacttcaacttcctactaaacgtagaatcatctccgacgacgaagatgaagctcgcgacggaggggaaccggcgcaggttattacccaactccctttggtttacctaccgggcattggcgaattttccccttatggtaataacaacaaaaaggtagtcatccaggacctaattgatgcagctgaaccgtccaattccaaggacaacagcacgcggagcaatacaacagtctgcaaagcccaacgatcacagcataacggtcccaaaattcaaaatgtagcaacaaaaattacctcttcaggagaatccaagaagtacacaggaaaagagcctctgtataacccctctcaaaaggcatgcctgcttctggggaggtttcaggccataccacaccagattcgaagagtcacgatcgcaccaacaaggacaattctcagatcgactcatatgaaggaagttactcaaatccttcgtatagggcctctcctatgggctcccaaacccaatatctcaactggccttctaaagagtgctgggcctaaccaaaggcccgtgaattgtttatgggctctcttactgtggataagttccatagggaatcaactcttttcaacccattacttagtattgaggattttagagtggatgaacacttaaatggcccacgcaagagaaaggcttctgatggcttaatttttagcccatcaccaaaatccacatcacaaatgaaacaagaattcgaaaagaaagaacccaattcaagtggtcctctctgttatatcccagttcctgaaactccaccacctacgagtgaagagtcactgtctgcgagtgaatcactgaactcatcatcccctgccccgtttgtaactggacatgacaatgaaggagccactcccaaacgcagaggaagactgaaaaagaatatacaaggtagcaatgataacgggcaacctttgaaacgaagaggaagaccgcccaaaacccactcaggcctaacggctaattcgaagcaattcaaatggacaaaaccgtccaaatcgaaaagtggctacacttctacaatcaagcatcactgggagggcaaaaccattgatttgaaaattgaccttgacaaccactttgtggtaattgagaaaactcactcagtaccaactgcctgtcgattacaagaaatagaggaagatgaaattcggacgactgcacaaccaactgagaacaatggtgtggaattttgctttggggcctcggagacttgcccaaaaaggtctccacagtcgccatgaaaatcctagcttggaactgtcgtggtcttgggagctccacgacagttcgacagttggcggctttaatccgtcaccacaaacccgatatgttactgttagctgaggcaagaatacccttagagaagttcaaaataatctgcagaagactacacttccaagaagttatgtatgtccctcatgttggtctttcgggcgggttgggactctattggatgaaaggagtcaaatgcaatatcaactctaatcacaagtatggaatcatgggtgatattgttggaaatttatttta

SEQ ID NO: 299334 - DNA, 5720 bp, Cannabis indica
atttttttaatttcttataatttggaagatgggtttttggttttaattcgtttgatcttctaggttttttttcccctgctaaaaatgctgttataaaaggacaggaccgttaaattgcatccgtttttgcattttttcttaccaatgcatgattaagttctaaattcacttttatcaaataattataataataataataataataataataataataataataataataataataataataataaaagttctaatttcacttgggtttcagctaatttaatcaactgattagtgaactttagttaatagtaagtttgaaatgcactagtactttgtattactataatatggcttttctgcttgtaatgcccacattcatttatgttcagtgtgtttttttttctcttttgttggttccttcctgttttttgttaatgtttatagaaagttgtttccttacaggataagaagtctctgaagttggggtctgatgacagtctatatctggagggatttgcctcaaacgtctttgcaagagcagacaagcaagatcgtgctggtcgagcagatttgtatgtccactacttttgttattcatgcctatttatgaaaagttattaaatactagctgctttaattcattaagcttagaataaccaatttatggtgcttcatcagttgtaggtgtttgcataagtagcttagtaccatcatttatgtgtaatcatggtcaaccgatatttatgaatgtagtttgtgatcggaattgtgattaaaattcttttcctttatatgtatgcacacatattacacccttcctcttgacaggcttaaccttacagaattgtttatggtgatcatattgattctgaattataaatatatgggatgtattggattgtacttgtagtcatctgtcaatgccttcagttatgaatctctacgtagatgtctttgctatagttttcttaaaagttttcatttctttgatcttgattttattttcatttgtttacaggggtacagcgaaaacattctatgctgcaagcattttctttgagattcttaaccagtttgggcctcttcagcctgatgtgagtttttgtcacatcataacctattagttgtattacttatgcatcagccactaggatgtagattgtctcacgcagataccttgatttattccttattaaaaacaaggagataagtagttggtgttttaagtgtttactaatacacggtctacattttacagcttgaacagaaacagaagtacgcagtttggaaagcagctgatattagaaaagctttaaaagaaggaaggaagcctattgcaggacccccttctggtgaagatgatctgtcaattcctccaagtacaagtggcagaacatatgtaagtgtcgtaagtttcattatatgtgtccttttgagtataaaagtgtgtgtgtgtatatcatctctctatcattatatttcatagttgagagaacgcaaagagaaaagtataatactagtaaactctatttataatttgatggtattgatgagaactttagaatatcttgaagaaaggtctgtcatcactccaagagtataatatcgaattctattatacatatattttttaatttctaagcattgcaatttctgtttattaatcctactgttaaatgttgcgtaaatggtcttctaatgcacttgtctttgtaggacattggacctagtgatttggtacccactattcccagacagggatctgattcatctgagttttatgattccggtaatgaccggcagcattctacagttgttccaccatcggatcaacattcaactcacaccccaccaccatttcaatatcatgataacgtcaacaaccagtatcattctataaacactcaaccaccaccactgcctacgccaagacaattccatgatgaagtcaacagcagcattcggctaacatccccgtccgctcctcaaacttaccccacctctggttacccttcacatgatatccacccacctccagcaaatagatctgacacttctgattatccgcagacataccaccaacaacagccctttcccgaagaaccccatcatcatttgcctcataattatccacaagatactacttctaacccctatcctcatttccaatcttatccaagtttctccgagagtagtatcccagcagtgtcttcccactatgcttcttaccatcaaggcttggatgcttcttatccccagtcagctcctccaacgacaagctatcaaccagctgctcaacccaagtcagctagccggaatggttcttttaaagaacccgctcctgtccctccccctccccctgctccagcaaagccatatgagtatgactgtaactaccagccaccacctgataaagttgcagaggcacaaaaggcagccagatttgcagttggtgcattggcatttgacgatgtgtcgattgctgtcgactttttgagaaaatcacttgaactattgacgaatccatccgctggtcaatgagcttctttcagttaggtgataaggttgattgtccttcaactctggttttgttggacagggtggtttgtaaatgtcaaaaggatatatataccgtgaggtctatttaatattgatacacttgtgacctgtgtgaatcatttttttttggtttttgcctgagtttccacgatactattatgatgaatgaaaaaaagaaattgtttattctttctaccaatttggaacgataagaatattaagaaacatttgttaggtagagctaatggaaacaaaacaagtggaagagtagagctgttttaattaaaagcagtttggctcatcaaaagatagtaaataaaataacatacccaacaacaataagcatatgtttaaagctagacatgatccttaaaaggaacaggttaaagtttcatgtttaaccaaataaatgttacactgaataagacaaatctttcagacaacatccgaaagctactttgtccagcttttatctttcagctgttactgtctcttggacgtttacgagaaagagagagcttccagcttatttcaaaactcattttgggaaatgggatcctggtttctaagattccatgaacaattttcctacgcgccttctctgttcttaaataatatcatcatataacttttccttcatttgtatcgatagcttttgtttgttactgcagggctggcatttgttcacacatgacaaaatctagagcaataattataggcaatgattgctggaacaattttaatgactccaaatgttgtctgtgatttggttttatggaagaaacagaagctacaagcgcctatacaaaaaataaaatggtacaacagtacattggaaataactaggctgaagctgaaggagctaccttttcttgaagattccgccaagtaaaaccattcgtaaatattgtctttagtttccacttgctttaaactatcatattaagctatatattatgctacatattgtttccttgttttacctttacaagaaatgaaactctgtttttcaagttctgaagcatggtctaaagaaaaccatgttcctcaagaaaatggtggttcaatagagttggctacggactatgtgaagcctacagactcaagaactgtatatggaatgaaaaagcaaaaaatacagcagaatgagattcagtaccaccagaaggtgaagatggtgaagagagaaactctagaggatttgatcttagcctcaccaaccaggaaagaaaaatgtgttagaaccgatgctgctactatacaacgcagctttgtcataagattcttcaagagaatctgtccccccttcactgatgactatggagttactaatgtctctagattcaatgttcacaatggttcgatggagagtgttgtgaatgttaaagtagttgatcacattggaagaacaaatgatgctccattgagcagatgtaagagtagaaatataaacaaaaaggtgagctttagggtgccatctgaggatgatataataatattttatgattctaatgaggaatcagagaattgagaattttaaccactaagtcttaacactcattttggtttgtgctgtgacgtttcttaatgtgtgagagtgacatctatataaaaagaggtgtaaatgggaggaataattaatggaacaactttatgtttctaaatgtaatggcctttgctgttagctgaagatagccattggttttctaacatcacctgtcttctgttttttatatcatgaattttattttatcagtcaattaggggcctaagatgattgaatatatttatgtgtgtgtgtgtgttaatttgtgtatgtattagtacacacacattaaggtaaaccctcgtcagaagggaaaatgttattggcttgttaagtttgaataaagacatgaagagacactataaagaagagaacaaacttctgagaagaaaaggagattgcaaatgttatgcatcaactgaaataactaccagttatagtcaacaaaataggaaatttgaaactaaaaaataaaataaagggtacaaaaaagcaatagtcatgacacaactcgttagcaggtggacaaaaagcaaaccccccactcatacaacttaatttcacatataaaaagtcataataggctaccaaggaagaaaattgtaattggactttactatagctagctttatttacctagtttacattttaagggagcacaaagtcacaaagctcataaagaacaaaggtaactacagtcagtaataacacccacaacaacacacagaaaaagtaaataggaaatatgaccgaaaaagccttacaacaagtgtctcctctctttttgtgtgttgaactcttttgattcactacgcaatcaagtaacaaactaaagataggagaaagtgaccaaaactgaaaaataaaataaaaggacagtaaaaaaaaagaaaagaaaagaaaagaaggaaatctccctctttcctgaatacaccttttcttttctttaactttatttttgctacgcaaaagaaagagaggccactatgtgaaagaattgtagcttctcaagtagttctttggcttggcttgtggctctgctttctattcttgaaaagagctcttcgctaagctggtcgccgagatgggcgtcaactaggacaccagccacactgcggcagctattggcaagggctcttcccacttcagcttgatcatcaggctggttcaccacgagtgggcttcctcctttgaaaacctcaagcttgttgatggaaaatgacccaactgcttctactacttccttgaagtcttgtaaacttggtgcatacactggaatgttaaaattgtcccttttttcactgctaattagtccctgtcattattaacatgtttcttaatatgatgataagctaataaagtaacatattagtgggattgaaattgataaaagattaaattactaaaaaattactcaggagtttaacattggtggattatgatatgatgacactgacaatctagcagggtatataacaagatgaagttaaagttactgctgaagaattcatttttgtattcttctttacatatggaaaattgaaaaggcatgtagttctcaagtactttgattacagtatatctctatagcctattctttgaattgagagaaact

SEQ ID NO: 299335 - DNA, 5872 bp, Cannabis indica
aggatgagattggcaaaggtgaatccaagaatgacctatacatactggatccttcacccgatcaattcccttgttctctataagtgctgatgtttggcattccagattaggacaccgctctaataaatacttgaatattcttagcaataaacggaattgtaatgtttctgttttacacaaagacacaccatgttacatttgtcctttggctaagcaaaggaaacttccctttgctagcagcaataaatttgcttctgaaattttagatcctgtgcattgtgatatttggggaccatatcatataccagctcattctggacacaaattctttctcactttggttgatgatcattctagatttatatggacttacttgctgaaacataagtctgatgctcttaatgtgattccacaatttattttttatgttaagaatcaattttcttgttctattgaaaaaggtttaggtctgaaatgcccctgaattggctttcaaggaattgtttcaacaacagggtatcctgcatgattacacttgtgtaaagacccctgaacaaaatgttgctgctgaaaggaagcaccagcatttgctcaatgtgaccagggcaatctattttcaaggcaatatgcctattcaatttcgggctgaatgtgtagtgagtgctgtccttttaattaatcaaacaccaaccccaaatctaaaaaataaatcaccttatgagctattattcaaaaagcaaccagattacacctatttgagaacttttggttgcctgatttttgcctccactctcacagcacaccgcaccaagtttgatgctagagctaaggcttgtgtttttattggatatgcccaaggtgtgaaaggatacaaacaatgaattgaatttaaaacaaattttcatctcaaggaatgttgtttttcacaataatatttttccttttcataaataaaatgaaaacagcagtggcattgatgcctttattgcacctgtcctgccttcctctattgttactaacactcctgttggagattatcccaccattcagactaacaatgcagggacaagaaatgattctcctatcaacaatacatcacccacggttgaagagaaacccacaaacattgctgatagatcaccacaatctaacaatcctcccactgaggttttacaaacatcacatgatgctcctcctgctgttccaagaaggaccactagacccacaagaccaccgagttacctcaaagactttgaatgctattcatacattcaagatcaatcttctacaccacatcctttagataaattcatttcttacactagattgactaactcatacgaagctttcattcttgcagttacttcacaaaaggagccaaaaacatacaaacatgcaatgcaattcagacagtggcttgatgccacgaacagtgaactcattgcactcaaggataataagacttggtctattgttcctcttcctccaagaaaaagagcaattggctgttaatgggtgtataaaatcaagcgcaacagtaatggctcgattgaaaggcacaaagctcgccttgttgctcagggatatactcaacaagatgggctcgatttctttgatacattctcacctgtggccaaaatggtcacattcaagcttttgcttgctatttctactattaaacaatggcacatgctccaaattgatattaataatgcattcttaaatggtgatcttaatgaaggggtatatatgcagttacctcctggaatgaccctacctaattctttgtctacagaaactaatctcgtctacaaacttcacaagtcaatctatggattaaagcaatcgtccaggcagtggtacaagaagctatccgatgcacttatccaagaaggattcaagcaatctcaagcagactataccctgttcactcgaggaaatgagactgatttcatagcctcacttgtctacggatgatatcatcatcactggacccaacctagctatcctacatctgcttcaacaatccccacactcaagattcaaactcaaggcccttggatccctacgttacttccttggcttcgagattgccaaaagcaaagacgacctatttctatcacaattcaaatatgcgattgaacttcttgaagaaacgcgatatgcaggtagcaaatctgcaaaggctctcattgatccacggactaagttagatgataaacaaggggaaccactaacaaatccctcttactatagacaaattgttggcaaattgctctacctcactttgtccagacccgacatcacctacactatcaactgtcttagtcagttcttgagaaacccccaacacacatttgcaagctcttcaccacctacttaggtacatcaaaggccaccctggacaaggcctattgtactcaccaaattcttctctctatctccaaggtttttcagactctgattgggcttcctaccccatcactagacgctcaactataggattctgtatcttcatcggagactgcttagtttcttacaaaactaagaaacaacctaccatatcccgtatttcagcagaagcagaatatagagcgcttgctgcaaccactagtgagataacttggcttcaatacctactcactgacctcaaaattcctcaaacaaaatcagcctttatttactgtgataatcaattagctattcatatcgccaacaatccaaccttccatgaaagaactaaacatatcgaattggattgccacttttttcgtgacaaaattaacaactcggccatacgactgatcccagtttccagcaacctccagttagcagatgctttcaccaaactgttggcctccacagttctaactacacacataaacaagatgtatgtctatgatctataccgtccatcttgagggagggggtaacaagttatagtatatttttcttctccaagctcttctccagattgactgtcaatagcagttattgtctttaactatttttggttggttaagacaacttagttaattatgttaggactttccttttctttagttaagttggttagtcacttaaccgcctctactacactatatttagttgcattggttctctttgtaattttagatcgattatcaaataatattctttcactggtttcaattcaattccgcaatacacactttataataatatatacattatatatgtgctcacaaataagattctaatccaacatgcaacatagaaagttttagaagatgaaactctacaaggattattgttcgggggataagtcctatttatttttacattattaataagaggtctatttgtgctcatagacctagtgattccaagttaaaatccccgtcttctaatataaaaataaataaaagctctatatgtaatatatgtatcattcactagagaaagcgcttcatgtagtcgacagccgaaacataattaatttctggataaagttcagtggcttcgacaccttcgtcgcctatttcgaaatttgttaggcaaccttcaaaaaacacattgtagtaatgtcccattccaacttgccaagcataatctagatcttcatttccatacaaataaaaatcaaacaaggaattaagttaggccaaacctgctgtcgttttgataataataagctaggaagaaaatataaaattactcacattttttgatctacgtgcacaacacacaagcttcgaccatttctatataatttaattagattatatattgatccattttattaattttttgatcgctaattgtgcctagatatttttttatacatatatattttgtcacacattaatagtaagataaacaatgaattaaaaaaaaaattaatcatttccttaaaaaaaaatcatttaaacatattaatcacaaacaattttgcatatactaatgaagctaaattcttttgataaagcaaagaacacctaagaaataagtaaaatttttgcatttggtaagacttttatgtatttaattttgtaagttacctaaaataaagtagtaaaattttcaatttttaaattttgtttttggaaaaattaaatatattctataattagttttgttttttaattttaagaacaaaaataaaagtgttatataaatttctttttttgtttgtctttatttgagtgagaaatgagaaaatgaggtgagaaaaagtgggatcgtggcaaggtctcgagtcggatatgggtctaggggtgcctggggtcgagtttgggtcttggaggttggttcgggtctgagggtcagagccgagttcaagggtcgagggtcaagtctgaggtcgacggtcgagtctgaatttgtgtctaagtctggggccagggcaggccggcctgggtttgggtctattgggttcttttttaggggccaagtctgagttcaagttttagtcagagtccagtcagggtctgggtccgtggtccttgttagggttcaagggtgaggttaaggtccaaagtgtcagtaaaaaaaatataaatagattataatagattacaatgactttaaaaattttcattttagaaattaaaaagtttatagaatatgttttttatgaatattttttaggtttttgttttttttaatttaaaaaaaaagtattacagaacgcaatttatgttttaattaagtggtcgttaattattttaactaataaatacttcggcatgctctttttttaggctacttgggagtgagttctacccaagtattatgagagtctcgcaccactagaggatcgatgtcgcggagagtacgaaattggttaggtagtagtatacaactgtttcgacatcttagagtaggttgtggaagagaattctctccaagaagttgtcagagactcagagatcattcaaactctattatgttttcaatagcaactaatgtggcacaagttattcaccgtcaataaggttttataataactttttcatagaaaacatgcattctctccacttcttcaatgcggttataatttataatatacttactaagtgcctgcatagaaatgcaactattttggttgacgctaagagaaatatataaataacaatatatttactctatgtatattaagctctcacctttcgcattagctagaaactcttgctttgagattgatgacttgtgcaactctttcccaatgagcttctcccaaactccaataacttctctctgggacaaaatattctttggtggtctaagatacaccgtcttgttcagagttcgagggtcatctacggttttgactgtgtaccttgctatgtcatcttcatcaacgtatatagctgccacatatacataaacatatataaaagttccatagtattgaaatgatagctaggttaataattattgcggttttcagacaattgagaatacgtttttccataaagaaagaagtataatagcatagaataatttataaggtaatttcttccctcctttttaagggtgatttggtcttttagatatatatatagaaggtattactaatgtttgtttagagttgcattagagttgctattatttaattattaatttaaataataataaaaagttaaatttaataaaatttaatttgattatatttttcattaatttaattttaaatttatttataaaaaatatatctaactaattttatcaaacaataaaataagcaaataagtttagatattttaaataatataactaataaatttgctgcaatgtatgattaattaattgaattaatgtctaatttaaactgaaattaagatttatataaaaaaaaaattatctaattttgttgatacttttaaataat

SEQ ID NO: 299336 - DNA, 1948 bp, Cannabis indica
ataaatgtaataaattggaaaaaaattagtaatctatataaatctccctgtataaaaatcatattttcaatgtaatttgattgtcacctcaactcggaccaaggtccaaaataatgccgaagcatcacttcctcacaatcgattatgttgggccgagattgtcaatgttaatacataatgctccatagcttaagcaatcccaatcccattcccattttcttctacacccaccaaacaatgttgtatactactagagatcctaaccaagattttccatttaaaattataacattacattatattttatacatatgaagaagggtacgattgtggtttcatacaaaaagtaaattcaattagttactttttggtcaccaaatcaaattcatatgtagttgaaactcttgttggaaattttattataagcttcattatatcaaattaatccattaaaaaaatatttagccttattgtttattaattattttaatacattgaatttgaattttgatgtaaacctttcaccggaaatagtcacacttataaattgtttcctatttccctacaaatatattagcttatcttgttaatttgtttcccattttcctactaataaataatcttatcttgttgctatgctccttccttgaggagttagaattgacaggcactagtaagttaataattaggatatatttgtcatttcaaagttaagtcaattaattcaaattattttaattataatttagaagctatataccaatttttcactcattatatttattaaacaatcaaatttagttctttacaaaaaaaaaaaaaaaaaccaatcaaatttagctttgttaaggagtacttagctgcacaatagagatttaagtaataaattatcattttaaaaagatgttaattagaaagcaaaaaatttatattatattgttcagttaattctacgagggaaagaccacatgtgaattaatacaaagtaaccgaatgaaatataatcttttaaatacttcaaaaaaaaaatcatatagaaaattactttcatgaaatcaaactactaaacagaagacaattattattaattaaaaaaaaaaaataaacaattctttgtttctgcgtataactgagcaaattagtacatggcaagaatatctatgtatgcaggttaagaaactccaaagtttagtcctattattgtatacatatgtagttagtttaccatatattctaacagaaacattgtaatatatcctagattccacaaagaaaaatagagatccactgctaaaactctgttttgaatttgttttgttttgatttgatttaattaccactcctcatacatctaaatcgtgatacctaattgcatagtagggaatagtattacattttcttgaggtacagaactactacatatcatgaataattattcgaaattctgtagtcaaatatagatctaccaatgtcattcacaaaagttaacctggttgatattaaatattttaccaaaatatacattttttctcatacattttttttggttggatttgcttacatatatatggtgaaattctgtattttaatattcccaattttattatttaattaaatacttaattaaatgcgaaataataaaattggtattgaaaccgtttttctgtagcttcagaagacaactttgtaactcaagaaaaaaccagaaaaaacaaacagtgcagaaaagtaaaaatacacaaagtttttgtacgtggttttaacaatgctttcagattgttactagtccctaggccacgtctagagataagattaattagataggtccaaaaaatacaaaataattgacttatgtataaatagacttcctcttattatatgccgcaagcttgatgtatttcaccttctaattgaaccttgttgaaacttcaagagctcgaactccctt

SEQ ID NO: 299337 - DNA, 1930 bp, Cannabis indica
cttcagccttccttcctggaaggcaaagcttacttcctaaaaattcaacatgactctcagatccacgttgtttttcgtgcaagaaagatcacttggggtacgatacgtcttcaacactccttcctagaatggaaggactgcttgaagtctatcctactccctgtgatggttttagtttgatcttttcaagcgaagtctaaacttgaatttttatgcaacttcagccttccttcccacaagctgaagcttgcttcctaaaacttcaatatgaatctcgcatgcacattgtttttcatgctataatgatcactaggggtacgatatgtcttcaactctccttcccagaatggaatgactgcttcaagactgtcttactcctcgtgatgctttccctttgaccttttcaagtgatgtctaagcatgaatttttatgcaactttagccttccttcgtgatagccgaagctttcttcctaaaaattcaacatgacacttgcatgcacattgtttttcctgcaaggaagatcactgggggtacaatacgtctttaaccctccttccgatagtggaagaaccgcttgaagtctttcttactccccgtgatgctttacctttggtcttttcaagcgaattctaagcttgaatatttatgcaactttcgccttccttcttgagagccaaatcttgcttcctaaaagttcaacatgacttagcttgcttcataaaattcaacgtgactctcgcattaacaatgttcttatgcaagaaagatcactgggggtacgatatgtcttcaaccctccttcctagaatggaaggactacttgaagtcagccttactccccgtgttgctttccatttagtcttttaaagcgaagtctaggcttgaatttttatgcaacttcaaccttcctttcaggaattcaaagcttgcttcataaaaattcaacatgactctcacatgcacattgtttttcgtgtaagaaagatcactgggagtacaatatgtcttcaactcttcttctaggaatggaaggactgcttgatacatattccactccccgtgatgctttcacatatgcccttttggcggtcgcaagcaaagtcagtgtctgaattcctcgtgcacttttagactttcccagtgaaagttgaaagttcaccatcacaggatttgacataacttttggacctcagcataaaaggaacttcctgcttaaaggacacaggcccagttttcccactgcgaaaccaaaaaactcctgcgccgcaagaagtctatgatcaccctcatgactagcctcaatgtgcgcatgcaaccaaaaattgaaaacatttcgaataagtctcgtcgagagaaattcacttgaattctttcctctaaggctaaacccaagcacaaatctaaacataagatgcgtattcaggcgaaattcttgaaatagaaaaagaaaaaaaatacgctcaaattccttcttaaacataagtttggcccatcaggttgcatgattggctgaaatattaggctagcaaagaccaaggagagaaaaatgcataaggttaaggcagtcgcgaacatcactcctggaactcatcctagtgggaaaaccaaaccttgaagaggatgtgagacattgtgaaagatcttttttcgctgaaaggagccatctccgggtaactctgaacgagtaacattttgagtgatgagcaaaattgcatcaaaactttgggaaagaaagagtcaggtcaagaagtggttcctgaataaacaaagaaataattaagactaacgggaaaagcctgaaacactggccattggaactaggcgcttcactaacacaaccagcccctaaaagtctattgttgacctcgcttttagcaaatgacagtgagtctaattttgtaagcgataagtgttgggttttgtgccc

SEQ ID NO: 299338 - DNA, 2252 bp, Cannabis indica
aaaaaatttaataaaaaacataagtagatgggaacaagttacgttattgagctttagtaatatcactcctaatcaactcaagtgccttattaaagtgatttgccttaattccaagatattctttccaagttgttggacgatataaaggaaaaggtgatgagagttgaatcaaaggttcaatcttcacatcttttggtgggccatagaaataagcggttgagatccgatgatgtgtcttgttaacaaccgcacgatgtaacacactcttgaaacgcccattagacaaaatttgcatcaaatctcctacattgatgacgagtgcaccttccactgcatgcaccggtacccacccgatcccttccttctggacttggaggccagtgctgctttgcaatagtagagtgagcaatgaggagtccgtgtgagcagccaagcccatagctttggttgggtccggacagactgggtatgaattcagctgaagtgggccattagaattttggcaaccatatttgggcttaatattttttgtgtcttgttgtgttaggcccaatgacccaaacatcaagcccattatatgttcagcaagcctgttcatctccttttggcacgattccatcacgttgctgcaggaataagccagaaagattcacattaaaatttaaaattaatgtttatgggaaaacccgtgccataaagaccaaatttgattaaatgttttataaatataatataatgcacgttactgggttttgatgctcctgaaaatcatatattgcgttgcagtataaacaggccaatcaatagccatataatcatcaaatagtttgaatatgatgagctgtatatatccatttaaaaagtgaaaaaagtgatctatgagctgtatttatatgttttcatattcccatttaaataaaaataaaataaatttatttagctacgaaagttaagcagattttgaataataagcaaaatttatttgttggacaaaataaggaaaatgtttgacagtgtttttaatttttagttttctgaaatttatttttaaagttgaaaataaaaaacaattttttgtcatttttaaattttaactgtgtttgagtgagatgttttaaaatatttactttttactaaaaaatactttaacattctataaacccaacttcatcatagacttggacccaattcccccatctagatccagacccggatcagagcttggctcaaacctcaataaacattatttttgaaaataataaacaacaattttttaatgttttctcatttttttttttattttctatttttacaaaatttgtccaaccgcgtcctaatttatttttaaaaactatttgtagaataagagaaacggctttctaacaaagagaaattatataattaaataatatatgttgacacttgggtatagtatagtagtagtatatagtatattccttatctataaattttttaatattttgaaaaataaataaaaaaacaatctatggcgctgtagtcccctttggggttatggtataggtaagggtaaagagaaagaggtgcctctgtcgctacataaaggtacagctaataagtgttgaatataatatatattgaaaaacgacaattacaaccgcagtagtaccgtacatcaaagtgaatttgataaacgatttcccatgcagcaatctactcattgatcggttgcggttggaaacggagtgtagtaccgattcattttaccccaataattacggcggccgctccccccttactactcacaatttacatatcatattttggcaactctccattatttatccatatcttcatgatttaatattctaaattatcattcatcggacggtactagctatatatatagacaaaacagaatttggacaaaatctgcattttctttttatatatatatatgtatatacatatatgttataattatatatattgaaatccaatcggttgaaacgaacatttggatgtacatgtacaaatatatatatatgtataaatgtgaggggtgttcatcaaaccgcttacaccgcaccacaccgtacgtaacggtttaaaattctttgcggtgcggtcgcggttggaatttatcctaaaccgcacggtgcggtgcagtttgtggttttgaattgttaacatgcagttcaaatcgcacacagcatattataaaaataccaattttttatatttatttaggtccaatatgtgaaggcccaacc

SEQ ID NO: 299339 - DNA, 1931 bp, Cannabis indica
ggatatactgatgcacccctatctattttagcatccgaaataattttttagtcaaattttttttcatggtcatgtacgttataaatatttaagacatcctgcaaaattttaagaaatttgaaaaagtttaacatgccgaaaattatgttcaaacagtgtgttgcacgcgttactattttattttatacgcgtgtaaaatagactgtttgaatattgttttctatattgtaaattattccaaatttttcaaaattttgtaggatatcttaaatagctataacgtacatgaatatgaaaaaaaattagactaaaaaatttttctagatgccaaaacaagttaagagtgcaccagtacatcctttttaaggagttgcattgtagaatcaccctataattttaaatagaaaatatttatttaagctcttgggtagaataggttctaggtgcgggcctagcccactttcgtcacctacacaatttgcccaatacccgaagccataaatggaaccaagtatcgaatttgacgcatttcatatcaagtttatgcttttttataatttcttaattttggtttaacctaaaaagtttaaaattactactttaaaacacactatggagttttattcctgccaaattactaatagtaataatagattcaattacatctgttattatccaagattgatctaactcgtcattcttgattcaaccacttactataacctgtctatataaggccaagtcatcttcataattctaagaaaggaagcactatgaaagattttgggattctaaaggagaaggattttgtaatgagatacacgagagtataagagtaaaacagttatgagaacccatatatactcaactctgattgctagttaataaagaaatttgaaattgtgttccaagttagagtaggacttagttcacattgaagttataatttgaactagaataaacatgtttcttcaatactaaaaaatactattatcatcagtcctaaaatcaattttttttttttcgagaaccatcggtaataagatgaagtgagtatttaaaactaaaaattatagtcaagaatacctgccgattttaaaaagtcgttaagaatatccgatggtttaaaacacttacaaaattgaaatgaggatctttcaaataagaattcccgacagttttgaaatgattaatatactataatcgatgatttagaaccctcgagtatagtatacccgacatttaaaaatcgtcgcctgttccttattctcatgttatataaaacccaaaaattttaaatgtggtatttatttccaatctcggtctctctctcactcctctctctttctctctcttaggcgaaccaccaccgaagcctcaccatccccaatgactcgaaccaccattgaagctccattgtccccaacgactcgaaccaccaccaccatctccgctctctcgtctccctctctcaactctctcgcttcgttgacgaccaccccaccacctccctctcgtctcgtctcgtctctatcttcctcttgttgaagaccacccaccgcttcatctcgtctcatcgacgaccaccccacctcctccctttcatctcgtttctcttttccttgtcgaagaccacccagcgcttcatctcgtctcgttgaggcccacgatagattcgaactcgaaggtatctttccctctctctatctatctctggtttcattatttatttattattattattttgcagatttagcttcagtgggctctcaacataggcgagcgatctcatatctgtaaaaaaaaaattataaatttgtagttattttgtgtagattttttaatatttttagtgtattattcgaggattattttgaatctgttattgcgacagttagtagtctcgtgatccgtaaggggaaacaccgggt

SEQ ID NO: 299340 - DNA, 4598 bp, Cannabis indica
tttttttttctagtaaataacaaatacatacccatactatgtgtatgactcactaactacttcaggttaaaacaactccaatcaataagatggtatggaccatttttaaaagaaattcagaatttgatcaaaattgaaaatagtgaaatcacatcattaaaaaattgtagagtaaaagtttaaattaaagccgaaaggagtacaaaaacatgagttccttaacttactcaaaattgtaagtagatgagtattagcaagatgggaaagttttcgtgaaaataaaagttgttcacttttggtaacttgtataagagttgtattgtattaagtaacaagtaatactacgtagaatgtattatcgtgtcatgttcgtgttatattttacaccgtttttatatttcgtgtcaggcgtattaacttgtctgttaactcgtgtttaattttttcaaccctaattcgacttataaaagatcgtgtcgtattcatgttgacttactatgatctattttgcttttattgaagctagagtgtaaaagatcgtgtagtgtgtatgttcaacgtataaaagacattaaaaataaaaatctttaatacgcaaattatatgggtactacacaaacagaaggagagaaggtaaaatgtttgacttaccggaattaatttaagtctccgactcagtcaataaccctttgacttaatcgaatagttcaaatgtacgaaattacaattccaccctcacaatacagacccattaatcacttacgaaattacaaaacccaagccccaaatccgtaatttcacaagaagtgtataactttctaaaaaaaaaaaaaaacagtaatggatttgagtcgatttcgttaaagatcaaatttttactaaactcttcaataaaccccattcataaagaccaaagaatttcatacaaattcagatctgagattggtgaagtttctttctcagaaaccctaaaatcatcagatctgaaaagatcagagctcaatcagacaatcatggcgactaattggactcaattcgccttctttcttacgattacaatggcttttttgtcactctgtttcgctgaaattcgattctccgagatgcgaaacgaggtacggtcgattgtccctttagacgagtttggattcacacacaagggtcgtctcgagctcaatgtttcgaagatctcgatttccggtaagaattctgagcctaatcttgctaatgtcggtttcttcctctgtacacgggaatcgtggaatcatgtcttccagcagcttgaagatggtgagatcgattgtcctctcagatctgatatggtgaaaaaggttctcactttcacttctctcaaaaccctaaatgatggaaatctcgatattttgtataatgagaccgatgcggatcagtacacgcttcttttcgctaattgcaattctggatcgacggtcacgatgaatgtaaggtcggcgatgtacaatcttgacggaaagggcaatgtccgagattacctctccgctggtaaaactgttcttcctagggtttacttcctattctcgctgtcttactttattatcgctggtctttggatttatgtgttgtacaagaaacggctcactgtttttagaatccatttctttatgctcgctgttgtaattctcaaagctttgaatcttctttgtgaggctgaagacaagaagtatattaagcgtactggtagtgctcatggttgggatgtgttgttttatatattcagtttcttaaagggtatcacactctttacattgattgttttgattgggactggttggtctttcttgaaaccttacctgcaagacaaggaaaagaaggttttgatgattgtgattccacttcaggttgtagctaatattgcccaagttgtaattgatgagacagggccatttgggcaggattggttcacttggagacaggtgtttttgctcgtcgatgttgtttgttgttgcgcggtgttgttccctatcgtttggtcgattaagaacttgcgcgaagctgctaaaactgatggcaaagctgctgttaatttgatgaagttgacccttttcagacagtattacattgtggttatctgttacatttacttcactcgtgttgtgttctttgctttggaaactatcacctcttaccggtatctttggactagtgtagtggcttcggagctggccactctaggtttctatgtttttactggttacaagttcaagcctgaggctcacaatccttactttgtgattgatgatgatgaagaagaggctgccgccgaagctttgaagctcgaggatgaatttgaattgtaactcgcctcgaagatagaattttcgatcaatcacagatgggtcttgctctatcagattattataggcattattgagatacaactggtactatgtttttttctcctttctatgttgttgttgactatatcttgtctttaattttgagttaataggatagccttcatactcttgtgaattggatagtgatgtgcttatgtttgtgaattggatagtatgtacaagtagaagtagtgagatactgaataattggaattcatttttgtgataaatatatgctttttttcacctgaattttatttacataacagggaaatttggatcttttttcaatttttggtaagagatcaggttgattgaacaattaaagtgcatagttagttattctgtcatataaaattaagatttctcagctcatgagttatgagaaatcattgtggttcatttaggctctttgttacagttgtgactgttttaaaggggtgttgaaaatccattcaattcaatctaatctaatccccacttaatctaattcaatccaatatctaatctaattgaaagtgacagattcatttaaatatccactttattcttacaatcaatactttagttttaactttaacaagtagaaattatgaatattgtataaaatttatattctgaaactgcttcaacttatctttggaggattctctcttcaaaaggtttgcattcaatctgtctctgttttcattttctgtcttttgcaatcaacattcatgtcagtgttaaagaaaacagctttcattttgaggcaagttttgtcttcttgtaggggtaatcaaagcacattttcttacccatcagtaacttttgttagctgtttttaccatttcatattcagcttgattttcatgctgtcatgacagagaacagttagctcagaaagaagaaatatgaaacacaatctataaatgagaagcattagttcatactttatggttagatttgcagccttctgtgctagtaccttctccaccaacaaatcaagaatggttttagagtattagaacgtaaaatcggtccgggttttcgatgattcttgtcactgaaactttggccattttttagtaaaggttctgcttttctaattttaacagcaatatgaggtgaagagcaaagcaacttgaaccaccaagacaatgaaaacattatcattaagtgattaaattttagtgtttttttaatgcttttttactactaatatttttagttgtatggatttttagtaatgatataaggatcaatatatatattttaagctaatgtgatggaatgattaatccgtatttagattttagagcataagtggtaagtagctaaagccaaaaataaacaaataataaagtatactatactcctttgtaaaaatagtaataaaaataaagaatactaatatgctcaattgcagagttaaatcgaaatttaaaacacacgtaaaagtataaagaaaaggctaattatgatttttgcccatcaaattatgacatgtattaaattatgctctcatgaacttttaaggtcgttaaaaatactcctgaacaattgacattgttggatttaaagatttttgtccaattttagtaaaaatagtcgaacatggatgaaaattcaagggacgtgatttggtacatatcaaagttcaaaaggcattatttggtagatatcaaggtttggggagcatgctttagtacataaacaatcactgaaagagtaaaattgaatgaaatataaataaaagtccttaaatctaacaatctcaatagttcatggagaattttttaacggtcagaaaaattcaggggtcatgatttggtacatgttaaagtgtaggggtataaatcctcattagtctaaaaaaaaattatttatcaaaaaaaaaaatatctagggccatgacactctcagccttctagctctgtcatttatatattcaataacggagttagattaaaatgagaaaattacattatatacccactttactttacttattttaatttttatttttgtttctatattatttaaaatatactcacttttacagatgatacctccattataccccttaggctaatgtaaataatataactaaaatttgacataaagtatgattaattagttgaattatctaatttaaatttaaattaagattttatgtaaaagaaataattatataattttgttgatatttttaaatttgaatttaaatatttaaaattattt

SEQ ID NO: 299341 - DNA, 1849 bp, Cannabis indica
attttttattgaaacacaatatttttataattttgatactttaagacaatattttaaaactagtacagtaaaaaatatataaaaaaaatatgatagtaaaaatataaaaataacaaaaaaaattaatatatttataagaatgcctttttttaagttaaaacaaactaaataatttttagaaatttttcgtttatacaacttctaaaacagtttttttttttttgtgtattttttacataattttacatagaaactcctaataacaactaacagagcaaacctaaaatcgcaactaaaagcaattcacatagaaattattagagaaactaaccggagcaacctaaactttaaattttaaaaagaatattaagaaatagcatatagagtaatttttcaataatttttattattagaatcatataaaatttttatttcagtataataaaatatattataatattttacaataaacaggataataaaagatagaacatttattgttatttaaatttaattatgacaaaataaattagaaagaatattttgattttttttaaaactaaagtaattcattttattataaaatattattgtgaaaaacaattaacatatacacagttctattaggtaaatataactctatccttttcctttataattaaagaaaatattattcatttaaatttaatatgatgaaactcacacacctgagaggctaaatgccttattaattggaagcaataaaggtaaacaaaggtaaaagtggtgttgtgttttctccaaactcttcaactgtaagcgaagatgagataaaaggtattcttggcatgaatacactaagcgcaaaggagatatatcttggaaactttttcttttttactgaggaagcgtaatgatttccattttctaaaggataaaattcttgctcgattggagggttggaaagcaaagtgtttatcgcagggtggtaggacaacattggttagttccattttgcaaagcattcctaattaccatatgtctactgctagaattccaaaaactgtttgtgttgagttagataagattctagctagattttggtgggctggttgtgcagataaaaatcgttattgtgctttaaagagttggggcgatatttgttagcctaagatgaatggcggtttggggcttcgaaagttcttggacatgaatatggctttattggcaaaactttgctggatatttcttcaaggtgaaaacaaggtctgggtgaaagttttggtagcaaaatactgtcaccatctggacatgtggacagtaggaaaacacgcaggagattcttgagtttggcatggtcttttagatgcatgcccgttacatatgtaaagatggggctgggtaccttattgcgaatggaagtactgatctatgagatcgcgcccctggatactaggggaatcgatagagaagtgaaacgcagtttccaatatagaagaactcatgtgttttggaatgttgcagatcttttcttggaaggaacaacagattggaacgtggaactcataagggcttgttttgaggaaaaaatggcagatttcattctttatataagaccgctgcaggaaggaagcgatgttctgttctggcaggcttcgaagacgggtactttttctgttaaaagtgcctattgggtgagtcaaaagttcagattccaagagtcggatcccatgtggagcaatttgtggagatccaatttacaccctgtctaaaactcttaatgtggaagatttggtctgatattcttccggttaaggttagattggtgtaggaattttacttggtgaaattccaagtttaacctacacca

SEQ ID NO: 299342 - DNA, 1001 bp, Cannabis indica
atcctaaaataaaaaatttgtaagaatgttaataaaaaaaggaccgtaaaaaaaattaaaaaaaatatgtttttaagtgtattttgtaaatttctttattatatagtttgaccccccaaacttcttatcctggctctgctcctggatgcagccttgtagggtcaggatgacctagtagtcgagtactgcgaattggccgtggagaccttttttatgagtgttacctccataattctgtgggtgacttttcttatgttgagtctcctgactgcgagggcatgattgcttgagccaaggagctgtatgaggctagggtagccaaagagagtactctaagggcgtctgccgaccagcttggccagacgtcagatgatgtacaggttggccaagatagggaggccaaccaacacttttgtggagatacatgtaggccagcctttggtggagacccattccggccagggtttcacgtagcaggccattgagggggcttcccaggctactaattttacccacgacactcctactattgagtttgctatccaagactcatctgcacctgacaatacaaaaaaagaactttagttttattgttttttcgcgcttgaatttttcacttttctgcatgaccctggtcttatgcatttaaagtaatttttatatagttcttgtatggccttaaagccctttactttcaaaccaatgatccaatgaccgatcaggcggtctttaatcgtgactttatcttcttttaatttttttaaacatgtagctcattaagcaacctttaatcctaaatttatgcatttcatgttcaccttgaaacataccatttgatccatgcagagtgctaattatagcttcttattacaaccttttagtcaacttctatgtctgaaatcgtatgccgaaatattttttttcatagcggtattcgttatagttacattatcatctctgtaaatttttaaaaaattccgaataatttacagtaccgaaaa

SEQ ID NO: 299343 - DNA, 1466 bp, Cannabis indica
agtcatgattaattttgttaaacattttgtaaacaaagttgcacattctcttgctcgtagctcttttttgtattcagatcgtattttaagcgagagtactgctcctgctaatcttctttctattgtaatagttgaaagttgatcttaaataaagtttaccatttctcttcaaaaaaatgaagaaacgattattttaaagaagattagtattattttcaaccactgatggaagaaggcaaagatggcctatagaatcatagattagcaaataagtaatcaaaaaacaataaatatattttcttattaagtaaaagatcactcttcgagatatcctttgtcttcagtgagcatgctcttcttcgaaatctcttcaagtgtaatcatgagtcttttagcccctttttgtttttccttgcaatttctacactattcttcgtgttgtggtggctcagtatttatggtcgttgacattcaactgcctctacttagggagtcgaggcttagatcgatattcatttccagagaaacttgaggcatgcgtggagcgacatttatgagatcctcacaagtttgattttatatcaaaaaaaatctaatcatgagccagttggattatattttaccaggacgcagatttagtaacaagtatgtttttaacatcctaaatatgaatttctaaaatgatgaaaattaaaaacatataatgtatgagaaaccttacatttgttgcaacggaattaaatgactccttctactcagatctctaatccttgttcctttttgtcgcagagtataatcaagatctaagcccgacactcctccaattgtttggattcttcacagtcttacgcactacgattgagtactaacttgctatgggtgggcatgcactcaatcactaagaatcaaattttattgtaaataacactatagaattttgaattagaagtgagaaaagaagaataagaagtctcaaaacactaggtgtctgacagaatgaaaactaggtttaaaagcattagttggataatgagactattcttttctttttatactaattcatttagggttaggattgaattatatggaataaaaatgataaaaaaatagaaaaaagaggacttaatggccggccacaatgtgggccaaacactagttacattttttcctcaaccatttatctattattttacaaattccatattttccaattctaatcctataaatgtcaaaactaattatttaataagtaaaattaattatcaaataaaattgtcatttatattatctattagttcgactccacaaagtctcttaattaacaaataaactttaaaattctatatcttcacaatcaagccatatcctagtaaaaattcataaacttgacatagtctaatattagaattataataaattattcaaaatcaattaactgagtcttacaagcagtttgtctcaactag

SEQ ID NO: 299344 - DNA, 5678 bp, Cannabis indica
aataacttagctttatatacacatctaagatgaagaaagaaatagttacaacaagaaggagctagttataaccgtagtcaaactaacctaatagaaaagtacatgagatgtaactaactctaacacagtaagaacctattctctaacagcccccctcaaactccgtgaggttgaggaaacaacactgagtttgtctctgagaattgcaaatctagagctggacaaagctttggtgggagagtcaacaagttgatcaagagcaagaacatactgaacttgcgattctgactgtagaaccttatttctaacatagtatagataaatctctatgtgcttagtacatgcatggagaataggattggcagcaagcaccactgtgttgagattatcacaccagatttttggagtgaatatagaagttgtaggaagtcctaactcatggaggagagattaaagcaaggtgacttcagtaacagtagcagccaagcttcgaaattcggcttcagttgatgacctggaaatcatttgttgctttttagacttccaagcaactaagttcgatccaagaaacacacaatatccattggttgagcatcaatcattaggatcgaatgcccaatcagcatcacaaaatgcctttatatgaaaatcattgcactttgttagatgaatgccatagtcaagagtgcacgcaaggtatctcaaaattctttttacagcaatccaatgagcttccaaaggggattgcataaactcagaaactttgttgactaaaaatgcaatttctggtctggttatagtggcatattgcaatgctcctacaacagatctgaactatgttgaatcttgaacaggatcactaccaaacttagagagtttcaaaccatgttgcataggagtagtgatgcttttagcttcttgcatttggttcaaataaggagatcctgtagctatttcttctgtgagagatgaacttcggaagtggtgtgatgaatctgaattccaaggaaataattgagatctccaagatctttaagagcaaattgagaattcagattagatatgacagtagcaacacgagtttcattggatcctgtgacaataatgtcatcaacatagacaagtatgtaagtgacataggttggtgcgatgctgataaacagagaagtatttgttttggttgattgaaaccccagattatttaaggcaatagaaagctttgagaaccatgctcaaggtgcttgttttagcccatatagagctttgcccaatttatagaccatatcaggataagcggtgtcaatgaaacccgacggttgaaccatatagacttcttcctgtagttcaccatttaaaaaagcattattggcatccaattgtcttagtttccaacctttaatgatagccaaagtgagaacaacccgaattgtttctggttttatgacatgactaaaggtctcattaaaatcatatcctccttgttgatgataccctttagccactaacctagctttgagctcagaaacactaccatcagggttgtacttaattcaaaaaacccatttgcaaccaataggttcccttccaggaggaagtttaacataattccaggttttatttttctttaaagctgtcatttctttttgcattgatgcaagccactttggattaagaagggcttgtttgatagtggaaggaaaaatagatgccatgaatgctttgggtatcctaatgctagatttacctcttgtctacataggatgttggttagtcacaacagggacagaggcactactacaggaggaaacagcaggctcaggtgcagtagaattgtgttgatgatgggagatagatgtgggagatggtgatgtgtttgaatgactgacatgtaaactggagataggagaattagggtagaggatattgatagaggaggaaacagatggaggaatagatgatgaagatggaaaaaggggaggagtgggggtaggggatcatataaccagtggagaggctgaagtaaactgttgtagtgcttctgttgaagcagatgatagtgaagtaggagatgtcttgtaaggaaatattgtttcattgaacaagacatatctagacatatagattcgaccatcttgagagaggcatttgtagcctttttgtgtgagactataaccaataaaggtgcagggaacagacctgtaattcattttgtttttattatagggccttaggttttgaaaatacaaacaaccaaatgttttgagggctgagtagtcaggtttggtgtgaaataatttttcatgtggagtgatatggtttaacaccttagtgggtaacctgttgataagaaagacagcagccttataggtttcatcccagaactttaagggtaatgaagagtgagctagcaatgttaatccactttcaacaatgtgtctatgcttcctctccacaaccccattatgttcatgagaatgaagacataaaactctatgaacaatgtcactggtttctaatagatttgtgaatgctctatattccccaccacaatcagattgtatgacttttatttttagattaagttgcagctttatttgtgttttaaactttgtgaatgtgggtaaggcttcatccttagttctaaggagataaagccatgtgtgtctagaataggcatcaaaaaaagcttatgtagtacctatatccattagaagattctataggggcaggaccccattaatctgtgtgtaacaactgcaatggagtagtagacacagttttagagttaggataaggtagcttatgatgcttaccaagacaacaagcattacaaaaaatcaaattcactcttattactattgggaatattacaattgttcataacagtttgcacagtatttttggtagggtggcccaatctattgtgccacaaattgaaattggataaaggtacattagagctaacttgaaaacactgagaatcgggaggggatgaagatgacacagatgcagaaactttgtgctctacagaggtaggacttgaagtggataggcattgatcaaacttgtatagacccttctcaactttcccaacaaataaagtcttcatactgacctgatctttcacaagacaatggtcaggataaaatacaaagaagacattattatccctagcaaatttagagacactaatcaagtttttggtgatagcagggacatggagcaaattattcaagtgatgagatttagaagtaaaaggagaagtaagagtggaatgaccaatgtgatgaatgtgcaaacctgatccattgcccatgtatatctgatcagtagcctggaattcttgggaagaaattaggttgtttgcatcatttgtaagatggtttgttgcacctgaataaggataccagctagaatttgcaactgttgaaggagtagcagtcatagcttgcatatcagtaagattagcagttctagggaaggattgaaatgattttgtccctgtaaacaaattatcaaattgataaaaacactgtgtaacagtgtggccttgcttatagcagagttgacattagactttaggtgtggtgtggcctcaaccaccacgaacagatccacgatgtccaccaccacgaggagggtatggattgggaaactaaggtggaggataagtcatgccatagccaggataaggaaaagcatagggatggcctctgtagggtggtggaaaaggcgaacgaactccattattgaatggggaagatggtgggagggtaggtctggtgtttgtaggctttggttgagctgcaagattggattttagtttggagatatcaagctcggagtcttgttgttcatttcttacttcatgggccatgagtagagactcaacttcagctaatgtgtagtcgtctttacgagttgatagagaagtgacaaaaacagagtattcacgcggaagaccattaaagattgcttctatgtgatcttaagaggaaatttcatggtcgattgaaggaagagagtccacaagatgtttgatctgaagcaagtaatcattgagattgctggtgagacgagtttgacgaagctgagtacgaaactgactgattttggcacgattttgagctgagtaatactgttcgagactgatccaaatttcagaagcagtgttgcatccaaccattcgtgtgagtatcttctcagaaattaaggaaagaagccatgaaacgaggaggctatcttgaatatcatattcaagaaattcatgactaacagtgcctgaatgttcatcttcaacagtgttgaatttaggtggagtagtagtagaatcaaggtattttaagagacgattacctttaatggcagcaagaacttaatgacgccatggaagatagttgttttcatccaattttactgacaacgagtgattgaatgacatagcattcggtttgggcaacgaagatcctggagctctggctatggaagaaccttgagaagaaaagtcagccatgaatataaaaggaccgagaaagcatctggtaccatgtaagaaaagcaaactagagtaaataaccagtgattgttttattgaatgaattgaattgattacactaggaataacttagctttatatacacagctaagatgaagaaagaattagttacaacaagaaggagttagtaataaccatagtcaaactaacataatagaaaagtacataagttgtaaataactctaacacagtaagaagctattctctaacaagtgtacactatagatgttatgagttacatttatttgttctttagtttcactagtcaagccatgttgagccacaaaaatctaaggtggcttcatcgcaacaaggaaaaaatcaattaggctaatgtatgtcaatctaattacttagcctatgtagtatctcccatacttgattggccacatcagctacaaatgctatattttatgggatttgttttttttttttgacgtaatattttatgggaaatttgattagcctaaaattttaaaaataaaccaaagatacttactctacgcaattagtgcctaatttttatttattcccaaattacccctcctatttcaaaatcatctccatatttctttgtcttctcgcttttcattttcgttattattgtttagatgtgcaatatgtggtttctttgcgtttttttgcttattttttggtaaaaaaaatgaattttggtaaaatctacattttcttagttctctatgatttttttttgtatatggtacgatggtgggtacgatagtaatgcaatctagaggttatagatgaaggttcagtagggtacaatggtggtatatatatgatggttgataaagttatgatagtacaatggtgatacaatagggtacgatggtggtgcaataggtgcttaaaatttataccataataaaatttagggatattggcggctaaaccacctgaattttaatttttttaacacttaaccacaaaaactaatttttgggggcaaaactacctaaactcacattctgtttcgctctgtagccctccgtccaaaaatcctgttaagtgccacgatggactgcctacgtgtacacaagagtacacgtggcaaaattttagtggttcacgtaattttgattttaaatataataaaaataat

SEQ ID NO: 299345 - DNA, 6301 bp, Cannabis indica
gaaccttaaacctttcttaggaccgattctaagccacttgctgagcgttggaagtgttaagaaacaagttcttcttctgggtctcaatactttatgggacttagggcatttttatggcacatatagactttagctagttaatttctaagtagtgtaaaaggatcttaagtttactcccaaaccactaggggttcacagagctcaactcctatttggtacttagattaactgtttaagcaaactattaaatctacatgtgatgataaagtggctttctcccaaaaggctaggctttcgtattccaggcatagctttattttttgcaccaacataatatcgataaaggctgaaaatacatcaaaattcaggcaatattttcatttccacaattttaatttacagagctaaattaatgaacaataaatttacctctcgcaaaattttgtaagaaagcagttgaaaacgtccaagtatttcaggcaaagattctactcccaattttttaggtataaggctatgaaaacttattttgcacatgataagaaaatagttgaaaatattaaaaattttaggcaaagttttctattcccaagatttcataacaaatatggggctttatttttacaaggtcatgccatttggattggaaaatgcaggagtaacgtaccaatgaatcttcaataaattgtttgaaggacaaattggccacaatatggaggtttatgtgtggatggcatgttagtaaaatcagtccaaattaatgatcatattataaatctcgatgaatgattttttattctgagaaaatacaaaatgaagcttaatcctaagaagtgctcttttggagtctcattaggaaaattctttagatttatagttaatgggaggcaaatcctaaaaagataaaagcattgctcgagattccatctcctaccaaaagaagtccaatcattaactggaaaaacaactacacttaatagatttatttcaaaattaagtaataagtgccttctagttttttaatgtgttgagaggcaataagaagtttgaatagacagaggaatgtaagcaggttattccaaacattaaagaagatttttaaactttgcatgtactatcaaagtcgataatgggagagaccttgttcctctatttagtagtttcaaaaaaagctataagtgcaaccttggtgtgagaagaagggaaaatccaatacccagtatagtttgttagcaaaaggttgttaggggcagagacgagatacacatcacttaaaaaacttgcattaagtctaatccatgcctcaagaaaaatgcgaccatattttctagtgaatcccattagagtcttaacagatcaatgattaagacaagttctcttaaaacccaatggctaagggcgtttaataaaatggtcgattaagctaggataatttaaaatttcaaaccatcccaaagatgcaattagaggacaagcattagtggatttatgatagagggaatgggtatggaaacaaggccaagacttgtggaagttattcgtatacggctcatcaaatgaaaatggctcggggcagggatcatattaatatcacgtgagcaatttaggttccactatgctctaaggtatcatttttaggcttcaataatgaggttgaatattaatcattgttagctggactaaggattgcaaaagttttaaaagcttaagcaattcattgtttcagtgattctcaattggtcgtaaaccaggtattgggagaatatcaagcgaaagggattaaaataaaataaaaatacttggagaaagttcaaaataacttaaagaaatttgattactataaaattgaacaagttccaagagaataaaactctaatgctaacacccttgcaaagttagccttgtaattcaagactaatgacctcaatttggttcccattgaaaatcttgaggaacctagtatttgcgagaaggaagatccaaatgtagaaacggtaaatacaagctcgacgtgaatgacaccaataacggattatctactaaatggaagaatttattttgataaaaataaggctaggaaactcatgtataagatctcaagatacacaatcgtagaaaattttgctttatacgaagaggtcaactcctatgtcgttattacaatgtgtattactagcaaaacccaagagtataattaaagaaatacacaaaggcttttgtggagatcatgtaggttggtagagcttatcaaagaaaataattcaacaaggatatttggccaaccataaataaaggtacacatgagtttattagagagtgataaatgtcaaagattttcacacattccttgggtgcaaccaacaaaattacgaatgatgaactctcgttatacgttcaccatatggaaaattgacctcattcactcattaccagttggacagggatgggaaaaatatacagttgtggtcgtcaatttctttacaaaatagacagaatctgaaccattggtttcaatcacttcaaaaaaagtcttggacttcatgataaaagcacaatatgttagtttggaattctaataaaattagtgtcaaataatgggactcaattcgatagtgatatattcacagagttttgcaagagaaatgaaatcataaaaagcttctctttagcagctcaaccgcaagctaatggccaagtagaggttgtaaataaaactcttaaagacactataaaaaacaaactcggcgcaacaaaaggaaaggttgatgagctaccacaagtcttatgggtccactgaacgactgagaaaatggcaacaggacacactccattttcaccggcgttcagctaaaaagctatgctacctaatgtggttaatattgttactcattagcgtgagttttacgaccagggacaaaacgaagagttattacaagaatccttaaacctgctcgaaaaaagatacaccaaataatagatgtgcaaatgcaaacatatcaataaaaaaatacccaatttttttttaataaaagagtcaaagaaaaggttagttcaatgttggtgatttggttttatgaatagtattcctcattacacaagatccaatagcgagtgtattcaatcctaactgggaaggtcaatatgtaattgaggatgtaataggagcatgagtttataaattggcttggcctaacgacacctggtaaaaaatacttgaaacaacgaacatttaagactttgttattagtaagaaattttttaattaagtatataaatttacttttaagtttatgtaatatttgatttttttttaatgaaatttacattttatcaagtaacataaagtttttactttaaattacttagggacagacatatataatattgataattaaccaaacattaacaaccatgttattcatggaaaggttaaattttaatacttaaatgccaagaaatttttttcaaagaaaaatagataaagggatctcaacaaacaggttcggaacagtaaaaaattgatggattcattctatttataaagcaaaaataataacaagtgttataacgagatttctaagatcaattttaatagtaaaatagagaagttaaatgtaaaaggatgaactaaatactcgcatatgtcaaaacaaaaacaccaaaaataactaagtataaaattagttctacgaagtgtttgagtttgtgattattacttgcacgaaaaacaagtagtaaaatcgagatgaatagcgacaagtcttgagtcatttcaaggaaagtaaagtttttttaataaaatatggtcaagtcatgaattgctttacatagtcaaacacatctaatctttcacaagtaaaatgaagaatatgcttagacaacatgtgtaggaaaatatatatgtgcatataaagtctaacatttaaatataaataacctagttggccgtgcaactaggcaaaggtcacaagtaaattaaaattaagtcttaaattaagaaaggcaaataatattatctcggccttcaggccattaactatatatataacaagattaactaagcctccttagcaggagacttagaggcaacttcttcttcttcttcttcttcctcgccttctccctctggtgctcgtttttccctcttgcagctttatcttccttttccattttcttgaagatggcgacacatttttctacgttgggttgcagaaagtctagggtgactcctttgttatttttccagactgaagagagacttttgagctattgtcctaaacattaactcaaatgttgatccggtcaggcagaaccagaggccacttgatctggtataaaggttgtgtaggccgaagtcaaaaagctaacattaatagagttccttaaggaaactctataccatgtcaagatagctaatccagttcttgttgtgaagccaaatggaacttggaaaatgtgtattgacttcacagatctgaacaaggtgtgcctgaaagattatttcccacttccacgcatatatcaaatggtggaagctacatttagatacaaactattgagttttatggacgtgtactccaactacaaccaaataaagatacatgtagcagatcaatagcacactagcttccaaataaataaaggtgtatactgctacctagtcatgccctttaggttgaaaaatatcggagccacctatcaacaattagtgaataaaatgttcaaggatattttgggaaagaatattgaagtttatgtggatgacatgctagtaaagtccaaaactattgggggagcataagaatgatctggaagaagctttttcgataatccaaatatatggtatgaagctaaacacaaaaaaatgtacctttggagtttcttcatggaaattactaagatttattgacagcttatgaggaatcgaagccaacttaaagaagatacatgctctcctagatatgccctccccaaggaaacataaagcttaaccaaaggattgcagctctcaagtgatttgtgtcgaaaacgacagataaatgcattctatttttcaacatcttatgtgaagcaagaaatttgaatggatcgttgagtgttaagaggctttccaaaggttataagaaaatttggctagagctcctattttatccaaaccgattgagaaagaactattatacctttattttgcagtgttagatcaagccatcagtgtcgcactagtgcgagaagaggaggggttcaatttattatgtaagcaaagattgatgggtgcggattctaggtatcccttgatagaaaaagttgttctattacttactaatagcctcaaggaagttaaaaccgtacttttaggctcatgtcattaaggtattcacaaaccacaatcttcgccaagtcctggaaaagccagaatcctcaagaagattgctcaagtgtgctatggagctaagtcaatttgacatacattatcaaccaataatatctatcaaaggtaaagccctagctaattttattatggaatccaccgaaattaatgatgactcagaagaactagttataggactggtgatctggaaagactacattgaaggagctttgaacaaaaaaggtgtcggagctagagtaattctaatttttccccaagggcatcagctccaaagtgccctccactttcaattttttgcctccaacaacgaggcaaagcatgaagcaatgattgccgatttgcatctagccaaggatgtcagagctaaaaaacattgaagtttatagtgactcaaaactatttgtgaaccaaatatcaggggagtttcaagccaaaggagaaaagatggctgcctatatctccaaagcttgggaactacttcagaatttcaaaagatacaccatcgggcgagtcccaaggaactagaatgcctttacagatatgctggccaagctagcaactaattcaaggataaagaaaaatagagtggttcctgtagctcgactcgtcatgccaagtactcaggtactaggggtaaatgtcattgaccactccgcctcttggataggtcaaatatacaaatttttattttagagcactacccacaaatatagtaaccataagaaaactccagtattagactctaagacttgtcatcatggatgagaggttgtattgaagagggttatctatgccatactcgagaagcatagttgggaccgaaatcagtgcaattatccatgagatacaaaaagacttttgcagagaccacacatctggaccaagtttatccaaaaagatcatccaacaagg

SEQ ID NO: 299346 - DNA, 2313 bp, Cannabis indica
taagtatactaaatatattttggaatagaaaaccaaaccacataaaatcgacacatatatatgtctttataaatggataatcataacatatgtaactcaatcttaatttcatatagtccaatcagagactaaacccacaatcagcttctttttttagcattatttggtagttggtttaatgattattataataataatgatactcagccgcaaaaggaagaaaatttagacaaaagaatgttttcaaattcatattcctatgcaatcaaattggatttgtaccaaccaagagagcccttagactttacccttctctcactcccaaccccaactacacttctcatcatccaactatttccctacattgttgagttgaaacttaaaacaaaatacaaagaaaatccatatgaatttgattgttgagtcatccgtttcgagactaagttttatttttgaacactttctcaaaagactccaatgtccatccttatataccgaattttagttatatgcctaacaatactaagcgaaaatattattaattatagtgaaatcacatctattgtggtgctatgaccaaattaaaacacgagaatcttataatttaaaattgttatgttactttacacttgtagctagggtaccattaatttttgaatggttaatttgaagcttctcttatttctttatgagacgtttgggacgaggattggattttgcaggattaggaatgtaaaattcaactcataattggtaaattaatttttaaaggctcgggatttgtattttcaagtaggtttcacttttaagttaatcttaaacccctctaatgctttcacattttctaaatcctccaaacctataactcccataacaaacacccgtttatcctatgattggtatggaagaaaagtgggaggaaataaaggaaaagaacacaaaaaatgagatgtttggtaggaaagaaattaagaaaagagaaaattaagaatattttttttttggagaaatgctaaagggcacccatagtacccatcacccttataatgtaatatcattgttagagaaatttaatatcaggccatacttattttaatttaataaaaattataaagaactgataattaattataagacgtcatgtcatagaaatgttaggtaatttagtatcctatagcaatactcaaaattttaaaatagcaagaaaaaagaagagaaaagaagagaaaagaagagaaaagttttataattgtataaaaatgtcaaattattaaattattatttcctttacaaaatttatattatattaatcactgaagggtaaaatagaaattttaaaataactaaacattctttccttcttacatacctaacaattttgtaattaggaaggaaatatactttcctttctatctctccatattttctttccttctaattttccttcctctataccaaacatattgttagtatttaggaccaacctttcatgtttccctctccccataaacataatttgaataaaatattactatgagacacttatgatgcttaacaccatgatgaagtgtcatcctataattagataacaattttttataatatttattaaagtaaaataagtggaattcgatatttagttgcaccaatataacgatattgcacatcacaagagtattaagcaccaatataagtttcgtttagcattttttatttgaataatataagaaaaacaaatatgtatgaaattggttttgaagttatttttttttttatcaatgttcaagttactattacatcaaattcaataagaagattcttgctttagtcttttggggccaaaccccatgtgtctcactctctagaaacataatttgagctatgactgaaaaacaattcaacttctttcattgactcaatgatggccccaaacgaaaataagggactcttaatccaactcttgtacctctcaaattccattcacactatttctatttctatttcttcttcttcttcttccattatgttgtttttcttttgaatatgaaaagagtgtgaaaatggctactattccttccatacattattcaagaacctaaacctctcacacccacagctatgttaaagcattaaagaacttttcttattatctttcatcaaatgtcattgacaacaagcaaaaacactcaatgaaactagccttatttttctattgaattatgcacatacttttagacaaagttcatagttaattaactattaaaacaaagagtgaaaaggaaagctataaaacaaggaataattacataaact

SEQ ID NO: 299347 - DNA, 7223 bp, Cannabis indica
aaagaaccttcttccttttcaatcattaaaaaaaatacataattatgaagaaaaacatgaaggttgaaagaaaacctctgtataaatgaaaaataccttttgctgaaggaaagggaagagaaggacaaacaaattgccatagttcaactaaaggtccttcggatttttcagaaaaagaaagcgctttttcagatttatatatgaaacatgactttgtgaaaaatattcatgtatgcaaataccaaagtaaatttggaacggagtcagaaaagcttatttcagggctctcatcctataatcacagtacaacagactcagccggattagtgactacaaactcaacggaagtaaatcgataccaatggtatgtcgatatcgttgtcttcgtcatcctcacacgccacaaccacatccaaatgccgacggtacgaaggtagatcaactttagccacttcccttgcaagatccaccatcttcctgtccatgcggtccttgtgacgcgggaacatactattataaagcaggcaacttccacaggagatgctgtaagcatttaggcctttgttcttcaaccaatcaagaagttcccttagtgttggattgtcatttacaatccacctatcccaaacagtccatttcatgtcacggtgcttaatcaccttcggaggaactggttcggccatagagaacaatggtagtgccaaatttgcaaatgtgtttcggtagtcctctagtttgtggcttccatccaaaaccttgtaaagctccaagcatacgaggcctgttgccatggcagtcgaggttgcaattgcaggaataattcttccagctataaatttcgccttcagcttgtcaacctcaggaatgctgtaatttctggccctcatgttggcaagaccagctatcagatccatgtggtagttagtatcatcatcctgtatgacagtttaaggctcagtaagtaagaattagaaaacaacacagagaacaacctcaattgttaagggttttagaagagcagtcagttctacaagactatttataaagaatcacaattatagaattgcagtctgtatctaagattttaccaagaagaaattaattttatgagggagaagagtattgaggaaaattaaatggaagaaaatattttcctaatttagtgttttgtgtttcttttttattatatttataattgttctaaatctaaaatacaaaggattaaaatttttttcttttttttttgcaacggttgtttggttgcagactaaagcattggcttttccaccattttggttgaatagccattccctcctatctaagagggaatttttttcactccatattaaatcgtgttataagactattcccaattttccctgttctgattacttccaacctaacattcccattgtagccaagcattcaagataaataaccaacaacttgagtctagttcaagtggccaatccagattagagcagaaaactagaatttcttttttcaaattaaaacagcttggactgttggacagtatagactctatcttcatcttaaagcccaaattatatgcaatatatcctattgaatgttcatatattaatggtggataaaatgcgatgatgtgattttatcaaaaaaaaaatggacaacagtaatataaataaaaaaatactactaaagtgagacagaaacagaccttctcaaactgaattggtttcattttatacccgggtgccaagttggctcggcaatgttccaaccttgaaatcaaatcattaattaccagagtatcatctacagatgcagcagaattaatattggtagccttctcatcggtctcaattttgacaccttcccttggctgaaactcaggaactatcactctatcaacagcttcagccaatttattagggttgctagcccaatcaggaattggaatgccaaatgtctctgctcgtaatattgatgctgccataacataatggaggtgaccaggatcagaggctgagaactgcagtggctgagggaaccgcttaggagctgaccaaaatggagccccagtactagttgcagcattttcaggaaaagtaaaaatcaactgcttcacacggttggagaagtaatcttcaaacctgatggcgaaaatgaacagcatcaggtgatgatatagaaaagacaaaaaatctaaaggtaaattaatagtttcaaaatcggaagaattactttagacgagcccaggtaatgcaatcttggaaattctcgcatttctctttgtcaagacactcaagaacacgatctaatgtatccctggcctgggcatcaccagcattcctcattgcagttgcatattcacttgggttggacagatacgcatttacttcagcaggggtcttctcaaccaaaccctcaaattcagatcgggcccatgtcaagcagtggtcaatgttgtgagggaaggagtgcacggtgcacattggtgcttgcttctctggtggatcccttgaggcaccataattctctgttaagtgagtaatgaccatctgggtgttgcatttggcaccaagagttccagactcaagaagtggcttttggaaatataagcacctctgatccacataaaggcgagcattgacattgtctagcgcattgattacaacattcacattctcccagaaggtgtcattgaaaacattttcagtttcagagcccactcgattctgcaaggcttcaatattgaggcgaggattgattgaagtagccgcagaagcagcaactgtggacttggcctgcccaatattccaatcacgaaaaaggaattgccggctaaggttactcttctcaattacatcatcatctgttattgtcagcttaccttggttcccacatgaaacccccatcaacgcaacattttttaagaactcacaacccagtgcaccagatccaacaatgaacacaatagcatcctccattttcttctggagcttagacccaaaaactgaaatctgtgcatcatagcgactatttaacggtttaaaatcactggagtctagcggctctgttggaagtgactccaccgagtcaaagtagaagaactgtagggggaaaaaaaggttagcttcaaataactggtaatgcaaggaaacattaaaaatctatttttaaagcacaaatataatgatcttgaagcactagatagttttgttagaaacctatttttcaatttactaagatttgcaagtgaactaagatataaagtatcaattaacatttggtgaccaaaactagcaggcaatgctgaaaaaaaaatcaaataacactgatttagcggattggagtgggtgagccaagctcatgccaaatccatgccaaaaaacactgatttagcggattggagtgggtgagccaagctcatgcaaatccatgccaaaaaaggggatagccccaaattgggagaagcattctaatatcaatattcaataataatgcatacataattacaaaaatgacccaaagaacaaaatatcaaaataacataataaaatagctactaatatttgattacaatctcctacatcaaatgttcaccctaggtaaactgtcaatctagccatttaatggtgtgaactgtcacaaaattgcaagcccatgtttcacatgggtgaccatggaagtttacgaattgcaaataaatgtactacagtttgcatgcgtattagtttaccatgtatatactgattcctatcaagttccatatcatgttgacagcccaaaatgtaatgagtttatggcatctctatatcaaaaaatataccagcatttttacattataaaacaatgaccgacaagatattagaacatctaaaggctaaaactaatagggagacaagactggatattcacaaacctggtagagtggatgaaactttccagagcaagcttttaccacttcttgtccaacaataccaccaaacatggcagccatagggttcagtactgcccttgcaccaaaggcaaagtgccgtagaatttttggatttatgtcttctaatttactatctcccaaactttcattgatgttaccagcaattgatacaagcttctgagcatcctcctctgagcccgcaacagggaaacgacccaaatcagatacgaacttatctagagcttggaacgccaagtgtagaaggggtggtcgatcaaatttggagaaatcactcaaaagaaaatcaccaggatcactaagtgcttccctcaatggcttaaacttcaactttttgggctgtttcacctgtgtaacaataccacctctctcataggcaccaaaatttgaggtatcctcctcaaggacgaacgaataagcccttgaactcttaatctttcttggttttccatcattcaattgagtcatcccccgaacttctgagaatataacgtaatccccatcctgaaactcgagtctttcatcatcgacacatgatacaagagcagggttgtcattgctaatggatgcaataataccactgtggggctcttctccatcaacatcaaaaacagtaaactcaggtccaaaatcacaaaagatagagccaaaaagacccctgacttcagatttaatgaaggcaataggaggttgatgattatgacagtaatcattgaattcaatagctttttcaagaccaatgtcagtgaagacaacagcctgcaatacagaaaataaatagatgaatacagtccaattagcaatgactgaaaaacaaattggccacccaattccataagtcatatgaacctgtattgttttgaaaattatacaaccttggaaaactatcgaccaatacaaaagactaaaccgcgataatatgtaatattaatagtaacgctgatggaaaatgctgttgtatatatatcaaatgttgtgatagattgatagagtacaaatgggtacctgaaaattagaaagttgttccttggtcaaagttgttgtcaaagtttgcacagcaacagcattgttgagctcttgcaacttttgaacagaagcaagcgctctgttcttaccaacatcattctcagagaaaataaaattactagacaaatcccaaagctccacattcccttcatcgtgcaaagtcacagacttaacaccagcaagaatgaggttcttcgctgcattgcagaaatcatgttagacccatcccagtcgtacataacaatgccaggcacaagttaataaatcaggtctgcaactgcagcattataaagtttacaaaaataatttctttaaaatgataactagtaaaacccgtgtatgtcctatcgaaaggcctcaatcaaaatccttatgaaattgatactaatataacaacacaaaattatcccaaaaaataaaataaaataggtacacaacagaaatgaagtaagataaaagtaagatacgtaccaatctcggcaccgagaccctgcaacccagagataagaacgttcgacgcgaagagcctccgcatcgtgtcacggccgtagacggccaactgccggctgtgcagatcctcatcgatatcggcgggatcacctggggacatgttgagcgagaattggtgttcctccttagctacagtattaccactatttaagttattatttccgaggctgctgttgctgttgttcaccgttgattcggcggcggagacgtcaccgatccgatgcttcttaacaaaagaggtgtcagtactgttgttaatgtcagtctcttctacttctacaaccactccttcaccagctctctttcttggaagcataaagttcagtaagctgctgaaaacaccaggaaaagcacatcaccaataacgatcggcgcccaccgccatttctaaccctaaacccctaaatcgcgcaagatttacaagaacaaggacaaaaataaaagaaacgaaacgaaacaacaactacaaaccagacaaagaaacaaggttaaaaaaacataccgattacacagcgatgagaataagaagaaatgaaaccggagttgcaggtagatatatatatatcaagagaaagagagagagtcagaaaagaatttcagcttcagattgtcagattctgctggtggcgaattcgtctacggaagaataatcttagctcgatgaagagtgagggagtagggagagagtgaaggaaaagcctgagcggttcatatagtggggtttggagagagaagcgaggggtatttatggatttgcattttggtctagggttttttggggagctgaggacaggagctgaatgtggattaagggtaccattaacaaagagagaccgaacaaagagtacaccgcaagttcttttgtttgtttgttttttttttattagttgagagagagagaaactgatttatttatcatatatttaaaatttaaatatgcaaagaaaagttttgtaaaaaaaaaaagaaacaaatatgcaaggaaagtgagtagccagcaaagtcaagggagaaagagatatggggcgagtggaaaaatcaaatgccccaatgtgcatcgtggcttgcttaagtggaaggaggcagcaggtgtgtaacgtcgtcgtattatagataatattcgcttctcttctacttttttgtttttagagaataaatcggttatatattaaataatcaaagttaagatacaatagttaataacgcaaggagagtatcctctaactaaatacaatttgtgtccaccaaaagaatatatttagctaatatgtgagcatcagtatcatcaaaattttgaatattagttagaatacaatgaaaattaaaaactacatctttagaagattgtaattcttttgctactataagagaatcagtttcaatataatgtattggaaactgcaattcattcagccaccgaagattgtagaagatcgacatagctttaagtatttttggcttgtaacatcgtttaaaaggcattgaaatcgctaccaaaagttttgttaagaatattttactaggatttagatttactaacaagtatgttgattgacatcctaaatataaattctctaaaacaatgaaataaacacataaaggtttaagaaaaccttacattggttgcatcgaaatataatgactcattctattcaagatctctagcacgtgactcatttctgtagtagagcattatcaagatctgaacctggatctctttctctccttcgggtttggttaccac

SEQ ID NO: 299348 - DNA, 3037 bp, Cannabis indica
aggtccaatcccctctgagcttgggagctccaaaagcttgccacacttgatctttccagtaacagcttcaatggtcaaattcccaacactttatcacacctcaagagtcttcaatacctgtatgtaaactcatttggatttaattttttgagttaaaaagtatttttcaagtttaaagcttaagttttgataataattactaattagtacactatttggaactggattaggcgactgggcaataacactttgagtggagcaattcctgcatctctggctaacatgacacagcttgctttcttgtaattatcttcaacttttagctttttaatattacttggtatcaaaggctccattacaagttaaatgctttcttgtaatcctagggacttgtcattcaacaatttaagcggtccagtaccaaggttgtctgcgaagaccttcaagtaagaagttttctatgttattgttgttgaagaataagaattagaaatcaacggtttaaatttttgaattttcacagcattgtggggaaccctctgatttgtgtcactggaaaggaacatgtgtgttcggccacggcgcagtcagcacttccttttccctctaataattcacaaagtaactattcttttctttactagttcaaacatttccttctgcttttttctccttttctgtaataatgttgttgtgttctttatttttctaaagcacacaagtactatttcccttttacctttagttggagcttcatgagttagtttctaaagcaaaaaaaatatgttaatgattcagtttaagctttttaaggaagattacttgacagattatcattaaataacatgttattgttacatcaactgctctaatttgcttctttttttttataccacttttgaagatgctcaaactgctaggaaacccaaaagccataaaattgctttagcctttgcttcaagcctaggctgcatttgtctactaattattgggtttggcttccttctttggtggaggtacagacacaaccagcaaattttctttgacgtcaacggttagtaatttaaactctgttttttcttttcttttaagcagtaccactaaaaaagtaactgaagtagagactaacagttgtaggctttaaaaaatttcagagcaacaccatgaagaagtttgcctgggaaacctgagaagatttcaatttagagagcttcagttggcaacaaacaacttcagcagcaaatacttggttggaaaaggtggtttcggaaatgtctacaaaggatgtctaagagatggtacagtaatagcagttaaaaggcttaaagatggtaatgctattggtggtgagattcaattccaaactgaagttgagatgatcagcttggcagttcacaggaacctccttcggctttacgggttttgtatgacagcctctgagaggcttttggtttacccctatatgtcgaatggcagcgttgcctctcgcctcaaaggtaagctggcctgtgatgtccacagaaaatgttgagttgcttcgtactagattatcatgtgcataaacataagttttatctatgcagccaaaccagcccttgattggagtacaagaaaaagaatagccttaggagctgcaagaggactatgtacttgcatgaacaatgtgatcccaagatcattcacagggatgtcaaggctgcaaatattttgcttgatgactattgtgaggccgtagtgggagattttgggtgccaaagctgctagatcaccatgattcacatgttacaaccgctggtgagaggcaccgttggacatatagccccggagtacctctaccacaggacaatcctactcgagaaaacagatgtttttggattcggtatacttcttctcgaactaatttctggccaaagggctcttgattttgggaaagcagcaaaccagaaaggagctatgcttgattgggtatataactaacaagaataagaaagaaccgtttcttgcattttctgaataccctttagtctttacagcttcaacttcaacaatcctcagtgattgatgtaatttgtttcatgtatgtatacaaatgcaggtgaagaaacttcagctagaaaagaagttggatatgataattgataaggagttgaagaaaaactacgatataattgagcttgaggaaatgattcaagtagctctactatgtactcaatatcttccaagttataggccaaagatgtctgaagtggttcggatgcttgaaggcgatgggcttgcggataaatgggaagctactcagagagctgagtcaactcgttgcagagccaatgatttctcttcttcagaaagatactctgacctcactgatgactcttccttgcttgcacaggcaatggagctttctggaccaagataattcacattatagaatcctcaacatgatgaggacaaagaagtttatatataaaaaaaaaaaaaaacttaaaagtgaaaaagaaattcaaaatatcaccatgaatagatgcgagaaatgagtcttctttctgttgtatattatagcaccatatttggagctcaaaggtggtgtctttattccactcactgtacagatctgatattgaaaaactgatctttttagaccaagttgtctctcatgccagttcagttctccagtgtttaaatttttactaggaatgtcctaaacgaggagttggtagacttcaagtgagaataataatacttttggggttgtaagttgtttgtaacattacataaataaataagcagtcaacatcgtttacaaatttgtctaaaccaacaacaattcagagtgtcaacatcttcttttgacagaaaaaaataaatcaatgatcactgataaaaatgtacatcagacacattaggactaaataagccaaccaaaaatttatgaactatcatgttatgttacggcttctttgaaatatgagaatgctaattttgcgtctgcgtaataataataaaatatatggaaaaaaaaaattacacataataatag

SEQ ID NO: 299349 - DNA, 6141 bp, Cannabis indica
tttttccactctttatcttagttaattttaattatacataaaacccaatttgccgattatttatatacagatattcagctcaaaagatgaagaagacacagaaggtggggagaaaaagaaatcaaaaggagaacaagccaaagagttgcttacaaaatatggaggagcttatttagccacctccattacactttctctcatttctttttcactatgttatgttctaattaatgctggtgttgatgtccaggctttgctgcaaaaggtacactcattccaataccaaacaaagccttattatcatcaatatcaatgccatgtttgcttagttctagatcgatacataatagattttaacagaagaaaatgcaataataaataattgaataagacatatgtgcactcactcttcttttttctttcttggtttcttacataaaggtgggaatctcagctaatgagactggagagaaagtgggaacttttgctttggcttatgctgcacacaaggctgcatctccaataaggttccctccaacagtagcacttactcctattgtggccagttggattggaaagaaagtcgacaaagaagactagggttaggttttaaatgttaaaaattatgtgtaagaattttactctcatggtattgaattaatgtaaactatctatactagtgttacaaacacaatcatataatacaaaatttcattttcaactgttgaaagtactcaatatttcagttatactaatgttgaaatgaatgaaagagggattaaaataataatgcatgtttgttgattgttaaaaagatcactactaaccacatttctccatactaaatgttagttgggttaattaaatatatacactgttttgacaataaattacaatttttcttatttgctaatagtagatacatggattctgtatattactcaactgtacaatacgagtcaattgcctctatcttagtattttctttctgttctcaagtttccagagacatgggatgaccttccatccaaccgtcgagtcacaagcgtgtgcaaaaggggcttagttgggaatcaaaggctctctccttaatggattttatcgaacacattttctttcacaggtttcagtcatctgcctgtattattcacagtagaaggcacttctgttggattagaaggcagtgtctgaggctttggcgtgccaacagtaacagcgggatagtcttcaggtagcacaaagtcattccattccactgaagctgtagcttagtgtcaagaaaaattcaatgatttacaggcttacgatgagtgaaaatttgagcagcaacaaatatgattttaaattaatgaaagaaatatcacaaagaggaggatacgttctgtgttccacatgtctgtgatgctaacatcagcagcatctgttaaaagccagtagtctgcctcactctgagcaaagaaaacagaaaacaccaaaactcggattaacttgttcctttaatagtcacatattaatatattcagagcattttcttgaaaattcaattataaacttttgaaagtgctttaaatataaaaacaagttgagtgattctgtgagtgatatcccttggacaaggtcaaaatcaaacttacatcaacatctgagggaacaatcttcatgatcccactcacagaatcctgtggggcattaggatcaacacaagtttcgtgatcatgttgtctctgcaatttggtgctatcatccttgcctccatcagccatatccattgttgctgggttctcattaactccagaacacgatggaatgttcgcagggacctgaaccccatcaatctcttcgaacttttcttcaaattgactataatcaaggtagaataaagatgggcattattaaactcatccaaactcaaagtgatgcaagcacaaaggaaaaggataaattaactgcacactgcataagatcaagtcgatatataaccaaaagcaaaatagtacctaactaggtaaacatctattgggcccattgtgctccttaggactaccctatatctcctctggcgataatccacatcctaataagaaattgaaaattcttgctgagaaactcaagtgtatataaatgaattgaataaaaatgaaacattgtcatatgtcatccactttggaactacctcatcaggatctggaacttccagagtggtaccatgtggagccttgattgctattaaggtttcattctgacaaaagcaataaattattagtttaattcaagaaagacaatgtaagaactgtgccaagcatgaatgataatttgcaagaacagcaataaaccaacctggaagcagggtaaacccttgatatcatcttcagtgacaaacagccacctgaaacaggaagttgtcggagtaattaagccttttgaaataattgtgtaatgttgaagtgactgaatagtgaagaatataaaagagatgtaaacttacttctggttattttcatcttcactcaggtctcttaatctttcttccatttccctgccaaaatttagatgcatctcagcataatcggaatgttggtcccaaaacaaaatggaagcagaaaaactacaaaccttatttgctcgtctactgtgcactcttcaacagataatttctcaacttctgcctgcaaagagaaaatatttctgtaaagcaacataactgcaataagatgataaaaaaaaatccggttgtttacagcatgacagatgtggaaatgaattaacccgtcctctaactgatatcatcataactaaaggtataaattactcaaaacaacccaccaaccaggcgtatctgagttctgattactttcatcaaatgtattgctaggaatgtgaaaccagtgatgcaagtattgagaactttcaagttccgattacttttgtcaaatgaattactaggaatatgaaaccagtgatgcaagaactgagtaacttcaaggtagaaaaaagacgtgccaaatgaatgagcagaagttctcatttacgaaattaaacgccaaagtagaattctaaccaacccacgggtaacaaagtatattaaatatcagctcatttcattctatcactttcacactagtttttgctattaactaaaagtgtgcatccagctgaagatcaacaacactggcagagtgagctgacactttagaaattaaaataataaagaaggaatattttcacacttcaatacacaaaaaccaagctgagctaaatgatcagtaagccgaaaaaacagattccataatttctgtacctgtaagctagcataattgtcatcagcatccccgggccttgagatatcaagtcccctaaacaatcagtagttcaagtcattagaatttgagtacttcacatgtataatgtttactacatctacattttaaactttcacattatttaagcaatggcatcaaactttacaaaatctaagaagcatttattatccatacttccactgaattctatttttaagcttcttctctataagaccgattccttcaaggacatttgttatgtcatatattcgtctcttttggacctgtaaaaacaaagaagaagaagaatgttaacaaaaactacaccataagatgatgaaccaccaaccacaatagaccaccaggggaaaatattatagatgctacacctctaaagtatcagcagctttattcagatcaaggataccatcttccgcatgcttgattaaattgatgaacttcttagtcaagagacctgaaatgaaatgacaggatattttggtattctcatacttattccctatatagtataaacattttgtagatttaagaaaataagttaatcaaagcgtaaacaagaattctcatacctagagagctgtcataacgacaaggaccagctggggtaagattagggccagaaggagaacctgtcaattttcacaaagaatcccactaaatgtactggaacatagaacgaattatatgggcgccaactaatccatactttctggagcgtatcaacttatagttaataagaaaaacttaccgacatttgaaataggggtttgaggtctagctttactgcactttgtaagccttgatgttttagtagcttttccagcttttactgatacaggagtctgcagagagctattaactacttcaaatctaggacctgctctatcactagattcaacttcataatcaacgatatcaactttcctcttcaactgcaaaacgacatttagttgtcacaaaatccaattaacatcagcattatatgaacttaaacaaaagtaatttgtataggaatcgaatgagaagcagagacaaaataaaagtggcacaaattggtaaccatgtcatttaaaatactattgcgatggaaacctttatgcttaaaaatgaggctgtttaatttaagaagtaagaatttcacgtctcaaaaccagttaacaatcatgctctcttttctacagttttccagcaagcattgaaatcttagaagggaagaaaaacacgtacaaatgcactcataatgacagtatggcctacagaatcttctcaaaacataacatgttttccaccatttatagtatgacaaataataactctaaactctatactgtgaggaacataacaagtcattcataacagccaaccactgaagaattgctactctataaaggttaaccatctatcaaacacttacaattggcaaacaataagcattcaaaccaaaaaaagtgaacagcattacagcttaaacaaccatttaaggaccatcaaagaaaaacaacaatcaacaaatgcacatacagtaaagtgtctagttgttcatatcagcgccaactgaatcttcaataagccgaaaaacattacactaaaagctaatgcagttaatgcaatagtcgataaaactggagcagtcaaattaccaaaggaaatttttatgcataacaaacttcagttgacaatttatcacaaatctgaagttcaagaactaattacagtacaatctttgactttacaactacttgaacaagcagatcccaatacaattgtcgaataaattatgtcaatttagaaccaaacaacctttcactaccaaaaacactcaaacaacgtaagctaatcataatttaaccaataaactggaaaagattacagaccagaggcttaacaacgataccctcagcttcatgatcagtgagtcggtgagtctcaggaccgaaccggtgataatcggcgggaactgaaaacggcggcttcatagacgaaaaaggaagctgatgaggctttaacggttgccggatctgctcagacggctgagccgaggggttcgaagcctgcgcgccggacatgggagtgagccgaaccgaagatcgaatcttggagggaaagaaaagggatcgaaagggtttcggaaaataagaaattgggaaagaaataaaaaaaaaaaaattggagggaaaattttgattaatgaaaagagaaaaagaaaggtcggttgggaattttggaagagagttttgagatctgattaaagtgataattgagaagttgagtttagaaagagaaaagaaaaaaagcgggagaaagaggagaacagaaaacgagggaaggtttggcaaagcaggaaaggaaggaaaggagggaatttggttcggatatagatgtggagggaaggaaggaaggaagggagcacttattatatatttttatttacatttttaatttatttttaggcaaaaacaaaattggtttggttgtgttgtggtaatataatgtggttggtttcttaagttaagtaagcattaagaagtggtgtagtgtttccaattccactactttagtcaaaatcattcaaatcaattttattgtcgacaagtaatatattaaaattgttttttttttttaatttgtaataataaaataacaagagtaataacaaaattgggtgttagagtttctaaaagatatttaataatgactttcattttatctctttttgaaatgatttttagattaatttctttaaacaaaattaaaattaaactaatttgtaaagggaaatttatatggtatactaacttttgttatttttttacaaaaatac

SEQ ID NO: 299350 - DNA, 1082 bp, Cannabis indica
gtaaaaataaaaaaaaaaccctatataatatgaaaataaggtttttataaaaatgttgaattttgagtatttacaattttattgtcacataattttctttgacaaaaatacagtctttttataaaacaaccgtaatataaaatagaataatcaaaataacagtaaaacaactaaaaaatatttgtggaataacagtgaaaatttaatacggtacagtataaaatttatatttttgtgaaaaaaaatacaatatttttgaaaaaaattctaccctacagtaaaaaaataaaaaatttaaaaaattcagtatgtggtgtaaaaacccttataaaataatgttacctacactaaaattactaaagagtaagtccgaccttttttttgggaagagtaatatattttacatcaatttattagtacaaatagttttttaaattcaatgaagatcgagtgacaccaatttttttttttattcaagactcaagagtgacaccaaataagtgtaggtaaattatgacttttgccacaaaagtaatacttagtgactcaaatgcaatattttacatttttttttttatttttaaatttaatatttcagaatatataatgactttcatgctataaaattaactaaataatcattttcatgatttcatcacaaaattttatttaaaatttaatgatacatttaaaataaggttttaaattttatgtgtgagatatcattacttttatcgagtttaaatatatgtatataataggtggtcaaaaatgtgccaaagacacgtgattcttgttaaaattaatgaattaataatatttcttatttttattaattaatatctaattaaattagtagatcaaatgtaaaaaaaataaaattttaatcaaaattactaaagataagtacagattaatattagtgccaattaattattgagtaccaaatcaatatggtattgaacaccttaaggtgtcacatatcaataatagtacaaaaatcatttaccaacaaatagtatgaagattattcgtaaaaagtaaaaaaagaaagacaaaaaaaattactaaccaattattgg

SEQ ID NO: 299351 - DNA, 4304 bp, Cannabis indica
ataagggttttatgtagaaataaataaaaataaaaaaaaaaaaactgttttgaagtataaaaatgaaaaagcccctaaataatatttgtcaaattataatatataaatatgaagttttatatgtgtaaatgatgatctaaaaggagttataaatcatttatattcaaagatcataaaatttgtaactcatcttaataatcatccctccataataaattgagttactaatgttatttgaatatgaataaatggttcctatggaaatatagtcactgtgacttatttctatcatttacagggtgtataaatgatataaagtctatgtgaaaagttttgaaccgtttggagttattttattaattgctaaaaaaattggtaaataattacttgttaccaaattaaaggcgacatgtcgccgaggaagaggtgacatctaactatttttcagcatgtatttttaatattttatgaacgttgtgcttggttctaacaattctcaaaactctcaaattactcatttaatttcataaatgtctaatttaatatcggtaacatctaagaattttatggtagttattcatatttaaatgagagtgaaaactctataaatagagaccatattgttcacttgatatatatattgttgaatgcaattttttgtggtagaattttgtaagaatatactcatttttagacactaagttggatatatgaggcttaaaaattattagatgcatttctaaatttttttaagtatctatgttagataggaaatgacttttagaataaagatgtaaaaatcttagtcaagcctgttaagtgttgttgagtgtaattatttttattcttctctatttgtgatcctcctatttcctatggtaatgagaaaatttccaactaaaatttggcataagacaaataacaatagtaatcgaaagcatttgtacatgatttattttttatttttgactgaaacttgatccaaggttgatattgtaatttcaggtatatgtctacagaccagttgtcccccaaaactggaaagaagattaattattatgagttcatagcttagccttaggctacacagagtctaagatagtcaataaatagttatatgtacacacatgagtcatgacacgtacaagtatctatatataatatatacgttataaatagtctttggtttgtgaatattaatttgccattttggccgcacgtgcttctttaactttacaagttaatgtataccaaaatttcgagctttctgtattgtacacatttcttaatttgtggtttatttatgcccacttgacccttctttccattttaccattttctgctctgcccttctatccttctagttcaggtaataaattacattttacacttttgcattactataatatttttaaacattgctttagtaataacactattgcaacaaaaaaacaaaattgatatttttggtggtgtaagacttattctagttgcggtaaattttctgaagtatatagcatttgtgacatgtataggtaacaaatgtttggtaattgaaggaaacgcatttaagaatgcctgcctgcctctgcagaaaacgactcttcagcttgtggaaaacgacacaaatgcccctccttcttagatactccaaatctaacgtcaattttaacaaattctcttccaattatatacccatttatttatttataaatttgtgtcttgttttgctttgattataagaaatttactttgataatgtccaactctgatagatgatgatcttattttctatcattgtgtcaagttataattgtacttaatgatcatattatctaatagcctattattagctagagctatattttatgggtggtagtgaaatcaatttaaacatgtataaccagctcataatttaaaggaagaaaaaaatacattcaaaaccaatccatgtggtagattttttttattcttatttttaaatgttgaattgataaccaactataataaatattgtttcacatcaaaaaaaaaaaaagaaaacgataattaatattgtatagaattttatgttgggcactatgctatgtattcaaatgtcagtaataaattaacaacaagtttttctttttctttttcttctaaaaataaatataaatcattttcagaaagaaataagaatatataatatataaatagatagaaatggttgcgtccagttttcttttcccataaatttatgacataagccattcccgatcctgcaaaaatgtcttcgtactattttcacaattttcaatttttggacggaatattcatcatttcaacccctatttttatgtgccttgttattggatacagtcgtgccaaacactttttataaatgtcgttttacgattggttagcgatatttttttaaaagtactagtaataatttttaacaattctcatttttgtcaaattcaaaatggaagaaaagttcaggtggagacaattttatagattttggaattttaaatgtcccagttctttttttttagttaaattaaatgtcccagtttgatataaaatttgtgtcattaatcacattttaaattctttttttaaaaaaaacacattttaaatactcatcgatcaaatgttaatttaatattaactatttttaacaccttaattaattaatgaagtgctggatcaaaataaatatgctagtggtcttatttttcactttacaatctataaagaatctgaaactaatgttcattattaattgataatattttaaatttaatatattttcataaacttatgtgaataattttcaacccaacactcatagttttgacttttacttcaaagttttgggggtggtgaagctactttctttgagcttcgtgtgttttttttttacacctaaataaatataatttaattttttatataattatgtatattgtaattaaagtaagtagcacgtacaaaaattttaaaataatttatgacgtcattagtaatatagtgcaaaatattatgttatgactgcctttttatacataaacacaagtctgtacaaaatattataattttaatttcaacactaatttgaaatatttcaaaaatttatagattagctattgtaattataatataaattataaaaaaaattgttattacacctatatgatgctataaatataaggaaaattttcatttatatacctaaaatacaatttattattaatattaccgttaattaatttaatagccttttattaacgctccacgttatcatccctaccgagaatttttttaaaaaaataataccagaattgcaaacatgaaacctgcaaaatcgtcccatcacgccccgtgctcctccattatccacgggattgaatcatttcaatcgcgcgtgtataatggactaacaaggaaacttataaaactataactcaatggatttttgccattcaaaccattctcaaagaagaagaaaaaagaaccattcacgaacacaaaagcttgatcgccgactcatcaaccattcaacattgaactccttcctcaaaactacaattatatcagcaaaattgttcactgtgattgtaaataaattcaaaattgcacacatcaaaatcttctcaagaacaaaaaaaaaggaactccgtgaatgaaaaaaagcttcagtcgcatacatcaaaactttaatcaataaattttcagaatcaatcaagctttcactcattctaccattcgacatatcaaccaaacaatcaatacaacaatgcgatcaacaatcagaagtttatcagaagtttatctttcacaccgtattcaacaaaacatacatcaaacattgcagaatatatatatgcatgcaacactcaaagaagtaagagagttagcaactttagtagtatgtcttcgctctttggtacaaaaatagtattgggacaacaaatatagagcattatctacattcacatacttgataactatctcaggaaaaatactgcataaatatagagatatcagcttgaagtacaaggaacaattttatttattttgtattaccttgtaacaaaataaacctactaatttattattgtatgacaaaattatacacctgataaaaaactctgcatgtatagttacaaggtagtttataaaaagtacaaatgcatgcattcttgaactaagatatatatatatatatatgcacataattaacaatctatttaacctattattttaccttataaccatttgtacaacataatttataaatgaacctactagtttat

SEQ ID NO: 299352 - DNA, 2135 bp, Cannabis indica
aaaaaacaaaacaaaaacaaacaaaatagctatatgttattttcttaacagaatataggtatatgttatatatggccacgcacatacataattatgatatacacgtcagctagtttaaaattagagacacacgtagatgatacgagccatagtaaaattaacaagaaattaatgttatttaatatagtcatagcctatatatgttttgtcttatataaattgtttcctcttaagactgacgaccaacaatattttcttgcattaacattttgaccctcgcgtaaccggcaagtaatgaaaaatttattaatttttaacatttcatttttgttgcatattaacattttatttttaacactactataacctagcatatttttttttttatgaggtggcctaatatttatatggtcattggcaacaaacgtctatgtatatactgtatatataatatatataaacaaacaagtaatattattaattaatttgtagtataactaaggacacataaaaattaaaagaagaaataattaaatattaattaggtacatatatacctgtgagagccaatgcaaggaaaaagccgagtagaaaacgtcaatggatttggctggaaagagtcttttgtaaaaagagccaggaacaccggctgcgaagtaggagcggtgggtatcagcggcgaggcactcctccatgctaccaccgtcgttggctaaaggaggaagaagctgaaagagggtgttgaaatcgttgcttggaagatcagagaagaaagccgaaaactctggtggtggatgatgatgatccaacgcctcataacgcttgatcatgtgctttatgatcacatcaacgatgtaaatggtgttgttcccacacgagcatcctaggtctgccaccacaaatggtacctctgctgagtttagttgaactccatctagggtttcttctagcaggtggagcatcgatttagcatgcagtgcctgcatacatacatacatatttaatttcttcttgttattgatattttcttcattttttattatttttttgaaaaattattatctccttctagaattcaaacaaattaaactctctaaaacttctcaacccgcggttagcttgaagaaaacataccatgagagaatcacaccattaataataactatataactatttatatatatatacctgggcttgggaattgttggcgtagctggcttctcctttgccacctttcatgcttaacattctctcaagcttcatattagaaacaacaacattatcacccttattgggagccatccttgtttttctttttctttctttttttttaaaaaattataagatgtattttatagagagaaagagagttatgtgactgagcagtttgaaaaaatgactagccaatgctgaatatttatagagatatagagtgagagagagagtgtgtacgaaagagagatttttattttaattatttattgtttgcaggcagtgggttgaaagaagttatatactgtgtattcaatattgaggacatgaattattataaattgcatctcttggagtggtgggggactagctagttaggggtgcttccttttctcaaatttctttaggctagggtcagccatgtggtgctactatttctatctcttttctttttttcgaaaaaaataaaaaataaacaaaaagtggacacaaaactaaagtcttctaatttgctccatctttttcgactcgcttttttatataaattattatgatatatctaaatcaaggaattaatgtagaattaattagcctatatctcaaagacacaaatgacaaaccgatcaaaagtgaccccatttatattattttgaggtgtttgtatgttatactaaatctaactatataacaaaagagcttattacactagaaattgagttttttttatttattcatagattattttattttatttttatttttgtccacctaacgtgacatgtttaggtggccaacatcaatgtcacgtgccaatacatctcgctaataagaaagtcaagtcatctactcaacactttaaccaacgataggggtccgagtactcaagcaggacgacagagtgacgaaccagccacctcaagggg

SEQ ID NO: 299353 - DNA, 2462 bp, Cannabis indica
gaaagaaaaataaaaataaaatctacaacaacgacctaattttgacactaaccctaattctattagagagacctaaagttttaaaatgtacagtacttaaaagaacgtcctatgtccttacccctaaacttaccctaaaacaaataaagaataaatattcgtaccttacttaaaattacaaaagaatacatactaaattacaaactttttttttttttttttttttgctaagagaatacatttactgaggcaatactctctctttttccttttctttctcagcaaccaaatggtccaaaccccgcaacaaaggaatatatacaaataaattcaaaccaaaaagaacctgtttggggattatagatagaccaaactttcttcttgaactccaagtccgccaataggatccgtacccaaacccgagtctcaagtccaagttttttccccttggagtggagaatagagcctccaatgccggagatgaggagaaccgggtccagttgaggtgggtcatcatcgaagctcccgttaccgaaacattggaaaaatgaaaaaccgcccatcatagtctaaactccaaaccaagaaaataggatatgcaaagtgacccaaatgagagataatcaaggaaagtaatgcagcttgggatttagtacgttggaaatggagcaaattatataacagaactaacgaactaagacgattacatttaaaagacacccagttcagcttaacttatcatatacacccacaactatggtgtttctttatttttctttatcagtttatttgagatttcataattttctttttcccctcaatttttcaatgactaaataaatcggtctgaagaaaacctcttcgttttcttcttcttctttttttcctctttgctctcttctctttattattttgatatattttcaaccctattattgccacttactactttcatagttttatttaattaatttaaaaaataatcattataatgatggaatagttaaataccttaataaacaatatatgtctgaaataatgagtgtcatttaactaataataatagtaagtagaaaaatacgcataatcaacttatttctagttttgtttatgtattatacttaattaagaaaaagaatcatacaatttgttagaactttttttcttaaaaagaaaaaataaataaaaagataagatagactgtccacctatggttctacattatgaagaatgggtactatgaagagtgaagaatggcaggtgagttagttgagagttgacacataagtgggaagagaaagaaattttgtaagaaacgagggaccaatatgtaaagtttgacaggaatgacagttggtcattatttcacttcacttaagtaaaagacataagaacacttgtctagagctaagtatattcaaacttcttgccaaaacaatatacagctaccacatatttcatattcacacatgtgctagattaggtaacacgtgtcacgatccaagtagagtaactatcattgcttacatgaaatatgcaaacaattaagataataagtccaaagtataggtgggataataatggtatctttgaatattctgagtgctagaacgttgaggagccaaaatccattttagtttctagtttaagattatttactccagttctaatcctgccattgataatgaaataacattttgtcattttgtttcacagaaagaaatggattataagcctatcactgtctgtagtctgtagttgtcaattttttactacaagtttctatatgcaatcttaatagagtggatatccattccctataattaatagagaaatgaaaaaaaagaaagtagaaaataatccaaataatttatagtgatttggatacccaatatcattgcgtggaaagaaaattggcttttttaaaaatactcgaaaataatacctaaagttgatgctgaaaattagcttaataataaatttatagaattctttgcaccaggtttaattttatcgaattacaatactgataaataacgggtcctcttcatgataggataaatctctaaatacactctttgagacagtaccaatctcgtaagttaattgaagttctattttctcaatccatatctattattgactatacattgacatatttataagttttctcatccttataatttactaataagcctctatacataatctattatttttccacccttcaaaatcacttatggtaaaaataaaaataaagtgtcgaaacaaagaaaataataacaaccatactcaaatgcaacccatttatcaaaatccaagtccatatataccaatagggttgtcttctctccttatagcaggcacctgttggaaattattttacaggtattgcttgctgtgtgtgggcactactctaatcactaaggtaggttcgaaatatgaaggaagaatagagagag

SEQ ID NO: 299354 - DNA, 1859 bp, Cannabis indica
tttttttaaaaaaaaaaatctctttaagttcctagactcggtgggccctaagcacaggcttagctcgcttatgttcagaattaggcatgcatagggcccatccagccatgagcccacaaaaaaccatttttagtttttgaaaatattatatgacttaataatttttactttttcctaagacctatctaattttaaagtcggtataaactaaaacgcttgttgttttatatctccttgattcacaacaacatggagtatttggttgtcatattattttttccaatgattttcattttatttttttgaaataataaattctatagtttcttatgtatggtaattagaggaggttctaatttaattatctttgtagttcacgatttcaataattaatataacaatttctcttaaattcaattaagtactctagctataggttatatttaagtttaatgagaacacatgtttaaatttcaaacactattgtgtatttagcaaaaagataagtatttaatttcctttattatttgaaattgtcatttttttttctttttttcttttcttaaattattttgtgatataatatctacgttaatttggttgtttcatatattgattgtaatagtcagtagttccgtaatctataagggaaaaaatatcgagtaagttgtgcaatcttatatcgcttaaagaaggtcaagtgggatgagtttgagattgtataagtatgagactacatagatgaattgatattgatactgcttatatcaataaggtgcattttgttttctggtagcccatcatgaaagaacttcataatgggtgttttcaaaaagcatgcgagtgaggacaaagtaaacactcgtgttgacttgtaagattaaacgtcataagggtccaataaagacgaagcaagaacgttaagtcaattgtggtaatatatacataacatattatcatatgatgtgaaattaaatagaatgtaaaaattaaatgttgtttttaatcactttggattaatttattcatgttttatttttaaaaaaataaataaaaaatgtagttcattaaaaattgggtagggacaatacaaaaatgtaaacaatattatatataatatatgattggtattacgtctttgtcttaagctgtggcaccattcacagtattattaattaattaagattataaattaattaactacttattattgtagaagataaatataatattaacgttaattattattattatctataataaagcgatagttatttcttagaaagtccacgtccgtactcatgatcatactatgtagtagtagctatcaataataataatactaaattactaattaacaacaaaaataagtacaaaattatctttttttaaataaataaataaaattataaaggggtattcatattgaagatttcacatagtggtatttaatggggcattcatattgaagatttcaattatggaaaacaacatagattagagtttatattgtgttttcaatagttttttatcatgagttttttggtacttaagaaatgaaagctaccttaaaagtgtcattttcgcaatagaaattggttcctaattaaagaaattaggtaactgcttgaattgattgaatcccgacattacattaagatgagtagattgagagtctcagaggcactaaatcgattttacctaattcagaaagaatagagttttacaataatattgttaattggttttacctaatacttcttatcatgtactatcctattttcttaaacatttttttttttttttactattttaagatagtttggtgttgtgggaaaaaatgaagttgtaattttggt

SEQ ID NO: 299355 - DNA, 2103 bp, Cannabis indica
taagactctaaaatattaatttatttttatttgtgttattaagagttaaaaaatagaaattttgaatagatactcacaattaaaaatattataccaaaatatcaaaatttaaatttaatttaaaataattttataacttaattatcattaaataaaatacaaccacacgcgaagcgcggtttgtttcctaatttttcataaattgaaattgcacattttcttttaagaaattttgtttgaaaattggagaggagaatgtcaatgatgctttaggtttgacccccaaccattcgatcaataattgtacattaaattgtacccatttccaacaataaggtatagatataaatcataatatcattttgttaaaatcatatatatatatatatatatataattcattaatatccatattattgaagtcaaaattatgaacagaattaatataaatcaacttgctatacaaaataattagaaaaagtgatatatacctaactgcatgcatgtatagtaatttaaaaggtaatataaatttatatatattatataaatcttcaaataattctctttgtactctcttattttatttttttcaaattgggtattttttagttatacatttatgtatatataggatactatttgagtaactaactagctaggtataaatagtattatatatataatttaaataaaattattattaataattaagaacatattttagcaagaaataaaaaagattgagacgtttgagatataaatttcaaaatcaaaagttatatcttatctagaatatatatacacaaattaaaatgtcatacatgaaaatcatttacacaaaaattgcatgcatatataatattatatatatatatgcgtatatatattaacattaattatgaaaatcaagctaattaaaaataatatgatagtgttacgtacttcatgagttgactaataaaatcataaattaaatattgttaattttttttttttggaataaataatttagtttaattattatttttagctactagattcagataatgaagttcaaattcgatattaagttggagacaaatgtagttatgtacagttgcaatgtctaattaagttggatgctaattcagacatgacaattcatatggaatctatcactagtttatttatatatgtatatttaaatatatattaataaggcatgcacatttcttattggttgaccaactattttccaattaattaaactttaatttcatttacataataatggcattcgaaatatttccataattattttgttgtatggcttatagaataaattgacaatattactccaaattttgtttcttgtaaaaaatattctttagaatataacacatagccaaagttgatgaataatgtttttgtgtaaaattatgactttgtttctttatattgcagagcaagaagggttgtatttggtaatgaaagtcatttaattttggttatttgctaataaactaagttaaaactatttttgactttggttgtggtcaaatttcatataatcatagatagtttttgctcgttgttgattgaaattttcgacaactaaaaataataattatttatatataaatgttgaagagagaaaataaatagattaattaggattttttgtatttcgggtgtaaaatagccttaattcacgagttattgtattatggagttgttattgaggttacactgttgaaggtagtttctttgtaaactaccaatgtaagttttggcttaggaattgaaattcaaaatttttttatagtagttgcatggtcttatatggcctagattaattagacccaataatgtgctaaatgtaattaattatcctttaatgggacaattacaatagtaataaaaattgttcccttactctaggcccattgggccagcccaattgtctttaattaacttgtcatgtaaaaaaaatagggatacaaatacacaaaaataataaaaaattacaaaaatacgttttacggaattttaaatatttttacgatttttttttattttatttacagaaaatacggtcttgtactcatattaatttgttgt

SEQ ID NO: 299356 - DNA, 2559 bp, Cannabis indica
ttttttaacttatatatctcgctacttaattaacatagtaccacattacaagcataaaagtacaaacatgaaactaaatacaaatatataagcacagaaattgagatataaatgcaaattatatataattcttttgagaaaaatgcaaacatatataaaaaaaagatccttctttttataattgtttaacatacctatattaaaatacaatgtacgtagagaacaattattgtttaaacacacattctttttatgtaattttatagttttgtaggtttggaaacaataattgagagagggaaattacaaaaccaatattattataaatattcaataatgacaattgattaggtaatcaaaagtcaatggcttaaagaccttagaaccaaccaactcaatcacctcaagttgccacctaaagagatgcatatacacaatccaatctccattcccactcggactcggcatgggcatcacatacccacaatcaccaccccaagggaaatggtacgacccgaaaaacggtttgccccacccgaaatcgatatccgaaaccggaaacctctgcccggaagacaccacaaaagaaggcccatcttctctccggtaactataaatcctagtcatacccggaaccggacgaagtttctcaacccaatcaatcaaccccaagaaatgttcctcccttaatgcttttcccaaacactcatgaacttcattagccacttcattcaaaggctcttcgattaggtcactcactttctttcccgtaaatggtacggacaacacgtttccgaagtaagaagacattgttgtctgttgatcgcctttgcttaaccattttcttccatctacgacgattcctaacctgcatggcttttcggaatcggtgttgggagagcttttggctactaattgccataaatatgcactgaaagattcgagtttgcttcttctcttgttattcgagctagctagggtttggagtttgttgagttcttcggctttgatgtggtatatgcggctgatgaggtggtctgttgggggagctgaggggtcttcgggtggcggcggcattgctgggatgtacatgtgttcgaaggcgggatctatgtggcctgggcggcgcgggttgagaagggaacggcgaaaggatgggaggtgtgtgaggggtttggagagagcgagttcggcccatgagactaagaacatgttggctgagtatgcgtcggctacgcggtggtcgaatgaacatccgaccaccactccaccgcacttgagctcagtcgcctgtgtagtagagactcaaaatcatcaacgttgtaaactaataataataataatttaatggacagtattataggtcttaaattaatttgcagtaattaattatcaaaaaaaaaatataacgtgttaattttcctaaaacgtattcacaaaaaattactacgtacaattttttgtatttattatttgacaagttaattgtgtccaatacagtcacagaatctcataatttaaagggtttcatataagaatattgctattaggcattggtgcccgacactccattaggttaataatattttttaaaaattatcttcttatatttaattaaattaatgttaatataacttcaagtaaactgttaggcacaaaataatacttcttaaaattctgttcatataaagtaacttagtaacggaaaggtctacaatattacttattaaacttagatatatatagtattaattgaatttaccacactttacaatataatattatatatgtgttactgttagttgggcacatgaacaatttctttttatcgatggagacgtgattcatgtaagggcatcaatttcagtttgaagagtctttcatcatcacgagaatcttttagtatttaatatataatagttttggtaacctttcattttcttcaaaattattttatattagtgtcttactatataacaaatcatcatatatagacctatatataataaatcaaaattgggttattatatatcactgatgatgatgaaaaatttaacaacatcatattcaaacactagtcacttagctcatctgttgagttttgttttaattaaattggattgggttattatattgctatataaaatatatacatgacaatgacatataatgaattatatatatctaatccgtacgtggataaattattagccatgactttttgggttaggtacgctttccttcaaccaataaattatctctttgcatctgattagtgaagactgaaataaattatatatatatatatatcaactatatatatgtatatatatatacaaaataatttaacagatgacagatgcgttcagaaatggatacattacctgacccagctgatgattgataatatacaatattttgatgccaaaattcaaccaaacccttttactaattaatttaattaacctatataatatagtatacttatatatatagactggcctacacttggtttaacgattcttggtttaacgattctttttttatttagccttacac

SEQ ID NO: 299357 - DNA, 2579 bp, Cannabis indica
actatttttagttttgtaaggctaacatgactagttttgattttgtaaagttattatatggctagtttaattttgtaaggtcactttggtctaataataacacatcaaatgtagtgtaatcaccgtcaggaatggagatgaaaatagataagtatctacgtcagagaattctatgtgactatttatataaaatttcatattttattttattttatttataagggaaatttcatttttttattaaatatttattatgtattaattaatttctctttattttgcaggtgttttactagtggttcggaagtgacaactctcagttttgaggttttcttttctgatattatggttttattgtctagctctcctagggtatctctgcatgctcttaggatagacaataaactattatagatggaagaaaattctcctctggttgtgtaactttgttacctttgttattttaacctgtatcggttaccctacaaaaaaaaaaaaaaaaaaaaacaactacttgatgtaaccatcggggccttcggccccaacgctaggtgtgtagtcgccacctttatcccctagggccgaagctaggtggttgagaccacctggaatggcttgcaaagacaatgttgatactgctcttgattctgttggtagggtttgtcgcctcgagatggttatcaggaattcaatggaggaagtgtttgttgccaaaaaaattattttcaagcttaataatcatgtctttgaattcttataaattaggacttattattcaagatatgattgatatgcttgtactgattttcatatacattagcggatgctaataatcaatgaagttttttggcttcggcctcttcattgtctcataaaagataaaagaaaaaaagtacttgacatagcagtagcaatagcaatagcatatactgctatgaatatttgctctttaacccattaagatgattaaccacatgcaatatcttaaaattagctagcaacttaattgtttgtttctaattttacaaatataatttgtgcatcatggttaaatttgtagcagcaatcatgagataacttgtattctgttagataatattagcatacattggtcttaataataatacaatacatgcctactaatgcaattaaataacgagtctattatattttattttagaaaaatactaaaaagaataaaaaatactatagtagtgtctattacaacactagtatgtatatccttatttaatgttgtaaatatggctcgggctttttgacacaatacgagtccgagagacacgagcgtgacctgacaattaaaaaaaaattacattgcatacttactttattttacctattttaatttttatctttatttccatatctttaagatatactcatttttataaatgaagtccccattataccccttaagttaatgtaaattatgtgctacacttaagtggacaacctaatcacaaaagtgggtacattttaatgaaatataatatgatggtatttttgattaatagatacaaaaaaaaaaatttcctcaacttatcctcatgaaaaaatgtacttaggcacgacacgatacaaaaaaatatggacttaagtacgatatgtcatggtgttgtaaattgacacgacatgaaaaatataggcttaggctacacgatgtcacatgctcacctttttaggcacgggtgatatattttctctaagccaatgtcagtcttctaaccacccgagtaacaatggactccttttttacgtgaccgtgtgcctcatgcacacttttgacccctgaaaaattcttgtcgagtcatgcttgcaagcatccatgagtgcatccatacatcgagactctctagccaagatactagaactatccataggctctcactatggtaagaaaaaatcccaacaccgtcgctcaccaagtcattcatgaccaagatagcatgtgtggcaagatactaacaccaagttgacgtagcaacatctctaatgatgccccatgcgatactgtctggacaatctccctcatggtccaaggacttccatacgtccatagtccaatactcaaggcaccatgcctccacgcatgttgacaggccctcaagacaagccaccaaactagtagcatacgttagacctctgtctctttctagcatagtgcatctgtcccatgcacatatgcaaaactaacccacgaataattatacgtgtattatctcgtgttaagcttgtgatcaaggcacaccacgaaggtcgtctcggaggattaggccacgttccatgcaagcgacatattgtaaagccaataaaaacataccagctaacctctggcgacatctctagatgcactagcgggtcggtccgatagtgggcatgagtattccgactcacagagacatatgagtcctcttgtggtccgcatatggccaccctactagtcatgttgactagtagtaactcacttaacaccaagatgtcaggggtgttggagagctgacaccatattctccacccttaaggagcattctaagattttagtcttctactaggaacat

SEQ ID NO: 299358 - DNA, 2718 bp, Cannabis indica
agattatgatttgacttaatatgtgtttcgtagtgtttgactcttaaagcttttgaaacctaggacgactagggttacgtaaagcaaaacatacgtggcataatatccatgtaacgtatattgttggtttttcttccaaactgtctaaaacgcgtaaaaaattattaaaaatcgacatggtcgaaaagaaagagctgcttcgaaatatccttacccttaaaccccggaacctcttcatataccaatctctaaaacctaattattctaatctgatcattacaatcttatgattagtttaagaataaagaaaaaaacaaaaccaaaaaaaccatacacaaacaactactgcaacaacatgttataatactattacagacaaaattgctccattggagattggggaggaagagccggtgccggagatcgagccaactctacactggccagtaccaatgacttggctctccggcaccggcaattctatctgtcatctattctcacacgacaaaagatacacgtcttctaccatactggcgccgccgtctaatctggggatcctctcgttcgaaacagcaaggattatctcccgtcttgtctctctttaccgatctctctccgaagatgaattacgacggctgaggatggagatcatgatgtctaaaggggtttgttacttgaactctagggatgagcggtaccttcttagtttggccggagcggagaggttggaagagcttgacacggctgccgaggccgtgtctagactgggaagaaaatgcaccgatttggagcttgtgaggtttgattttttatatgctgatttgagactcggagatattgatatgaagaaacttgatttttgttctaaaaccgtgcataaaatggtagagaagcttgagaaattggtgggttttacagcgaatctctacgctgccatggaatcgcttaccgaattggagaattcggagaggaaaatgaatcggtggaagaagaatcataataataatacagaccaccgcagccacggacatatcaaacagttagctaataaaaccagtaattttgatcattttcatcagaaaattacctacttaagaaaacaggttcagcattacagagatatctcgctgtggaatcagagcttcgataaaacaattgggttcatggccagaatcgtttgcgtagttttcgcaagaattgaaacggttttcggaccatacatttctggtcttcatcttcaccttcatcacaatccaaataaggtttcaaattttccagactactgcctcttagaagatagtaaactattacattctcataatcgaaaatgggcgtccttgaattggttacgatggcgaaaacacaattgtcaccaccaccaccaacaccatcatcatcatcatcatcatcatcaccatcacaaccataaccaccataaacataatagccatattaatcataaccaccattatcatcatcaccaccacaaccaccgccatcaccagaatcataggacattccaccccagcggagttttagtaccaatcgaactagaagatgatcacaaaaagcacgatcatcacggtaaccatctagacatcgctcacaacagagtttcagggctagctcagccttccacagtgggcgcctcggcgctggcggtccgttatgcgaacgtgatcataacagctgaacgttgtcttcacgccccggacactgtgaacacagacacgcgcgaggggctgtacgagatgctcccggtgaggctgaggactacggtgaggtcgaaactgagaagccattggatgaagaagaaggaagaagaggtgggggaagggtgcgatggtcatgcccttgcaatggggtggaaggaggcggttgaggagatcatgtcgtggctggctcccatggctcatgacactatgaagtggcagacggagaggaactacgagaggcaaaagtacttggaagggactaagccgacggtgctgcttttgcagaccttgcatttctcagatttggagaagacggaggctgccattgttgaggtcttagttgggttaagcttcgttcaaaggttcgagaataatcgacgacgttctggtactgatcttcttcatcataatcacaatcataatcgtatttatcatcaattgtttcaaccatttcgtcgttaggttctgtaataatgttccaacgagagagacaccattaatgtcagtttcaatttttttttgtctttgaatataattattttattttaaagtgttgatattatatatgttttctaagagttttgataaaagaagaataaaaaatgtatgatcactactcaaaatttggtatgagggtttggtttttttcattgaattttatgtatataaattatgtgattcaaggaaatgggatattcaagaaacatatatatacttttccttttttttttttttaaatgaaaatcataaatttttaaatataataacctgcaactaagatcatctccatggagtgctgatgtaatattatattttgatatttttgttaaaaatatttcaccaataatagtgtgctaaaaccaggacggccctgaaaatatatgggctagtgttatgggatttgaaccatgaccttggacattatgccatccagctcaataactaagctatgaatatttgtgacttataatacacttaaattttacttaaataaaagcctaat

SEQ ID NO: 299359 - DNA, 2945 bp, Cannabis indica
agagtttggaaagttgtcattccaatcctcaattcataaatatatggtcgatcttggaataaatccttttatgccctcttgattattagtccaagtgaacttagagccagtcttgagcatggatttaaggtggttctgagcaagccataaacaagcattctgaatatcactaagcgccactacattgcctccttctctatcctccaaatcaaaaagagcattaaaatctcatgcaataagccacggtttaactgtgaattttaactttaagagattactccaaagttgtttcctttcctcatgagtgttgtaaccatacacaaatgtgatgaaacaagcattatattggccagccattttgatgaaccaatgagtatattgagtattctcctctataataatgacctgaacaaagctctttctccacacaataagaatgtgacctcctattgtagaaataatataataatcccagttaacaaaattcttttccatgaattccctaactttattccgtctcaatttattttccaaccaagcacctacccctatcttatttttagaacaaaactcataaacaacttcctgcttatctttattattaatgcctctcacattccaacaagctatattacaactatccatgcttaagaagagtattactcgatacctctgcttctttcgtcttttgatctatctccagcccctcttcttgttcctgtagagcaataaaggaattgcaatcctggccagtttctgtagctgcttttgtagtcatcttctcgtgagacttcattgcttccataggggaagtttttttttggaataatccaatctttactctgcttttatttattctctgttggtttcttctattgagcattagcagttgctagtttttttatctttaatttctacttttttcaagccttcaccttgttccttcttcttattctcacctttccgacatttagtcatcgtatgaccatgattagagcaacttttacacttgactggcagccattcatagtcaatattttttccattaactgaccatgttcattttaaaaagggtatgaatcgaggagggtcatctatgatttccatcttaacaaggactttggtatattgatcgaccataataagttttcctattatactaactaaatcattgaggctcctattctcccaatattggagccctaagtcatatagtatgatccacaaaggcaccgagtgaatcatcttaacatcatttaggtcagttgtccagggccttactataaccggcttcctgtcaaaatgaaggacccctgcctccagcacttgatcacgagaagcttcatcattgaactttaccatgactaatcccatagtcattttagctacctgtactatctccaaatgtccttagacacgcttcaagaatccctcaaaaactgagataggaggatttgccccaagcaccatgcatataacagcagtattccagaacacagtctattcttgaacttcatctatatccacttgagctattttgataccattcctaataattggctctgtaaacagtagcttaggatcacgatgaaacatcttctctttttcgaacgattcctagtgtttcttggctaaaacattaatctgttctgaatcaaaggcatcttacacctccttagcccagctattagcacctagagtcgataaatctctcttttcttcttctcgaacaccgtcgcattcttcatgaaccagctggttattctcagattccaccatttttgcaattaaattcagtccctccgttgaacctaaatctccttcttcctcacaatcttcttgatttccttccttcgcatccagatctggcatcccgatgattggttttcaacccactattttcttcctcgccatggaagcagagaaaagcagagcaaaaaccttgaaaactaattttagatcaacatatttgaacttgaatgttacttagaaaataaaagtttgaagactaatttgctttaaaaaataaaaatttcaaaactaacttactaaaaattatacatctcgattaagttttttttttttttttaaagttaagtaactaaattgtgaaaagagtgtctaccgtatttgctctgaggcagtttttgtccaccatggttttaagctttcagttattttagtagtttttaaacttttttacagcaaaattccacaactgctctgcatcctttccatcaaattacctgaacgtggtcttgttactattaccatggatcctttaaaaaacaagatgaaatgaataattaatcttgaagatgaagaagaagcggttctctccttcaatgatgatgatactcatggattaaactccaccaatgaccacactttgtttgcttgcatccttaccaaaaagtccgtctacctaacaatacttcaaaagtagatgaaggttcattgggatgggcatttttctttctgaatctttgaaaaataacttgatctttatatgatctcctttggccgtgaaggagacaaagagagagtccttactcaagagccatggcatttcaaaattaccacattatcctctataagccaactgctctacaaaatgtattgcctactaatttcaaatatttaccattttgggtacaagtttacaggctaccattcctaagtaaaactagaggattggcaaaagctttaggcgatatccttagtgaattcttagaagtatatactaactctctaaacaaaggatcaagaccttttttacgcattagagtcaagcttgatgttactaagcctttgagaaggggtcgggacacacaattacaaccaatcaaagataaattttgggttgatttttgatacgaacaacttccagaatggtgtatggaatgtggctgctgttgggttttatgccctaaataaaactcttt

SEQ ID NO: 299360 - DNA, 3616 bp, Cannabis indica
gatgggctaccgaaaacaaaatgcaccttgttgatataggtagtaccaatcaatccatttaagctcttttcaactgtgcagtcccataccaacacagtctccgaatcatcccacttgaccttcccaaggcggtgtgggattgtacaccttacccggtatttccccttacgaatcacgggactactgactgtcacacttctaaccttaagcacgatgttactgtgactgttccctccattgagaaatcttttcaaccagtttttagcaagcctattcccctatctgtgattgttttacccacaatgaactctggctcatctgaggtcccctcttcatctgcaaggccttcagtttctcttataagattgtcttttgttagttggcaagtgaaactatttactaaggttaaaaacctggctcattcctatgttattaataacgccagagaaggtttgaacaaggggtggtaagtgtcctcactgcaatgtctgaggtccttaaatctttggagtttgtgccgtcctcaaatgctgctcaatttgagtctagttcttctaaagagcttccacaacatgtccccatgtccgcagagttagctttatttcctatgactcctgtctagggggaggttggttctgttcctgctactactgcaaatgttgctcctgtctaggtggagtttggttctgttcttgttactgcagcaaatgtagcttctgcctagggggagtccctatctgatgttgctgattctctagaagatggtcactaatcatgctcaccgagggggagatttagtgttagtttttagtattatccttgcagctattgtcacaacgctctctaagtgtaattttttatgaattgttgtgtctttttgtgctgcctgtctgctgtctattttttctggtttgaaactctgttgtctggtttcagttgctatcagttattgtcttttgtgcgtttttcttagtgtttttctattttggttctttttatctttttcttgtctccttgtttgtttcgttgagcataatttgcaaatggggagattgtaagatccagttatcctgtttagcaaattatgtattattggtcatctatctggtggctagtcttatctgatttgtattatattttgagtttgtttttgtttactcttaacaggtcagcattagttggatgagaacgatggacaaatgtccttagtttctaagttgttaagtttgttttaatagagtggttagtatataaacagtgattaccgatttttctaactaactcttctcgttcgattggtttggttaattctgctctgctagggaagatgttttgtttatttttcttggtttatttacagatcattgctggttcgatcttcgggagctaaaggagaatcaatgatctattttgtctaaagggagtttagatcaagttgctaaagggaattcagctgtaaggaagtaaggggatcttggcttcaaaagtctaaggggacttagactgtttaatttgattgtgatcaaatttgtagggtaatccttgcatgaattgattttagattactattgggaaattgtaatcaagactggatgttgtgaagcgattaattcatagtgaaggttattaccctggttcaagggaacccaagcaatagtcgcatggaatgagtttccagggtcggatgaaacttgtaaatctgtgtgttttctaatgtgtttcatgcaattttagataagaatcatactattaaaatcaactaaaaagaaatcgacattcttaggttttacaagaatagctatggtgtggtggttgggtctactgattggatattaaattgtttctctggttatctgcagatgccgtttaatgaaaattcatatttctcttaaaaaaaaacttatttcaaaaggaaaaaaataatttattgttgttagtaaaatcagcgtattttttttgaaaaaaaaaataagaaaaataaaaagaaaacttatctagatatttctatgtctattttactactttccatatttaatttaaaaggtaattctacaattagacttatcgggaaataatacttattttttcttctaatatcatatttttagaatctacaaaaaattctcttaaattctttccataagaaatttctcacaccaaaaaaaaaaaatccttgtagaatttcattctcaatatggactctaatattgtccacacaatttcctatatatacatacacatagtacttaccaactatccacagaaaatatacttggaaaagacaacatttacaaacaaaatccaagatatttattttatgatggctagaagaaaaatacgacttgcatggattgaaaacaagacagcaagaaaagcgagtttcaggaaaaggcgagcagggctattgaagaagatgaaagaactcataaccctatgtggaattagtgctttcatcatcatcaacaatcctgacgagttgggtcctccaataatttggccatcaatggaggaggcccgtgagctctaccagcgatttagaagtgtacctgatgtagagaggtgcaagaagatgatgaaccaagaggattatctacgagagcgctctgggaaaatggaggaacagattcggaagtaccacaagcaaaaccaggagaacttaacctcacacatcttagcccaaatattcggtcaaggcaagcccctgactgagctcatgtcgaatgaactcgatagtgtcatttgtgtgttggaaaattatttaaaggaggttaagatgaggatccattattataatctgatggttggtaatcaatcacctggaagctcctctaatgtccctcctccactcattcctgaccaatctaaaggaaaggaagtatcttgggagtcttgtttctctgggatcctagttaataataatattaacaatgttcttctgatgaataacgtggagaagcaagtgtcagatcatcgtcaatattttgttggtggtactagtcacggttctacctttttcagtattgctgctaataatgttgtttatcctaattattatggtttagggagaaattgcagtacaactggatttcacattcaaccatatatgatgaataatcaaaatttatttggccatgctatctctaatgaccaaaaggatttggttaatttttctcagcaagtgaattttgaaggaagtagcattacatcgtctcaaccagatactcatttagggcaaattaatcttgaatctggtagagttaattatgaacatgtggaaatggaagttcaatctggtcaaggtgacattattatggctgagaatcacaacaatggagataatactggtaatgttactagtgttaatattgttgatggaaagaaaccttagtttggggccctattggaaagaatatgctagatttctctaatgaataaattgttattcctattttaaaaggttgtatttaatttcaatccattatatgggaaatatcattgtaataagatatctttttcaatagaaaatgagataataatattcatattggtggatacaattaatagcaaaatgacatttcaatagatttacgggacgtttgataatacttttattttt

SEQ ID NO: 299361 - DNA, 3447 bp, Cannabis indica
ccgagcaaaaattataaaaataacatatttcacatataattcaaataatacacctagagtttaataaaatcttcggaattgagaaattataattctaatgcccatttctaaaaatggggcccacaaataattgaattcataaataattataaaaaatatcagaaagtagtgctaattgcatttactaatccaaattactaaagcgatcattacatctgagatgctgggatgttgacagcggcatggatactaacgggagcatagatgctgacgggggaatagatttcaatatgggaacagaatgggcctcatctggtggagatggtggtggtgtatcctctctgaagactgagttgtgtacgcccactcttctaaggtttgtgcaagcttctcaacctggctacgcaaactgtgctaggtaggttgtccatcactacccaacaccagttcttccaattccaaaaatagaggcacctcacctctagtgaagttcctaaaaaactcttcttcattaggtcgtggacataaaatggagtacactttcaacagcatataagaacaaaaatattattaaactaagattaaaatgaaataaaaaaattaattgtgaccaagtacaaagaattaaaaaacttacatttttgtaaaataattgaataacttcctcctagtcgagggccacgtccttactctcccaattgaccattctgggaaagcgatgtgattttctgatcgcaaatttattaccagggtccaagatggactcgttagcccaatactgcaacgctatagtatatccataggtcgagtactttgactccttctaagtcattcccttttgatttattttcatccatatgcttcttcttttctacgatgtctcttctccaagtttctatcagtatgttgtaagaaatcttcccctacgggtactcgtagaagagcccaaggtcgtcagccattctaataataaatggcaaaataaaggtcttctcctctttcccagtgagaacacccatcacaaataaggccattcccaacttgtacacgtcgtccttttttgtgcaactcacaaagactttacgcagttgacccaagttgatggatggatccccattgaagtacttgactatcaatcagtttgaacttgccttctcttcaatttgaaactcacaggtcaagctaacaagtttagcccagtcactagagcgaactcagctcggttgaatctacatctcttctttgtagtgtaaaattgcacttcatttgccttatctgacttgatcatgtgcatgaacaactgatggataagtgtagccaaaaattataatggcgctctcttaatgaattacttggaagggaattccttcactctttttaacaatccaaattcctcaaatattgattttatcttcaggcattaccaactatcgccccaccaagtgacacgcctggtataatagtcgacactggaagtataaggcattgagtttttgaagactgtaaaaaaaaacacacacacacaaaaatggaagttagaaattttgtgcaaaggcatcggaccacaatcggaaagtctattgggcctattggacctaacaaaaataaaataaaataaaatgaacctatatcaaaccctacatcagtccctatatcaatcttatcgggcctaacaaaaaatataaatttggacaatatcgtaccctaaatcgtgcctaccaaaaacacaaaattaaacacacaatcaggccctaatcaaaccatatatcggtccttacaaataacacataaattagacacactatcgagccctatatcggaccatacagcgggcctaacaaatagcacaaaagcatagacacactattgagcccacatcgaaccaaacattgttcctatcgggcccttcaaaaagcatataacttaggcacattatcgggccctatatcgagccctacattgggcctgcatcaggatatcgtcttcaacctttatccctttccaataaaaaatacatcaagctaggccaaaatccaaaattcttccccataacacatatccgaccattccaatactaaatctaacccaaactcaaaaatcacagacgtttagccctaaatgtaaataaacgtatcaataatttcataaattttaaccctgaatcatgcaaaaaaaaaaactaatacatttaaaatatgttgggacggtaggaaaagaattcttacctttgacgacattattgatggagaagtcatattcgcggtggttgccgagtctatggtcatggtggtcgtggagagaagagaccaaggggtcttgggtggtgggttgtggccgtgtgggtgaattcaaagaaaaagagagagaagggaggaagagagagggtctggtgttgaaatgggaagggtaatattaggttttataaaatgttgacctattctaccaattgggatatacttaggtgtagggaaccaatttcaaacctataaatgtataaaaagtcaaatttcctgttgtgggtttcacgtaagtcaaattaattgaatgtaaatataatagagtcgatattcatatagcaataacggaaaatgaaggaaaatggcaagcaagccctttggcagttcctgttgttcatcggcgagtagatgagatgattctgagatggtctagtctgattgaggggaggataaaacttaatgtggatgcaagcttgtcgaggatggaccgaaaaattagttgtggtacggtcattcgtgaccataccaatctttgtttggcttctgtatctgtttctatgcaagcttcaatgatgcctctggtaactgaagttttgacagtacttcatggtcttttgttctcgcctgaagtataataacatcaaagtaaggtgtgttttgctttaactgatagaaatcttcttaaaattgaatttggtaatatttttgctgatgtgttagccatttgtaatcacaatactgtttttagtttcactcattgtaataggaacgtcaataccataattcatgatcttgctaaaataactcttttcttaagtcttaactctcaaattgtaataactctatttgtaggtagtttcctattaatttaatatatatatatatatttatatataacttaaataatggtagaaccttttgagtctagtcatttattaattaattgtaaatgaaaaaaaatatatatattaatccctcaaaataagaaatatattaatataaataaaaaattaaatgtatgacattcttaatttattttttttagaaaagtttattaacttactttttatttaagtattattttttattttattttatacaatatatttgtaactagagaactaagccgcattctcatattttgtaatttttatatataaataaatattgtacttataataagtgatataatctaaaaatataatatttt

SEQ ID NO: 299362 - DNA, 1625 bp, Cannabis indica
tgaaaggggtttggatgaatttataaatcaattagacaaacaattgattaagtgaaccaaaacatacacaaatgaatgaaaaatacttatgttactttattgatattgaatattctggattacattgaaatagagttttgtttagggcataaaacccaacactcactacaaggtatacctctggtagtaaacaaaccctaaaagtagtttaaaaaacaacatcgggtagtcctgactcccataaaatccagttcccttgttcattacgcaattgtaaaatatgattattgtgtttccttgtgctagcagccttgtgaaaataatttctattcgaatccccttcttttaaccaatctttttttgctcgttgtttccaataggattcacgctggtcaagtgattcaaagagcttctacttaatttccttataccattgcacagaaacactatcccacttggaatggagagatttcaaatcaaccttataacatttgatgcgatggtttaaagtacccggtatctccttatcccatcgggataacttgtcagcacacagagtaagcttatcaccaatatttaacaaatgattttgctcccaacaatccttcacgatctcaaaacataaaggatccttcaaacaagtattctcaaaatgaaactggcgactagaagtaaaacttttcgccactttcagttcaggaaagatgggagagtgattcgaggtagagagttctaaatttgtgagagttgcattacgaaaagtgaggctccacgaactcgagactaacgctctgtctaactgcacttcaatctaggtatgtgaacccctgcctttctcccaagtaaaagggtgcccctgtagctcaagatcaaataagccacactgacgaagaacatcattaaacccgcagattaaccatcggggatatgatctacctcctcgtttatctttaggtcgaatcatattattaatatccccaacaatacaccatgacaactccgactgactagaaagcgtgtgaagtaaggtccaagtattttggcgtctatttcgattgggctcaccataaagaccagttaatctccaatctctagactgaggagaggaaataattaaatcaatatgattattatagaaacccaataaagaaccttcctccttgtttttccataaaagagcaagtccacccgaaaacccaatagcttccactacaaaaactccttcaaattgtaaaaaactggccaacccctcaatttttgatttatatttagacatttagtttcacaaagaaaaataaaattgggtcccttttgagaaacaacttctctaaggaattgaaagctccgttggttcccaagcccccaacaattccaacatagcacattcctaattcttggcgggcctggacaccaatacccgccccatccaagtattttgcaccatccaactgctcccctgtagtgatgacttaacactcaggtatatccatagttgtagaaaaattattattagagatagtaaggctcacgtccaccttaggccatccactagcatcacattgtgtcctacttctcttagtttccaaaaaagacatcccaacattgtaattgttggaaattatttt

SEQ ID NO: 299363 - DNA, 1154 bp, Cannabis indica
tttttgtttttcttttcatccaaaaccttttctcctcatcttatatattcaaaccaccattctccagagacataacaactgtgatcactctaaggtttttagggtttcaccattagaaagagcacttcaagatgaacacaatctatatattattcattattttcgtaagactaggtatattagcggtttaaaaaaaaacattacatttttttatttaaaaaaaagttttttttttattattttatattgatattggaggagctggaactcgagacctcctcgttgtgaggagaggtgtgaaattattaatttatgtctacggatactataactattgctcacatatgactattagactatgtctatgactacgagcgaaaaaataagtttaaggggttggttttgtattatgatttgaatagtaacaattttttatttggttaaacaagatttaaggataattcaaaaaaatatgtataaatttaataagtcaccaatgcctatgtttttgctataaagtcaaatgttaattttctactctattaaacaaaagttaaagtattgtcacattagtttagaagaaaatctcaaaactctaccctaaataacaatagcttcaaaaaaggaaattaaaatttatgatatcaacaataataaagttctgaatacaacctgattatcaaactttattagttcccaaagataaaacaaacttaacaacattgtggataataatattatttgtcttagaataatgagaaagagtcatattaaagagagccaatttataatgaatatctcgaagaagtaagcctaacaacgagtctaaagaaatattattattaatcttattagccatattaagacaatcaatctaaaaatgaatatttttcagaccaattaaatgacattggactcccatatgacatagagcaagagcttcagcaactttaacatgaaaatatctaatcatgtgtggaatagcccaagaataaacaacccccatgagtatcccaaataaccatacacataccatgcatagaaactttggccacatctaactaatgtcgcatcaatgttgatgttgaaggaacccaccctaaggggtaccgacagtgacggactcaggatttttactttgtggaggcttattt

SEQ ID NO: 299364 - DNA, 2132 bp, Cannabis indica
ttttttttttttaattgctgaataaaaataggctaagaaaaattcttgttttctaattgaggcgtaccctcactgaattttacgcctcatgaaatttcaaactgccttagccatatgaggcgcatgcaatagagcgttttctttctgccacaatttattgcgcgcagtgaggcgcgcctcaaaaacacaattttagacattgttcggaattggagtagagccataacattaatctatcggacttgaactaatatatatcttggtgttgtttttttttttttatttactgcatttggtgttttatagttttaatattctgtttgctcttgttgtcgattattgtttttgatttgataatcctatcattactaattgttgaattgtttaaagttttaaacatttagtcatataattttcctacaaccttatttaagcaatcaaaaacagcatatatatatacaattatacataaactaatgtctcacaattataagctagctagcttataagtacaataatctaattaaggctaaataaaaaattagtacagtttgtgctatattatatatatatatagctagaacatgaatgcagcaatagaactagacttattataaattagagactcaaaattaatcatctttccatctcatcgtgattattcaaatgtgaaaattcttttttgatgaagaattttattctcttcatgatcgacatcatcacattcactgaattcaagatcttcttgatcgcttcataaataaaaaatgaataaaaaaacaacaatagtcttcattattatgtcttcattattatgcaacttaaagtactataattcttcatctatatagctatagctagctagctagatcacctttttctcttgatataattaaagctatatataataacatgcatatgccttttagttaattatatagcaagtgctcttactattgttttgtaaaagtgattattctcaattccttttcaaactatatatcaattttaaatggtgaatatatattaactgaatggaaagattttgattacaaaatttattttgcgtgatgtatatagacaagtacttgttttcttgaagagagaataaattatttcttttagcaagagaccgatataattaatatatataacatgagttattacttccgctcatgatcacaaaatagttttgaaatgaaactctatacatgcttcttgtcacatatataatatatagttagtaccttataacattattaatgatcatggaaatggaacaaacctagctaccttataactttgaactctcatgattgaaaattttaataatatatagggtaatgcaaacaaggatttaagtattcaacaattaattttcaagtgtcaataaaatcatgtatatatatatatatatctatgagctcaaaggtggtggtctggtgataaggaggattactgttggatttttcctataccgcagactcaaaaaccttacaggcttagcactgaaataggtaggctaagcttgcgcctagagccccaaaaaattatttctcccttttagaaatacatatataatttttttactgcatttaaaaataccacatttatttctaagggctcaacattttttttttcttatagctgcccattaaaattctggccctgcctagaatttaagttaacaccatttacctaaggtgcatgtattactacactcattgctaactagttgttaaaattagacctcactgtaacctttattattacagttttacagatgaagtgaaaattacaaataaaagcaaacagaatacaacagaaatcagatcctaggtggcttcgcctctagtggatcaagaactagttgttagttacaaccgaagttgtaactaactcctagttctgtgatcaaccctagaactacaactataaaaggaacagaagagaagagagaaaaatatataccagaagcaaaaagccctaggttaccagatctgagaaagttcttcagctccagatgtttttcaagtacatgcacaagaaacagaaaagagttagtgtgagaaaccagaaaaccaagagagaaataaacacagaaaacacaagagagaaaaacctagaaatac

SEQ ID NO: 299365 - DNA, 4996 bp, Cannabis indica
acttactatatgtcttggtaagtgtacttaagacgatacttggttgttgatcaaccatgtacattgtattttacttggaaggtacccttgggtactatttacttgaatgtgtttttagctttgtcgggttgctctccttcccttatttcttccatgtaggtaataccaagtgttgaaaagaggaggtgacagtcacgtagctccctcatttacttcacacttatggccagaacgaaatagactctccgtagggtgcctctgtatgaccctcacgtggccagaatggccacaacaggttaagttaggatggtagaggagaccgctcagtcccctactaatgttgagccagagattgaccaagggctgagagttttgatgtagaatcagatctagaagaggttgctctaatgaggaggaggaggtataggacttgttctatcctcccagattgtgccttgggtcactatgatgccactggtaggccactgaacaggctcggtgagccttcagaccttggactggatcatgtcgtagaggaatcttctaagctggtgatactagatgcgagatcagaaggggacagttgggtctcccctgcttctactctttccgatgaggccttcagcgagatcctcgctagtggcttagtaggagatgtctagtgcgagattccccgtaggaattattgggcgcacatactccatttgggtttattagcgtggttcgagcgccatattaagcatggggcagtgatactacttcatcagtattttctagatatcgctgcttactttgggatgtgtccgacatagctcacaccaaaaaagcatcaaatatctttcaacgatgtttgtcttgtatagggagctaggctggcctcagcctaccctttacgagattggttactactttgatctgaagtctacattgaagtagaataaaaatggatactttaattttagtcagatcggtcaccaatggttgggtgacactaattgtacaaccatgtcgaaggtctgtgggtatgccaagaagtactttatcgcttatggcctccgtaggattaggtgcctcgaattctggccagtgccattcttcagacgctctatccctactttgcagataagaggtagggaaatccacatcctatctctttcaatagaacagagaaacataatctagttgaccagtgtggacaattttcaaaagtatgacttatatcctcctgctctcaaagttgtaggagtgccagctatagatggggcctaccctagagatggaaaagttcctaacttggatgatgatgaggtacctctatctcgcattgcacgaaatatggaaaagaagcaaagggctctccgtcaacatttggcaagcggggtccaagttgtgatgcttctctccatatcggggcaagaggtcaagcttctgagagatctacttgccttgtgcccgtgcctaggggcaaggacaaggctattgttgaggactatgatagttcctcttctaatgatgatggtacttaatagtcgataacaccatgattttgtcttgtattgaatgtttataattgctttctgactttgctactttctttttacagatatgtcttccaggttgagaggtcttactaggggaccatcagatgagcccacgggacgagtgaaggccaaagtggccaggacttcttgtggtggaggcgcttccaggtcgtcattgcctccccctccgccagggcttgcactagctaggcagcatgtgattcgacctacagaccaaggtactctaaggcctagtagaggagtagggtcagtttctgggtcgagggttgctgaggcagccaataggcgcatttagagaactatcccgttcatggatagggacctgaaggagtttggcgatggtgagccagacaggctctactctactggtcttcatgatcttttctagtaagttgtactttcagctctgctcatcttttgggcactgcatagactggctatccatgaggcttgttggatgtggttggccgaccttggacgctattgtgaggggctggccgaccatagcaatcccaaggggggactgaccagctagtgttgtggtttagacacagatgttgttttgttttgttttcaagccttgatgaagctgagctcagcccgtgatggctctcgggggtcctcagatgctcttcaggagcgggtgagaccttggaggcttcccttgtggtgaaatacaatgccatatctgagttgaaggctgtcttaaaggacagacagagaatggtttctggcctagagaccatgcttggcgccagaaacacagaaaacatcacacaagctacctttatcttcgagctgcagtctgaccttgatgaccacaagaagaagctgcaagaggctcttgatggctaccacgccattagggaggagtgcgccgacttgtcatctgaacttacttatgagttctagttgcataacccccaagctaatctatcgtataggggcaatgaggctttcgtggagagagcaacactagggtcgtatatatctgatgtttgccacgtgttactatccagatcactatatgtgagatctgctattgcacccttaggaatacaaagtatgaatcaataatggcaaaacttaagtgttgacatgatgctagtgtaggcgtgtgagagaagaagtgaggaagagagagattatttgacttaggcttagagcttggagctaggcttcagccttggattcaacttaggtttctaggctagggttaatgcctttatataggaggcctaaacgctagattatagtttaaaactctagatatttgaattgtttgttaaataattacaaaagactaaattgcccttaaatctagatattattcagctattttgttgggctcttagggcccaattcgtagcccatgagttgctatccaggtgtagaagtgcacaagaaaccctgcagagcacctcttggttggctagacccctgtggattccatggtgtacttccaaggctggccgccataaggccggccaggggtggccggccagctcctatgaggtagctactctttcatttgatgcctgtttaagtgttggggtctttgtttgcttaggtgctgacttggccttcgtattggtgagttgtactgccacgtggcactaattttgtccacgtaagcatgccatgtcggaggataaaaatcaggataataggacccttggggaacaacccgcaagaacaacaattagatcacgtccccggtactatgtaggagagacatgaccaagatttggcgagcctgctattggcaagccccatgtgaacttgggagaagatctagagttagccagacttagagaggctgtctcgcaagtcgacctaactgaagaaccacgcgctattgattgtgatatattcgctcagcaaagatgcaaattcctaagatggatggatgacaaagagtacatccttcgatatcaccaggcagagctagattgtcgcaattgagaggcatgtaacctgataaggcggtctaatcaaagaaccgatggaagaggccaaaatctcatctgagatccactttgaggaagactagttagtagatcaaggaagatctatcagcaagctgaccaattaggttcttcaagatgaggacagaccttgccacaaaagtctagtggagagactagccagatcccgatagccattggcctggggggtcggccatcaatctctggcactacaacgcccccacactacctaactcatggccgaccagcatcctagaagtgcacctctgaccgaccaacaaggtgaagtcctgtcctaggacattcgggagtgagtcactcaaaggctagtctttaacttgcgaggccatgaatgggtggaaacacctaagacaacaacaacttgaggattgaatacaatcacttcagacatttagatccaacagacaccaacaattggtgtgatctaccccatgtcaacgcatagacaccactatccaagaagacaagtgttggcgaccagtccctgcccagcacagggctagctgaccatgtacaattaccagactcaaggctggctggccttgagtgtatcctctctcaaggtatggacggccaagttctggttaatctgaggctgcaactcaatcaagaagggccaagaaactaggcccctgtaacaacagatccttttgtgcaagcacagctggataaaatgtgagaaatgctcaagggcctagctggtccaaaaccttcatagtttgagctagacaggtaaaggggctcacctttctcggcatacatcaacgccttgtccttaccaaaattcaagattctaacttggaagatgtacacgtggaaacaagatctcctagtacaccttaaatactttgagatcaaaatagatctccaacaagtatctggaggtgtgcaatggcaaatctttctggcaactctagctgaaagcctaacaatggtatttcaagctggtctcaggaagatttaattcttgggaactcgagagttctataattagttctctacttcaagacaaataccttcatgactagaggatcttgtctgaataaagcaaagacaagatgaacctttgaaggtgttatctagttttttgcacattgacgtggcaattggaccgagcgacacatgtcctatatctttgacacccgggtggaaggaagtatccctagcagccagcacacaattcgtcagcatctataattgtcgatcactcgagaatagttgtagagaagacatctgacccagtagatacctattatgccagcaacttacaagggataacaacttccgaataatcttgttaggtccagatacgacaagaatccctacaatcagggaattgagtcagagaaatatgacaacctgttgtagtttcctatttcatatatcttaattatgtaatcattgtaatttcctattttatgcatt

SEQ ID NO: 299366 - DNA, 2203 bp, Cannabis indica
aaactttagacaattggaaactacctgttgacccaagtgaactcctttgcttgggcactgattattcaaatagtccaactcgggttttaatccattaagcacctcctcaagtgtccttatcaatatgcgatgatgggtaacttgaggggagatcgttgcacgaatcaacttcctttgttgggcagaaatgtttaggatgttgctcactttggtgagtgaattcacaatcatgggttctctttcgcttggtttactgaaacagacaaatggttcaccttcacctacagaaacagctgccatgttagccttgacagttttctggactgatggagatccaatatagactctggcaagtgacttgaaattgtacatttttctttctatacgatcatcaatgatgattgaatcatcacggatattaacaagtcttccatcaatcaaatccacattctttaacaggcgggtcaatttcatcatctctggaaatgcattttcataccaatctaagtgtacgagttcttcatgtgattcctttgaagagtgataaagtatagcatccgaatgaaaagcttcaattcgcctattcctaatatacttagcaccagtacacatgagtttctcaacatgtttacaagccattgttgaagaaaatccaccataaacaatctgtaaaaaaaaactgggctttcagtcagttcccttattataatttatttactacatcccacgaaatggagaaattatttacttcacagaggcaaataatcaaacatatagtatacaaaaaaaaaaaaagtacacaatgctaaaatttgaatgaaaataatctcaatttctttccagacaaagaaaacattatcataatacttgcaaaagaaaaattacaatactaggtagtttgaaaattaactaaacaaagattacaaatataccaagattaacatattcagccaaacaaagcagagtaaaaagagctgacctcaactaggccacatgttcaagggccctgggtccacgaacatacagacatggcaagccccaacgcacaaccacggggcaatgtgaccatgccagcgctgaaccaagccaagaaggcaataacgctccaatcacgataaaacccacttcttatttttccaatttcttctggcaaaaagtataacagattaaaacaatatgagaccggggatggtatttcagattaggaattaaaacttatcacgttttagaaacgactagagagaactgagcgagagattgatctcatctattcgccaacgagtagcagctcatcaaaagaagacgcaaacacaaagccaagtagcacaaaaaccacacatttttagagagcataaaaatcttgaaatagtctcccacttgacggaaagcttcgtcgcggtggtcgtcgtcggcggcgccggcagtggtttctttcttgtcagaccaccagaggcggaggcagacggagtgatgtcgttagagggaacgtgagagtagagtagagtacagagaaggtggtagaaatgggctggcccaaaaccaatgtaaaaaacaaaaatattggaatttgggttaaattttacaaaaaactcttatacagaaatcttttaaaaaatactgtatctttataaaataatatctttataaaataatagtggaatacaaaacagaacaactaaaaataacagtgaaacaactaaaaattaacagtagaagaactttgaaaacttaacacagtacacagtataaaatttatacagtaattttgaaaaaatttcacccacagtataagtgtaaaaacattaaaattttcagtatgtggtaaatttgtaaacatatctttttccatgtcatgtttggaaaatgaaatgacaggtatcaccaccccaaccatttcgtagtgggataccttttggagaattttcaaaaacacaaaaataaaaataaaaattttgtttataaattttgttttggaacaatcaaaatgtgttctataactatttttgttttacaattttaaaaataaaaagtaaaaatgtattttataaaatttatttttatttttatttgtggattttatttaaatcaggtcagaagcagaatcgagggcgagtccaagtctaaggttggatccgggttcaatttttaagatctaagttagagttgaagtccaaaatattgattaaatttttttttaaaaaaa

SEQ ID NO: 299367 - DNA, 2348 bp, Cannabis indica
atctgagaagactataaattacctaagtaaacctgctattgcatagaattcggtaatatgaatagaatcatgttaaaccataatcaatagatgcagttgaaatcgaaagccctaacttttattcattgttaacttccttattaatttacctgcttcttattttcactgtttttattattttctaattttaattttctcttaaattttatattttcaaatagaagtaaagaattaattttaaagtacttaactacaattcttatgggatcgacatcactctttgtgagtctataacttgttaatgatatgtatactttggtgttaaaaataccacaacactaacaagtaagaaacctaacaacaatttcaatttatagccagggctttttctcacacaatagtaatgaccgtgtcttataaacgataataatcgtatattataaatgataatagttgtatcctaacatgacatgctatttagtacatttgtacttttcttacttttaattctagagtcatgcatgctggccaatctaaatgaaaaaatgaaaaaatggacgacgatctcggtcctaggtcacaacaacggtaaatcggccaacaacttgacctaacccattctaggtctttaaattcataattcgaaatttccctatctatacatagtatggcaataccctaaatattaagaaaacacaaaaaaatgggggtcgcgaacatcaccaaaaatgataaaccgtttaaaaagaatagcagaccatttttaggtgttcctccccagaaaaatggtcgacgaccgtttttctgtagaattagagcccgagtttcgcttatctacaactccctccaaacctaaccaaatggtctcaaacttcaaaaaacaattaactatcatcaatataacacaacccaactaacaaaaactaaaataaaaacataattcaaaacttaccattaaagaccaagctttgagttccaagagctcaagcttgcttcacccacataaccagctacactaaaagcttagaaacatcaaaataactctaattctaacctagaaacatattataattcatacttactcatatagaaacaaatccttaaaattcccacttaaaaccaaactttaaccttcaaaattcaaagagaaaataaagggttaggactaccttgcttttctccacaagttactttattcttgattgatttttccataggtgaattgctgaagaaaacggacagaacctatcttggttcttggtttcttctagggccgaacaaggagaaagagaagggtgagaatatttattctaaactttttcaagactatccacaaaataaaaattaaataaacccatttacaatatactaaataaacagctacccacttactttagaaagccactaaaacaaaaactaaaatacattaattaagtctaaaaaataactattatacccttagcttaacacttaagtaatttctaattgatgggtaatttggtcataaccaattaccccgagatacttcgataaaaccaatactaaccaaacttattaaaatcaccaataccacgcactaatatcattgtgatatttttggccaccaatcaagtctctatgattgtccaacgtaaaaaaatatttttatttcatcaatcgtatatacaatacccatatattccagtaaaatttctgtaattaataaattacgcttatttactcatttttactaaaattcttaattataacataattagcttaataaaattataatcttattcattatatcctaaatattcatataatctcatatttaataaaatatgcctaattatacacaattaattttttaggaaattacaacgatccctccttatagaaattttttcctcgaaatttatttaagcaactcgcgatacaataatcgtatcagtgactctaactcctaagtcactttcttaaccttactgtttcatcacagtacttaaacaacagaatcatcttgttcggtatatctattccttcgtatctaatatcttgataggcggttcctctaatattaaacccgtatagagctcaatgctcaaagtatgggtcaatcggacacgtacttccctaccatgggaatgtgaaaataggatagggaatcaaattataaacatgattcatcattgtcctgctttgtctacctttctttctaaatctttaaattcccttcggagaataacatagtctccacttagaatccattatctctacgtttcgattcatcgtagcttttttgtttactctgtgaggtgtagtgacgaagtcagaaatttagttgagtgagggcttgaataaatatt

SEQ ID NO: 299368 - DNA, 5474 bp, Cannabis indica
taaacaatcctaataggtgtttttttttttggttttatataaaaataaaatcttaaaaaaatagaaacattgaggggcataggagtaaatatataaccaagttttgatacctccttttgtaagttacatattatatttaaaatttaagcaccatcatcactaagagcaaaccgtgcctaaatctatgtacataccagtttttgttcttgttttctcgtcagcttgttcagaacaaacctgtctctgttccattggttttgttttccattcatataaatacaaaacttcttacgtttccaagaagacaaagtcctagattgtatcgccgctctttgtttttcttttggttttgtatcattgtatgcaaatgttctggtctggtatatgcagttccatttttgcttgatggtgttctaaggtttctttccaaattttagaacaatgggatttctgggcagtgtctttgggatcattggttttggaattggactgcctcttggtctccttattgggttcttcttctttatttactccaagcccaagaaagttgaggtaatgtatataaatatgtgtatatgtatatgtgatatgtcttcttagaggagttcatatgagtcatgaatatgtttgaaatggtgaactggataccttacgttttagtctttcagcatctgtatctgaagttctgctttttcttaaggcacacttattattgaaaaattgttaagaagagtagaaatggattggtatgagatgtattcaatattctgaccctcttataaaaattgccttttataattttgtgctcttgagaaacccttcctgtaataattctgtatcatgtgttctttataaggaattattctctgagtattccctctcttgttcacaccatctggagttgaatttttagtaacaaccccttttcaaaggaaagagatttttttatacacaatatatttataagtaaagcttagttcaaatctgatatattcgaataaattaaggacaaagttttgattttttttaatgctgcaggatcctattgtcaggccactttctgagttggacacatgtgctttgcttgatcttttgcctgaaatcccattgtgggtgaagaacgctgactatgatcgagtgagtatcactgttaaattttattacaacattattcatttgtatttatttaccatgaatttcaactaattgtatatgattaaatcatccatgttaggttgactggatgaataaagttattacagagatgtggccttaccttgctaaggtaataagttgagtaataaagtaactatatatgtttcgctttcgaatttctttgcttgagttcattttatttacaggcaatccctggtattataagaagtacagcagaaccaatatttcaagagtacattgggaagttcatgatcgaatcaattgagtttgacactattagtgtaggagatcttcctcctttactctatggtaagtgtgctcacaatgtatttttgtgttatcaaagtctatgataatttcattgtaagtttgaagtgttttgtaatatcatggcaatttcatatgatattacagatttctgctaagtaattgccatttttttttcttagcggtattccatctcaatttatctttctagtgtaaagttacctatggatggaatcactttgaattcggtgtaaattttttgtacattgcatttcgtatcaatcaaacttccagaaacagataactctgttttctttaattggggattattgaactttctgtcatcctcagattgcatctattagacaagttaatgacaatggtttgcatttgacttaatataatccagtgccatgccttattacttgtttagtactcttagttgtttcggtttttcatatgttttcaggtcttaaagtctatgagactaatgagcaggagttagtcttggaaactccaattagatgggcttccaattccaacatttctttagtgattaaattgatgtctctaaacattacagttcaggtcaatatagccttaaaatgcttccttaccaatataatctgtctgtaatttatttatttagtccataattttgctggtcctttatcttccactctcaaaaggatgctaaagcagtaattatgcttcttcacagttagtagatttacaagtcttttccacagcaagaatatcattgaaacctctggtgccctcatttccatgtttttctaacattgtggtatctttgatggaaaaggtaaatagatctttcagaacatctattatcttgttttgcccttttaaactagggtgttctaaaactgatttggttgcagccacatgttgatttcgggttggaagtattgggaggagatatcatgtctataccaggcctctatcgatttgttcaggtgctgcactggtaatagtttcatggttttaggagtaaggttttggtttaagctagtatgctattattgcattgttatgttttggtgtataaaactcacttgacaatataatctctacaggagactattaaaaagcaagttgcaagcatgtacctttggcctcaaattcttgaaatacctgtactcgatgcttcaacgtaagcttattaactcgattttctgacttttatattacaattttaaatctgagctcatgttggttgtaagatttcaagtatagggagtccaagtaacaataaatcttttgcttctctgtagagctgcaataaaaaagcctgtgggaatactgcatgtgaatgttgttcgagctcataaactcttgaagaaagacctattaggagcttctgatccttatgtcaaacttagtttgacaggcgagacgctttcatcgaagaaaacaactgttaagaagaaaacattaaaccctgagtggaatgagaactttaagcttattgtgaaggagcctgagtctcaagttcttgaattacaagtctatgactgggacaaggttaactttctattaccctctattcaaagaaactcttacttgatttttcctgtgcttcattggtagcttaattaacacagctcaagtcattttccatcacaattatgatgtgccccaatccccttggtacaattaatagcagcaaaaatccaagaacagtagaagaaaaatagatattggagcaatagaaatacagtgacaatggccttaggcatttgagaggggcctagactctccatgatgcagagtgatctactcatttcatgcataacaccactctttccatactctccagtatacactttcctattcccacacagtaactacccttaaccacaatgaatcatccaccattattccattggcgtgagtctttaagattgaaaccttaaagtagcttctgcatcatagctattaataagaattttgagctcatttcattgtgttactatgtagtataaggaaaaataattcagcaggatcgtcagagtaagtgaaaggtccatctgaattgttgaagatgattactttaacatgttgagggttttctctaatttgcatttatgatttttcactcttcataggttggtgggcatgacaggttaggattacagttagtccccttgaaacagctgacagcttatgagacaaaggagtttacacttgatttgctcaaggacacaagtattcgagattatcaagagaagaaaaaacgagggaaactcgaagttgagatgactttcattcctttcaaagaaaacagcctcaaatacattaatggacctttagatgcatatgtaaaagcagaaagtgttattgacagggcatcagatgatggatctcatggtggagcaggtctgcttacagtttttatccaaagtgctgaggacgttgagggtcgaaatcacaacaatccttatgctgctgttctctttaggggagaaagaaagaaaacaaaggtaacaagttacatcataatagcagagttttttgctaaattatataagcttttgttctgtgcagacaatgagaagaactcgtaacccgctgtggaatgaggaattccagttcatgcttgaggagcctcctctgaatgagaagattcatgttgaggtattgagcaagagagggctgattagctttctgtcaaaggtatgttgttccattactttttacttttgtttacttgagatgcaagttactccacatactttataaattgcttcattgtttttttttgtatcttgtaggaatcactggggcttgttgaaattaatctgagggatgttgttgataatggccggatcaatgagaaataccatctaatcaattcaaaaaatggaaagatacatgttgagattcgatggacaacagtttgagaaatctgaaggtaataaatagctacaagttacaaccataccaaatgctgcactaaaaaggtccacacatgacaagttatgtatactcataatttttgtgaaaaagataaattggccaggttacagggctggcttaagcaatgtatacaattattctttgattagtggagtacttcacagatatactgcaatgcaatttagatagaaaataataatatgaagtatacatgtaattaatttgagccaatcggtaatatcatttatgatgtacatagtttgtaatctttgaaaattcatttaatcgacacctatcaatcttatttttccagcttttttatttcaagacttttttaatataagtaaattgaaaaagtaaataacacttgttgtagcaattttcatgcatgtacgtgtggcactaaaaggaattcatattagagattagtgactcaaaataatgactttactaggagattttgacaaaatgtttctttattcttttataaaaggaaaaaagaaaataaaattgtaaactcactatctcctagacgaacatattttataaaaagaagttagctttctctaaagtaaacacaaattagaagaagaaaacagtacacctcagtgcattattgagttgctaggtacagtttttcatttaaagtaagcccaacccaacccttttaatgataaaactactcataattttggtagaactttacatcataataattttatcccatctaatattactttcatctcctttcaaaaaaaaaattattttcatgagtaccattttctttatccaattttatatattatttgagataattttatatccacaaacgtgtacgcataaataaatattttggtttagttaaaagtaaagctatttaagacatgtcaaatctaaattttgtagttgttggatctactcctccaaatctcagctaaaatatatatctggctaagaataataagaatgaatatctgtgaaagagatttgcttatagatgcctaatatattttgaaagaagattttctcaattataaaattatgggagattcttatgttgtttcacgaatattaggtgtcgtttggtaata

SEQ ID NO: 299369 - DNA, 2227 bp, Cannabis indica
ctaatccaaattactaaagcggtcattacagacctagtgcccgatttgacctaggcgctgggcccaacgcccatgttgacattttgtcaaattgggccatttccacggagtatttttgaggagtcttctgggcatattctctgttttcgtcaaattttaagacacaagtgtaaattgcaaataacaacaaaatcaatacaagactaaacccataaccaagcaaacacaaaaataacaacagtcagcatgcacaaaaaaagaaagtgccaaagttgcatgaggaatagctaaccaagagaaagaacacaaataaattaattacaaagttattatacaatactagatgtggacaaggaagatgaagagataccatctaacatgataggaaatataagattaataatatttgtagttcaaagtacaattaagagattaaaataaagaaacatagataaatctataaatattcaagtctatgtatattgtatatatatttatataatagataaatatggtgatgaaggagtctatattagagaaatttttatatatacttgtaggttgagacagtttatatataatgctagggttataaatatgtataaatagatatttatactattattttgtcaagagaagctaagttagtttttactcaactaactttttgttaattgttagttaaatgttgtaactaactgtgttgttgtaacaacttctcttctttacttgcttatccaatacttatatataaacctctgtaatatatttttcatcaatgtacagaactttcaattctttctctctactcttattatcttcacatgatatcagagcatcttctttctcttcttcttttaacttttcttcttcttcttctttcttgagctttcattcatggcaatggattcgtctcaaacagtaactcaaaatcttggtgttaatcttcctagatctgctcctataaccttctctcattctctctcgattaggttggatgagcataattaccttccctggagacatcaagtgtttgcagctatgaaaggcagtcgacttcaacatcatcttgatccaactcgtaatcctcccaaatttctcaccaatgaagatcgactgcacaatcgatacgcacctgaatatgaaatctgggattaacaagacaatatacttatttcttggttactgtcatctatgtctaaaaaaatcctcatgcatatggttggatgtgaatcaattgcatagatctgggatacacttcgaacttactacatagcattgaacagggccaatgttggaaagtataaaactcaactcaaaaattcaagagtgcagggatctctcagtgattttctgttaaagatgaagagcctcgttgatcttcttgcttccattggtcattcaatgtcagatcaagaacacattgaggtgatatttaatggtctttctagtgattacaatgtgtttatcacttctgtcaatacttgacttgatgcctacactattgctgaaatcgaggccctgctcatggctcaagaagtgagatttgataaagactccattgaacttgacattgccaaaccagaagccaatctagttcatacaaagccatttacatgtggtcgaggtaccttctcttcaccttattatccatcttcagcctctacttctcactctgcaatgtataggggtcattatcctacacatggtcctcctagtgctttctctgccaatcaccctcctctaggttttggtcctaacttgaatcaagtttagactcatggtccctatccaggccgaggtcagatgcaacaaaacaaaggaggtcctgtgacaggtcgtggtcaatactcagcttggcgacaaaagactcaaagtcaattgtgtcacaaaatgggtcatacagtccataagtgcttttacaggtttgacaaaacatttacaggacctgaaacatttcaagaattcacaggaagtgccaatcttgctgagtgttctcacctatatgcctctcctaatgtggttcaggataatagttggtatccaaattctgtagcaactcatcacctcacacctaatgctcaaaatctgatctattctactgattatgcaggagatcaacaaatccaactgggtgatggctctggtctgaatatacaagacattggtaaatctttccttgtaatgaccgctctagtaatttggattagtaagggcaattagcact

SEQ ID NO: 299370 - DNA, 1976 bp, Cannabis indica
aaaaaaaaaaaaaaaaccctctatacaactgacaataacactaccaatttgaaactggccaaagaaaaagaagattttactgtcgaatcattttctatagaaccctatactttctattttgaactggcaagaaaaaaataattgagattattttaatgaaattatttttattaaatctggctttttttaaaagggttgtgaaatatttatatatatattttttgaaattgtcttctaatttttgttttattttattatgtaatataataaaaaaaaaatctgttcttcttcacttattctaccttataatcaattttttctcttaaaagaggtgaaattactactctataatttgttgcagtaccacattatcagtacaaacggtgcttttgaacaaaatgaagggaatgattaaatgtaagcatatgaaattgtacaaaagcaaaacctatttgctgcactgtagttgtatccttagttttgccggcaaattggttaattgtatggacttgttatgtttttctcttcttgccaattggtcatttgtattgtactgaagaaaaaaaatgttattccaatcacaatgcaaacaataattgaaaatccttgtatttcaattaaaagtccaacaaccaaaccgtgacaatgtaattacaaggaaccccaacctttttaatactattgtacactattacctataatatcctcctcattaataacggctactgactttactaaattacatgaattccctgattaaatgaagccaacaaactccacaactcaaacagctggtctaggatttttacagccaaacaattataataataataataataataataaatagcaaatatataaattagatataaccccatttcctagtagcctagcacttgccgtaaaatgccataaaaggaaggacggcaataatcaattgaaactttcacacccactttctgaatatacatactctagtgatagtaatttcacaggacaaaaggtccaacaagcttaaaacaaattccacctgtaacaactacctccattgataactgtcaacaaacatctgtacctaagtaaatcagatggagtttactctctttcttactaagaaaaagaaaaaaaagaagacataaacttcagtccctaacacgtttgcccaaacattttctttatggggtttgatgatctatggcagtttttggtacttttcttcactctgattgcatcttcttgttggctctatacctcaatctaaagctctatgatacttgactagcacacttcatatctaaggtacttgactagtttttttccagcaatgtcatctccacataacagaataattgttaggaccatagtcatcacggctgcaatcaccctagtttttacggtcatcttcatctttttctactacaaattttataatgctcgtcgccgagaaaattataaggttaaggctagttttcggcgagaagaggttatgatgacttgtgaagagttcaagcagcctagcagaaatgtcaaagatctgaggggttatggaaatggaagggatgctgttagtatgagaaaactagaagatgatcagcttaagataattttcctaagtttgtgtttaacccgagttacaaagaagaggaagaagaggaagaagcagaagagaagagagtggatgctgaagaagagaaacacaaaaagtttgaacctcgtgaagctccactgcttcatgaaccatcatctgatcagatagtttctgataaaatggggaaaccatttcagcagaaccaaaatctaccagctccagtttcagtactacaaatgcaacataggctgccaccacatccacgaacctcatttagacaaactccaccagtggtcccgaaaaagctgaccccatctccacaacctggtccgacaaataatagcatcacagcccggccatcgccaccacaatatcctcctcctcctcc

SEQ ID NO: 299371 - DNA, 3536 bp, Cannabis indica
aatgtcatatctaatagtgggaacttaatgttgctaaagaaataaaaagttttaggatcaattttaccaaaaatataaaagttttagagactaacttgccaaaaacttatatagattgaagactaatttgccaaaaaataaaatttgagaaccaacttgtcaaaacatgtatagtttagggacatgcggtacaaataagccttattatatatgttggattattatgttttaaattatgtttttttgtatatatatatatttttaaatgaaattaacctaaatggtagctaaaatagattggatggatctaatccaatccaataaaaaattagccaatacatccaatggttggcactgatccaatacaataaatttactggattggatcgaatcagatcaaatgacttaattcgattggattggaacggatgataaaatttaatatccaataaataattagattgaatccattgggtctaaatccattgaatgtgatccaataaatatccctaccatcttataatacttcatgaatacattttttaggtgttaaaagataatatttataatcaacatttatctttatatatataaattataaaaaatgtgtacacccctcggtaaaactcctatttgtttcaacatctagggtttaatttttttttattattttgttatattttgtagggccttgtaaatttttaaaaaactttagaatagtttatattgctaaaaataaaatttaaaatattttgttgagtgcacgacttttttgtcttatacacatagtaaattatttgaactttatttttaacaatataaattattcaaaattgtctgaaaattgataagtaatcctaaattattgtaatatataagcaattataaggaaaaggagactacaaaattttgttagatgtaaaaatatacaagcgtatatatccaaatacttttttgaacatgtatctaaatacttataacaataagtttataattaaagtaatgaaaattaataatttataattacctaaacatatattactaatactaattaatttcatgaaaaattgaggtggctattgcaacccaactcttgtttgatattttttcttgtttgggtcaagggttaaaaacccatcacaatccttctcgaaaaggattaaaagtttggtcattttgaaagctaacttaactgtaggcggtgctatctgtatgattggaactcttgagcattactacccttataggttgtcagagaatctcatattattaatatgtggaaaaattagaacaaatataaaatttataaactactccttccattacaattttttttttctgggtaatgttaacaaattctaacatagctcacacgtgattctgagattgccaatataagataattttgtgtataaataggaatgtttagaaaacgcctaaatgggggagcatcgaatttatgaatcctcatagtggtggtgcatcattagaaaaagaaaggcgaaagcaaaagtatagcacccacaaatcacaaaatatccaatttgtgagtcctgttatttgtttaagtagcgagaaacataagggaacattaaaaaccaattggaattgcaaagaaaccaggtgtgacaatcccaatattggaaacaaagtttagcagtagtagtagtaagcaaagcatgctgtttgttgttgggttacaaagtaacagttgtcctttctagtcaagagatttgttattctcacctcttggactgctcccagcgctgctatttgacaatgatccaaacgctgtcttctgtaggacccctgtaggagatgatgaccccattggaggactattgtcccatccttgagtcatcagattaagcaccgacgaggaggacgacgacgagttcttacactcaacaacagacccgtttttgttgttgttggagtggtggagtacctcccctagtggaccccccatcaatgagttttcccatgcaatcggaatccaattccgattccccacttgctgctcttccgctccgactcccaaactcattgacaggctggtcttttcaggcgacgaagatgaggggatgtagtggtctgacgacgccagcggcatggaaatggacaactgggtgcggtccgtctgcatgtctatttccggccacgaaagggcttctcggttggtctgctgtgatttaggccaatcgtcgatgaaatggcggagggaatgctgttggttttgggggagagagtcagaagttgccagtccgaaagactgagtcaagaacgcgttctgatctttagagtacagagagagacctgaagaagttttctgttgttccatcctgcaaaaatgatagaaagaaataatcatttcatttttccccaaattcaaaattaaaggaaatgtgttttttttctttgtctacgtgtagaatctctttcggtttaatgacctgtttaggtgggttgtagctgaagtgttttgttgttgaagtagatgctggttcgaaatggtgaggctgttgttggatgagccggcggcgcccgatacagcaacagaggtggatgagggtgacgaagaagctaaaggcactgcctttgacgtcttggcggcagtttgaccttccacaggctttcttgaacgatgacggcctctgttcatatgccgctcgcaatatttctggtctgcaactgcgtctcttgagcaccgccatttcttcccatctgtcctacgacaccttcctggctccggatcggcattgttggagaacccaagatggtaagaaccccatcccactgcgaaaataaacgacaaccaagttaatcaaacgacatcttaagatcatctaactaaaaatattataaagtaaaaacaacaaacacttacatgtattgggcctcagaagtccacctgaaaagtgagagaaaccagacgagtcaatggcttttcttattgggatgagaagattagacggaatggggacatttgcagtaatgtatttgtagatcaaagcttgttgctccaactccatccattgagatgaagtgaatggaccttttgcccctgttatggccccatgcatattggtaccaccgttcgaattcaagctcccggagttataccctgcaacaaacccccaaaatcgactgtgtttttaagtaacattgaaccaagattctaaaccaatacaaaatggtcatgtctgaatatagaaagattgatcatgttcaagagaatgagcatgaaagctgcacagaaaaggacatgtaatagttttgttgcccataaatgaacttgaaagtaaaattcataaatcctttgcctcgttagttatagtgtttttgctaaaattttgtcaaaaaataaaaattaaaataaagtaaatccaatgtagaatatttaactacagttacggaatgttaccaaaatgtgtctcaacaaaaacaggagcaataacagtcaacatatttgttgaggacttgttaccctttttcggggttgttgttggttttggtgacaaagactcaccagcaaa

SEQ ID NO: 299372 - DNA, 4087 bp, Cannabis indica
tatatattttttctaaaaaaatatatatatatatatatatttgattttatttgtttaacaatctccataattcgaatcaaccgacaaagtttattcttttcagatatactaataaacaccatcgcagctgcccctttcttactttttttctttttggatcaatgatcgtagttgctttgctttagtaggtacaaatacagtatagggtctacactacactactctagcccaaatcgaagctttcttcaattcttttgctttagtaaaaaaaaaaaaaaaaaacattaagaaattgcaacttgacaataaaaatttgtcaaaagataccaaagatattttattggaatacaggcaaaacttaccaaaatcccataaagcaaattctttagcaaaatggttaaatgtcacttttttttaatttatttatttacctcacagaccaataagccctacacgtttatacgcctccaaccaaaaaaaaaaaaaacccaactcgaaaagaagtctaaattctgataagaacatagcgagttgactcattttgtagtacgtacaattttacttttaactcgatccaaccaaaaaaaaagaaaaggaaaaaaagaccgggaattgtcccggtttataattttataaatctatccgtgaatttacaataataccctttctgcacaaaactatttactacacccttaaaatgacgtcacgtgcaatactcatcaagggttcagcggcgtccggagagaattttctggcgaacaagaaggggtcacgcctgtggctatggtcaaaccttttgcttactgaagaatctgtgccgttgatttccatatcaccgtaccttggcaagtcacttctaagcgtctggattaactcgggtcccacttcggatgcctcgtacgtgcgaggatgaccgtcggatctgcccgcccagtccacgtgcgtgagcgtggcaggtacgcacccccggtagtcaagcatgttaagaagggtaggaaagtaattctcttcgggatagcacgtgtctaatgtcacgcacggtaagctgaatttggaccaaagcttgcgatctctgacgattagcctcgcgtgcttacgtgtcaagacccagaactgtgacccgatccgaaaatcctcaaatctaacttccggcagcattgcttccggaccacgcgcagcccacctgatgtagctccacggttcgtgctcaagaatctcgatgaagcttttcttggaccggatcaaagtccggtaagtgaagttgaacgagtgtagcggaacgcacgagggtgagagcagagcgaacatggcattcgacggatcgtctagaagcgcgtgagctaacagccgacgcgccgccaaggtaagtgaaggtgtaagtctttcggaaggtttagaatgaatgactcgtcgagcgaacactccggaaaacggcgggtcgtactgatgggtcgggtcggcgtggatgtagatgttgtaaagggtttttggggtttggttaaagtagagctcccaaagcggtgcgaatgggagtggggttgtagtgaggaacataaaagccaacttcttcggcgacttacgaggcagcggtctcgagttaactcgggaagcgagtgagaatagcaactcatcgtccttgggcggcggaggtggaggtggaggtggcggtaggtgtggtcgtgatggtggagggagagagattgatttgatatcgatcttttgatgacgtttggcagctgagaaagtagtttcttgttgttgagttttagaaagattacgggtacggggaatggttgtggtgatggcggtggttgcagtaggagtagtggtggggctagttatggtgaagactacagctaagggtaaacaaagaagtagagcacaaatgagagagagtggagttggggaaagcatggtttttgcttcggaagagagatagagatggagagagaaaagggtcttccttgactgtgtgtgtgactaatttaatgaaagagaatcgttcagagagagagagagagagtgtgggattcggtagaggaagaaaagggttcaattttcaaagtatgcaaaataaacggctacgataagctgtagatatatatatagatatatgagttttttattaaaaaaatatatacaattaaataacagatataacacattaattataaaataacagataatgcgttaattattatataagaaaaagaacataattgtaaaatcatatattatacaaatacattagtgagctcgtacttaatgaagtaacttactatatatatacatatttaaaatcgaataataaaattaattacttaatttgaaaaatttctaataatttttattatttttaagatatttgtagctttaattattttaaaattttgaatttgtaagtacttattacttaatttttgttaggtttcgttattatgcactcccttgcggattaaaagaaaattttaaaataacttataatatacattttcgtctaaatttaatgatttaccactttagtattacatttacatgtatcacactaatagaatttgtgttgattaaattaaacagaaattacagttttaaatattgaataagtttataacagttactaactcaatgtttaatatagggacagggtattttttcttatataaattaattaaaggaggagagattaataaattaattcattttattttatataccaacttttaatgtgcaagaaagctgactggttttgtaatagtctgaactgaaccattggatttgaagtagcaccaaaattcagtgcaacgtcatcatggattagcaactagggagtagattctttcttgaaggtgcgtgaggtaaacaacaaaagttaaaaataaataattatattaaaagagaaaaagaaagaggtgttggatatgattatccgaacattatgacacgtggcaggcatgccaggtgtcgtgggccattattgtggatgatagtgtgagctataatattaataataaatcgtggggtttgaaaaactaagatcacaattttttcggttttgttttgtatgttaattattatttataattaacttgtaattctctaattaagagagtggataattgcgttttttatgatcaatatattggcaccttaagatctaattaacacaatttcaaggctaaaattatgcaaacttttctcttttacatgtttgactttgttataagtaatgacggattttgtccatttcaaaaaaataaaaaaaaatgacggattttgtgttattttgttgtgaaaggcttactttttttttttttttttaaatgtttatcaatttatatttatcatcaaaagataatggtatatggaaagatgttgtagctatcatttaatacttaaaagatatctattttaaagttgtttataaaaaattgatgtaggtgttacttgttttgatcaaaaattagtttggttttttatgggtaaacattaaattaatttcttaatttttgattgagagttttttttatatatatagaatgttttctgttcctttacgtgattctcttttcttttttatagtacgtttttcttgcatgcatggttgtgttgtcaattgtttattactttttttttcggcacgtgttacttttattttttttttctcttcatttctttaattttatcactcattttaattgtcttattttaggttttaagaatattttccttgattggctatcatcatcgactatccttttgggctatagtgggtctcccgagttaaatggtatctcggtgtaactggtacattgttgagatatttgcagtcttagttctttctggtccatggtaagtgacacatcaaatttgtacaattcgagatacatgctatctcgactcgttgacatctcagatttgtaagatttgagatatataatgttaatgcagattttcgttaacgataatgagtctaatttcgtgataggttaattaagcacaaaaagtatagaaaataaaagaagcaagaaataaccccaagttttttacgtggttttgcagttaactctgcatagtccatgagtcaatc

SEQ ID NO: 299373 - DNA, 1802 bp, Cannabis indica
aataataataataataacaaaagaagtgtaagaaagatacccatcccaatttgaaagactccacttaatcttaattttctttcactttccatttccatagtttgaaatttttgcctctctttccattttggtagttttaccattttcttatagtgattttaaaatttgacatttagggtaaaagatgtcaaaattgaacttagtaccacttttataaatcaacatgatcataatcttttatagataaaagatgagcaaccactacatacaattatattatatgatgtatcacaatgtcatatggtaacaaaatcttaatcaaattggtatttacaagattctcaagagaatttaatttaaaaaaaaggaatatttaatttgtattcttttgagaatcaactttgctttcttaaaattaacaagggtagtacattggtagaagcaagctaataatttttttaggttgagattccacttcatattaatattttatttattatttttctagaatcatattatgtgtatgttagcatagttgtcaggttgttgaaaataaatactaaaaaaaataaaataaataatacaaacaaaaattcattatgtgacagcatagtttatataaattaagatccatttttgtatcaaattgccacttttttagtatgttaacttcaaattacgccagcccttttagtattacctactcaagaataaaaataaagttgttaatttggacactctttctaaaactcttaataatatagacaattaatttctttcattttattatttttcttcatttgtaagtacagagaaatattataagaaaattctcttatctaaatccaatttaagattaaagggtatagagaaagtcacttatccaagtctaaattcgttcatcgagtatttttaggttttttgtcattggcgaaaaatataagcatagagaagctcattccaaacatcaggaacaccaggaagacaccagtgatcacaatcagcatagctactagggtttgcttttagtttttcggttaaaggttcccactgttttctataaatagagggatgagcttcttttctgtagtccgagagttgagtaatattaagcatttgaacatttaaacctcttttttttaagtcatcaagtgtgttttctaccactctcatcattttgggatctgtcccacttcccctatacccctcttcaaaaatttgctcagtttctccatagcaattttggccttcaagtccaccccattcttgagccctaaaatttagataaatagataacatattaaattaaactcacaaactataatatatatgttcatttaaagtcttgcataacaaatgaggctatgtttggtaaaataaaaaattaaatttaatgtatacacatacacaagaaccttattgggtattaaataatgtataattgagaatgtgggacatcatataaattccattgttttggtataatatttaaatgcatgaatacagattcacaaagatataaaagtaggcaagactagtacattttacctaccaagaaaattatttcaattattttgtcttgtaaaactaatgaactctcattatacacatatatacatacacataacatttaataaatgcatgatgatttaaatactaattcataaattactttcattagattccataagagttttgattgtccctttaattagtggatcaagattatgtaaaaaaaaaatagttattgagaattttcttactccccaatcattattttatttattttttttttgggtaaa

SEQ ID NO: 299374 - DNA, 3174 bp, Cannabis indica
gatcaaaaccttctctgcaatctccaacaatggcttcaggttagtgcttccgctcatattttatcttcatcttctttaatttaacaaaggttttatagatttatgatttagagttttctatattaaagcacttttaggaatatgtttggatctgtgatttatatatttcttaagtgttttataaaccctaacaattacatcttggccttatgttcacccctgcaaccaatctcaacttgacaggctacacatactcagattgggcaggatgtcaagatgatcgtaaatctacctcaggctatggcatcttcctcagagacaatctcataagtgggtgttcaaagaaataacaagtagcggccaggagtagcactgaatctaaatatagagctttagctttagccacatctgaagtcatctggattcaatcactcttgtcagaaatctcagtagaaattcctcaatgtcccatattgtggtgtgataattttggagttggatcattagcctcaaattcagttgtttcatgctcgaactaaacatatcgagatagaccttcatttattcagggatcgtgtcttagctcaataattggaactgcgttatgtggactccatcaatcaaacagttaaattttttataaaaccattacctgtttcatcgtttattttcttaagaaataagttaatacttggtgttcacccgtgtcacttaaggggggatattgtaactgtaaaaacctaagaaaataaagaaaataactaatcaagaaataagtttgttatggctgttagaaaagagtccaattgtaaggtcactgaccattcttacacatataaataacaaggtctactctgaattagttgagcaattcattttctattgtccattttattttcaccttccgttcattcttgctctctctgtttgtattctagtcaaattaagaactttgttctttgaagttcttgtaccaacaaacaaggagttagactccacaaaagaaaattcataaaaaaattgtgatagccatcttaatagtacactactaatattgagaagagctatgtgtgtgttttatctcatataaaagtatatatgtattgagaagactaaatgttatgtgtaattaaaatttatcaatatatattcagatgaaaaatataactaactacaaaaccagcaaataaaaaccaggaacattaccctaagacatcaaacaaatattttttttagccattattggtcacatattaaatacccatctatcaaatgacacttgttggtgtcttaacacgtcaatacagatcacactttaataaaaattattacaacaacacttaccgcaaatatcttttatcagggtgtccccttttatcgacaacattatacgtcgatattcaacatataaattagttagtgataactttgttgagaacaactatcacaaactttgctcttgtgagctggccttgttgtccttataatctctctctattgattaatataaatgatccaatttccactaaagtagagagaatgagcaattcagtccattagttctacctttgctccatttctcattttctctcatctttgtcattgttcttgctcaaaaactttgctagttgcagagtcttttatggtatttgagctacaattacttcaaatgccttgaacgatcctcaactaataaatcaacaaccttcagctactccaaccaaaatttcaagcagctctagcaagaagaaattaagaagtggattttccaaacaataataatttactttcattgagtctttgtctcgattgatcgaattatactctatggagatcactcatttttgcagcaactcgagcttacaatctcaatggatacatactcagcaccattccaattccatctctgcttcttgtaggtaatgtactaaatctcaatcatcataaatgaattcgtttctatcaattccttgtgcattggctaataaattttgtcactaaaccaatgcttggagacatcattaattgtaattattctgctgcgatttggagcacatttgagtaactctttgcaaccagatttagagtcagacttctacaaattaggaatcttcttcaaacaacaaagaaaggatctcaatccactgaagagtacatactaaaaattaaatggtatgctgatgctctcgaaacagcaggccaaccattaacagatgatgatttgatcttgtactttcttgatagtttaggacgttaatacaaagctgtggtggtaaacttaacatctagatctgattctctctcactccaagaagtccagtttatgctccacaatcaaaaaatgagaatcaatcaacttacaactcattctttaacaaatgtccaagaaaaacttgcaaacatgtttgtcaacaatggatttcaaagatcaaacaactattctggaagaggttatcatggtccatacgaaggaggaggaagaaactacaataacaatggaggaggtggcagcaatagacctatgtgtcaattatgtggaagggctggacatactagtgtgaagtgttatcaaaggtttgacattacctacaatggagatcaatgtgctagttctttcacctccaacccctcctcaatacctgattcatctcctcaagctcacttatttgagactacatccacactagatatctatggggcttggtacctcgatagtggagcaacacaccagatcaccaattatcctcaacacatgactcaaactgctaactatcaaggaaaggctaaggtcattattggtaatgatttctctcttcttatccatcatataagctatagtttagtcaaaactaattccctaaacaaatctctattggtgaaagacatttttcatgtgcctagtgttactaaaagtctacttagcatatcttaatttaccaaagaaaagtatgtccctcttcaatttgattatgtgtgttatcttataaaggacaaggctatcaatcaaattcttttttggagtaatctcaatgaaggcctcttgttatttgtgttttcagaaggatgacacgtgacatttttcaaagaatgatcaagcaaaaattgcttgggccaaagtccttctacaaaagaagtgttgggatttatgccctaaaaacaagtaattaatggata

SEQ ID NO: 299375 - DNA, 5211 bp, Cannabis indica
aagttaagggtgtatcagtacattcctaaaatcaccccttttaataccttgtatttttaataatacttatttgtaccttatattttaaaataacacctatttagtatcctaaattcaaattcttttgataaaaattaattaatacaattaatagtttaaaattgtatgaattatgaattcaaatttatttatttgattacatataactgattgtttgattaaattttattttaaggtactaaatatgtacaatttaaaaatatgaaatgccaataaagaattattgaaaataaagggtagtaaatatatactaaatgagtatattctttattttaaatatattcttttccgtggcacataatgattggctattggtcaatatcttaccgtacgctgcagcgcagggaattattcccagtcctcttagatataagagcatctaatgcctcacaaaaaaggtaagtagctgaaattgagtttccattttcattcatttctaagctaagctttactgtgttctttttgtgtgggttttcttctgtatggtatccaacaacccgaacccgtctgagagcttttacttggacccgactggaatggctttgccgggtctcggacccttcacggcggcggtcaccgctacgaccactacaacttcaacgacttcgtcttcggaggatttgtctaagaagatccgtaagccttacaccattaccaagtctagagaaagctggaccgagcccgaacacgacaaattcctcgaagccctccaactgtaaatcaatactcttcgcaattctattatttctccttttttatattcatataatttcatttgtgattttgtaatttctgaatgcgttgagaattagggttttagggtttgtaattgggattgatgggtatgattttaaacatctgagggtatggagaagcgaaaaggtttggagtgaatagaaattattattatgcttttcttggttgtcaagagaaaatgtgtattgctttgtttactaaaaagcaacggaaattgtttgttgtcatctgcttctgtacttactagccatcaatggaaaacgttatggttaatatttgtcaaaagttaattccaaaccctaaattgaagacatttcaagggtttgtagtcattttgtttttttcactctttaccctttgatgatatttgaaacctgaatgggagacatctaacagaatttctagattttattgagaaaaaagcagatctgtggccggtacttctagtgggaaaacttttatcactctctcagaactgtgctttttggtttaaggttaagctctatatagtttccaacaccagcactgggtgttggcgcaatttagttatttttttttttacgatatcagagaaataatattcagtgtttcatctccagttcagaatttaaaaattagaatttctaatacaagaaaagagatgaaaagtttagagtgaaagaggaatatttttttccttctcagcattgggactcagaaatgaactttagctgtttcactaatgtctagtcgaattatgtttcggcctgcagattgtccttatattggggaggccactctatctttcagtaattagaaaaaaatcgattttaaatgtgaaaaataatttatgatctgtaatataataaatgctaacctcctcctgtcatagagcttcaaaatattagagatcttctttatggtatttcaaataatttgaatattagtttaaattctagtgacttaattttaaacttaatatttgaaattaaaaaaaaaactagcattgtaagaaggctgttgataggtgctttttcatatatgttcactgatgtatgtgttttcttgctgctatttttttttttaatttagaacagtgaagttaggagtgttgtggttgagagtttattttcaaggatttttctgaatttatgtatggcatttagcgttgtttttctgtttgcccacttgcttttataatctttttgatttttggtgaccttactcatttacccttttcttcatccagctttgaccgtgattggaaaaagattgaagcatttgttggatcaaagacagttatacaggtatgcattattgcatattgaacatcaagtttggactgccaaaaacatcagtgtatctcatataatctctagtcaatactcttgattgatttattttaagagttaaaaaggaaaaaggagaaaggcatgatatgttaatttatgtagtcatgtattcttttatttaataccaggaataaaaaaatattcttatataaaataaataaaaaaaaatcaacaaatgtctataccaacgagaatcttcgctttttcttctgcagatacgtagtcacgcacaaaaatactttctgaaggttcagaagaatgggacaagtgaacatctaccaccacctcggccaaagcggaaagctgctcatccatatcctcagaaagcttctaaaaatagtcagggtatttctttctccagcatgccaaattgtaaatcaccacctttgcaacctatcttacatctttttattttcctttcagcaccaccagcacctgtacaggtttcaggagcttttcagtcttcatctgccttgcacgaaccaggttatattcaaataccggatccgtcacttaggagtcccctcgctggtgcttctatctcgtcctggaataataattctccacaggcagtcaacttgtcaaatgagacaaaaggtataattttacatgcatagatgtcaataataatgcatatgccaatggtgtttgttttgcaatatcacaaacttggcatcttaattattcatacatgtgctttgcagcaccaagtgcggcaaataactgttgtagtagcaccgaaagcactccaagggcacggcccattgttgaaacaactgatctaggaaatcatggtcatcaattgagaggtattccttgaatttatatccccaatagataacatagtcatctaactagtttagttgtctaatgttagtttctctcatttaacttggaacgcataataaatgtgctgaacagttacttgaatttttattgaatatattgtccataccgtatatggtaggagtactatgtctcacaacttagcacccagaattttaaagacatatagtaatttacttttaatttgaaaatcccgctgccatttctttaggttggaaatcataatgtcggggtgaactgggtataaaattaggttcatgttgaacaaatatgttgtcttgttcatcttcttgattttattgctttgattctattcttggatctaatctcaatgatattcaatcatattctgcagttcttcctgactttgctcaagtctatagcttcattggcagtgtttttgacccaaatactacaggtcatgtgcaaaaacttaagaagatggaccagattgatgttgagacggtatgttttcttgaagttaacgttgtaaggttacttaatattttgataatgtgatgacagtgtcaatgcctgatcctggaacaagcacctcagaatatatgttactatgtcttcgttcagaattatagctgaaaacctaattactttttcacttccaaattgttctgtaatagtaatgtttcataagtccagtatgcttcaatggaatgcgtaatattattttgttgttgtctcttatccaggtattacttttgatgagaaatctatccatcaatttaaccagtcctgattttgaagatcatgtaagtattcatttcagtgagctaacatgtctttttgtttctgtatgtgcttagcacaaatgtctaatataatcagaatagtgctcttggcacatttaaccgaccaaaatatgggcttatttaattttttctcagtagtctcatttaataattagaatttgtgtgttccattcttataaccttgttttccattattgatacagcgaaaattgctttcatcctatgagattgaaccagataccacaaatcagagcgatgcgatcagaccatttaatgacgaccaacccaagaatgttgccaagattgtatagagcataaaattgataagcttccttctattgactgcctgcaaagtttctgaaggttcaaatacttaaaagcgggtagagattaaattctcgaaaaggtgtgaagaagattacagtgcttctaagttccaccccacccccacctcaaatttgattttatgttctacatggagatattgcaagtgttgtcggactacttgactacacattatgttgataatttttgccattccattctagtttatgtatatattatatgaacgaaagaagaggaacaaaaaaaaaaggctttgcattgcatgtatagttagcttctgatttgtgttgtatttgtggctagttttgtacagcacaagcttcttgtgtagtcaagttttgattgattatgttttgctaggattggtttgattaagtctgttgtaatgttaaaaattaaaataatgagatatcttctaatactggattcgttaaagcagacaaagatggcatacatggtatgattatgtgattggcagtggctgcatttgaaattttgaatattgattattgattgactaagcgagccaatgtgagaatttccggtgaagaggtaaactattggctttttctttttttgggtaatgaaatattggcttttcttaaaactcttcttgtacaacttttggggtgcattagtgactaaagatagcaaacgagaacaacatatcttgagactttgtaacgaactaagacctaattatttatgggattattttaccagtacccaaaaataacaaaacggtatattatttttttttacttcgtacgaactttttattttttactaaaatacagatgattggttttcttgtttttagaagaatgttttcattgccgataatttatataatatatagggatacgattttgtcacgttaatgtactttcacagaatgtattccgtgatgtacggcggccgttagatagggtagttatttgatctgagggctggggttgatctaggagtgattagggtttaaaaatggtaacatacactgtgacacattattacttacctgtcgtacaacagaatacattctgtgaaagtatattaacaggacaaaatcgtgtcccaatataaatatatatatactaggcagaagt

SEQ ID NO: 299376 - DNA, 2552 bp, Cannabis indica
gattaaataatgattacattctaacggtacaatcattttggaaaattcctattttgaaattgcagcaggatgttgacaactgtccttgcagggaccacactgaaacaaattcacctctgtattgaaaactttcatttcttcacaaaaagtctgttgcaccacgttcaagtttgtggtgtgttttttatttttaagaaagccaatcaagtgccgtacatgttagccaatcaaattttgttatccaaagctagtgctatgtggatttagattttgccccgtgtgtttgtcaagctcttcggtttgacgagcctttttctttgtaatatttcgaattgatgaattccacttcaaaaaaaaaaaaaaaacacacacacaattttgcctttcaaaaacaaaaaatataaacaagaattatatttttacttttgtagtttaaataatttaaaaacatgtttgtatatatttgtgttagtatcatatgtggtttgtaaaaaaaaaataaacataaaaaacttaaaataatttttatccttttttttagtttggttattgaatcgactccttatagtcattaagagagcatgaaacaagtcttttttaatctcacctgcggttactttctaatactaaattgttaaaaggatatgtttggaagtttggtggaaaaaaaaaagaaatgtagaaaaaaaaaatcttatgttcttatacaaaaaaattgtacaaaaaaaaaaaaaaaaacttctccgtcctaaacatgaaaattgatttttttttccttacattttctttaattttttcttcttttgcaaaaatctaacttccaaacgtaagaaaaataactattgcgttgggacgcgacaacattacaaagaaaaacattcatgattatgaaatgtgttatttcttctatcattacaccaaacgagcatatgattaaaacatgatgaaaataaatcaattaacataaataaacaaaagaacaattaatatttaatgtatacacagctacactaatagttgaacagtatgttaatcgcatactgagcgttcttatgttaactaattctaacttgcaagtttatgcaagttgtcgtacatgaaaatgtgtatctatataaataattttgcatgtcgagaagaatgtaaaagatgcaggggagaaacactttgtattcgtataaacgtatatagtcgctaccattttactatgttactatgttacattctctatgttttcctgcatttaatcacatcatttgtattctcattattttttatggtgcgaggaacatgtttgttctcaacaaacttcttgtcgttgcgagtttatatatctacttagtataatctaagataacttaaagacacgcacctcatccttattcatgtattggtccacatatattttatatctttgagattatgctcacttataataaaaaacaatcatctaataacactatatatatatatatattagaaattaagaagtttcaaatattttggcatatggtttaaaattatgtattttaagttgaattataaaatttgagtaaatatataataatttatttttaaactaaatttaatacaaagaccaaaaaaaacataaactaagttataatatatatatatatatatactagctaaaatttatgtgttgcattcgtgtctgtcgtatatatatattaaaaaaaaaagcatatatgtcaattaaaccttgaaaaaaataatagaaattgagataatatttaggggcattatattcacacccttaaaatttatgttacaccccatttctaataaaattatataattacatatttatccttttgtaattaagataaagttgtgaattggaattgaagggggtgtaattataaaataaaatgtattaaaaaaaaatggggtgcatttagtttggggtgtggtcatcaattttttgggtgcaaatatattttccctagttactatatcatctaaatttcccaatatttaataggtttagtagtgatagtggtagacacgcacttacacaccacgtcctcaccccgtctcactcggcctaatgcacggcatttggggcgggtctcactcaaatgggctttccctctcacgttggcccaaaataatttagtattttattatattacatctaattaatgatttatgtcacatcttatttctatcaactacatatattagttactaaataaagtttattaaataattaaaattgaaatatatatttaaattaaaagatcgacatatgtattcgttaaatatttttttatttgatcatgtctcatacaatccgctgtataattaccatatatattttcaaataattaagttaaattgagtaccccaattattattctttctacgtatttgtaacttgtttgtactattctctaattataattttaaaataaaggctaattagcaatttttctcttcgaattttgacatgtattaaattataccccctgaacttttttagccgttaaaaatttcctctgaactattaagattgttaaatttaaggactt

SEQ ID NO: 299377 - DNA, 7234 bp, Cannabis indica
aggatctgacaggttgtatccaacacaacctttcctccaccattacatttccttaatcacaaaatctttaatattattaaattcctctctatatgtctactcctctaaggatactggattctttactttctggcaactacttctatgttaggcaggaagtaacactagtagttaataaattgttggtaagggcagaagttgataagttaacctccaatgacttcctctaggattcattgtacccagtatggttggcaaacctagttttggtcccaaagcctaatatcacatggagaatgtgcatagacttcactgaccataccaaggcttgctcgaagactctttttccctacaatagatagaccaagtggtggatgccacttccagatatgaactattgagtttcatggatgcccactctggctacaatcagatcaagatgcatatcgcagatcaggagcacactagcttccaaatagataagggggtgtactactacaagtttatgcaatttggattgaaaaatgttggagccacctatcaattgttggttaacaagatgttcaaggactagcttgggagaaatatggaggtatatgtggattacatgctcatgaaatgcaagacttctatggagcacagtggtgaccttaaggaaacatttacggtcattcagaagtatggagtgaattcttggagaattgaagctaacacagagaagattaaagcattcatcgacatgccttctcccaagaagcataaagatgtgaagagcataactagaaggatcagatgccttaatcgattcatttcaaagtctgtatacaagtgcatcccattttttaatgtgttgcgtggaaacaggaaatttgagttgactgaggaatgcaaagaagctatccaaaaactaaaggagcacttgaccaaggctccaatctttttgaagactgtggaaggagaagtgttgtacctctatttggcagtgtttgatcatgctgtaagtgccacgttagtgtgagaagaaggaaaagtttagtgtctagtgtattaaataagtaaaagattgttgggtgcagaattcacgtatccaagggtacaaaagtcaacatttttcttattaatcgcctctagaaagctgagaccttactttcaagcccatgccatcaaggtactaaccaatcatcctctctgccaagtgcttccaaaactagagtcttctagtaggttattaaaatggactatggaacttagctaatttaatatccaatatcaagcctaggtgtcaatcaagggataggccctgactgattttatagtagagtgttttggaatcaacgacctcccagacgagccactcctagaactacgagtcaggaaggtctacattgatggagcatcaaatgagaagggagccatagtatgaattatactaatctctttgcaaggacatcagctccacaacaccctcctctttgaatttccaacctccaataataaagcaaaacatgaggccatgctacctagataacaattcgctaaggaagtaggatcataaatcattgaagtgtatagtgattcccaactcgtggtgtactaaatatctagggaatatcaaactaaatgtaagaagatggatgcctatataacacagtcctaggagccattgtaagggttcaaaagctacaacatacgccaagtcttgagggaccaaaactcattcgtacacatgccgaccaaacttgcaacagacccaaagatcgtgcaataaggagtagtgtctgtaggccatcagaaggctctgcttattgaaaaactaggggtaaatgttgtatttgatctctcaaattcttggataggtcccatctattagtttctaagtttaagggagcttccaactaacaaggttgccgtcaggaaaatttagaatcaagctccccgataggtgattctaggtggaaagctttactaaaaggggttatctgtaacatacttgaggtgcatatgtggaaccaaggtaagtgtaatcgtccatgacgttcacgaaggtttttatggagaccacatatctagatcaagcctcgaaaaaatgattcttcgtcaaggatatttttggccaacgatgaaaaagaattgtgtggagtatgttcaaaagtgagaacaatgtgagagatacacaaaggttctgcatgcaccacctactgagattactctcatgcacagcccttggcctttttcagtggggggaatagacctagtgggttcactaccaacaggaaaaggaggagcaaaatatgcagaagttgcaattgattacttcaccaaatgggtagaagccaagcccatgaacacgatcacctttaagaaggcttgtatctcgtcatcaaaaatattgtgtgtcatattgggcttccacacaagaatgtgtctaatggcaagaattagttggacagtgtacacttcacggatttctgtatccaacacgaaatcatcaaaagcttctcaactgtgccaagaccgcaatctaatggacaagtgaaggccatgaacaaaattctaaaacccacattaaagaagaaacttcaggcttgtaaagcccattggttggaggagcttccacgagtcatttaggcatacaaaaaaatggaaaaaaccttcaacatggcacacaccatactcgatgccttatggtcacaaagcggtcatcccagtagaaacaaccatcccctctcaaagacgagacacttatgattcaaccgggaatcacacactgctgcaagaatctctagatttgatcgaagagctcttgcaacagtcacaagtccaactaaaaatgtatcaaggcaatgttgctagacactttaatgcttaagtcaaaatttgaacgtttaagattagagacctcatcttagaaagagtgttccccactttgcaagaaccaagagtgggggccttaggacctagctgggaaggaccctacgagatcaatcatataatgaaaaatggaacataccaactaaagaggatgaatggatccgaaatcccatgtgcttggaatgcagagcacttacgtcgttattactaataagctgggggtgtttgaatttaactatatctttagttaaattataattctttataattttctcttcttgatgtaagcctatgggcataatgaaatgaaaatagaagaaatttacaaaaagaatgtgcatttttgtctctgaatacaaactatgttttaaacaagtgataaggaattttgagacgtcaaaaattctcaactcacatgggggtagtctacctagctatgtgccctacagtgcccacctatatttttaagtatgtttgtcttcaaattttgtagtctttttaaaattctgagaagggaaacattgcatgaatttcaatatgtttttagcctctttcctggtagaaaatatcgtttgaaatctattgcacttttagccattcgccttgcctgacctttaacatgttttcagcccctttcctcataggaaatatttcctaaaatctattacattcctagcgtactttctaaccaaacttttcatagtcttatgaaaagagtgggggtaaaaagatttacttagaatcccgtgcattttcagctgcttttgtaccacaattgggaaaagtatttattatccagcatgtaaggtttgttatttaaatttatgagaagaaaatactgcctggaccttgatgccttttcaatgatattcttagtacaaaacattgcatgaatcccattgcactttcaacctttttcttacaaatattaaatcacaaaccttgatgtgtgagcataatggtattaaatatttacgaaaagaataaagttatgcctaaaacagtgaagcctaaccttctgtgaaatagccactttactagtgcatgtaaatctagtaacctgctcaactagttaatttaaaaagaacaaaaaggagttaagcccgatgatcctttaatggtctaggagcaagactacaacccttttatgctacttaatgattaactggccaacatttatgcgctccatgataaggccttaagccatctaatgtgttgacgtctagagatgggactggctcccagaaagtttctaaagctcaattgattgcttaaagttagtgataaaacggatataaggtctaaaattctagccattagatcttaaaatcttaaacatcctaaaagcaacctatcaaatggctaataaactagtagaaaatagagatcaacatgacataaatgtaaaactaggaaaaaatttgtcttaatctattagacaaagcctcacggttatgtcctaaaggaattatctccgcaacaggaaaaagggggccaaaagcccccaaaatcaaatgaaataaatgaggaaaaagaaaagataaagtcaaggctggccaggtgggaccttagattctaaggaaagccctatgactttagtcaattgttcttctttggattcctcgtatgattcatcaatgttaatgccataagtgtcaacataagtgccaacctccatggctgccaccgtgtttgtgtactccagctcctcatcctaagaagcctcaaaattgtggagtctttctatgaaaacttatgaagtgtaaccacgaaggctatatataaagactgaaggtgaatcttgtttgcatgagctcttaccacagcctgtaatttcacgccggcctcaattgcatccttaataagcctaaaagaagtacaaccatacctaggcatggaccccaatatagttttagccttgaggccattggcatcttagaactgagcttctttcctcaaattcctctcaacatcagcgtgaagcttcttcaagtttctctcgtaggttacatttaactcttgcaagttcaatttatctttcttggtctaaatttctttcttcaaacctttacctctaactaggcacctataagcaaggcattggtagttgaaggcttggtattcaggccactgatctcacagtccttattctagataagtatattcttggacactatggaagcttcagcatcatctcttgcctttataagggaccttattttagcctcaagcttctcataatcctcattgtaggattacttaatcttagacatgtgctcatagtacattcatttttatttagtattggcatccttgaataccttgttttagatttctttagccctcctcttaatgaccctaatttttgcctcaacttgggctttgatatccttaatttttctccagcctaggccttcgtgttttcaactttagaggacaagctttggttctttgtgtggacttgtttaagctccacgacaacaccaacctcatgggaagccctctccgcaatcatttccatctagcatagcaaagcgtgataagaaaacatgctgaaaaacaacaaggtaacaatcaaaaatttgggctagtacacttacctcaactgcctgctgtttggctacaaaagtcaaggcaacaggataaaagctactacaagcagcccacttcccaactgatgagtcacacaaactattcgctatttgatcgatgagtttagaggaaaatggtcccaagtcactcccgaccctcagtaccaactatttgatgagctcctcgtagtctatcaccagtttagaaccctttgagcaagccctgttaggaattttagcctatttttgtgacttgatgaggaggtcctcctctgggccacttccacttgtttctctcagtgtccctttaagtaacggtcagcctcttgcacactttccaagatgtctgcacttatggcattaggcttcaaggaaaaactgatactttaggccaaaatgttgggaagggaagtataaagggttggctttttcacttgggtgtttggttgttggttgtttggttgtttttgttgttgttgagtttgaaaaaattctatttggagttgtagtggtttttggttttgttggtttggttgttgtgcatctggttgattttgttgttgttgttggattggttgttgttgctgttgtttcgattggtttttgggaaaaggtcttttcttgcctcaagtctccatctccttcggaagagcgtttccttgcctccaccttggccttctttgttttccttttgggattagagatgatagagcgtttggaggtagtggctgccttgtcatggaacacatagcctaccccattttctttagataggatagtggcccccgtgcaactttggtcaagtgagggagcggttttcctagaaggagcatgcattgggttaagctcagactattacagaggcgaaaccccaaggaccactccactactagaaagcgcccgactttgggatgcctccgcaggagccttctctacccgactaaagtttgtttggacagtggagtcccctgggtgccgaaagattaatggggactaggcagccttggcttacgaactcttttcaccctgctcttggatttacgtttcctttgtttcctacaacctaagatacggcacggttgatggagcctactattgattgcaacattttaaactctagtgtttctgcaaaatcaagaaaccataacacagttatgaaacaaaaattaagcagtgcatgccaacaaacattagcagacaattgatgaagactaagacttgagcgtgagtgcaaccatcaagtgaactactgtctggctttccatgagcaaacaaagatatgttttatcaattcataaagctactatatcctttgaagtttgggaaggacatggataggaagggatctaccatgaccatatttggaggcgatacatgattactgtaacccctaaggacttcacctattctatgaaggctagggacacggaacaaacgaaagagccttttacctcttctttagatgctagtcttgggtgcactctcatctagatatgctgcaatgaacatctctgtaagatcttcttcttcagttaggggctttggatgatggagtgcgtagtcctccatcagatgcttatcttcttgtaaggccccatttatgaactctacgacctcaaaggtgattttttctttagcctccatgggaatatttccaatgccctcattgttgatattgttaacactttaaaacctagctataaacctatactcacagatcagctttgtggtaaccaactgttgggttttgtgccctaaataaaacccattac

SEQ ID NO: 299378 - DNA, 4762 bp, Cannabis indica
tttcaaaaattaaaaaaaataatgttacctaattaaaaaaattaattatttatgaattgcaagtaactctaacataatataattatatgtatattcataaatatattttgctgaatactaacacttgactggtttttctttttatgttactgaaaatactatacttgactagttattgtgtacttttttctcttgcaagaaatgtgcccaaagaaaaacatatattatgctgtcgacatgatgacgttaatccttagctcaaaattatttatttattttaaataataaccttagctcaaagttaactattttatatgatttcttttgtctcacaagatagcttgagtaaaagtcaagagtattcacaagcttcaaagcacagttgcatttaggctgctgaatcgagtaattgttttatttgtgtcataaattgatgatgtttattgatttcaatgtttgtccacttctatactgagaagttagtggacaaaatttgtacacaagtgacactagatagtctgacaaccaaaaaaaaaaaaaacaaaataggcagtggaaagaagctaaatatcatcatataggagaaatcattacagattcagtgaactataacatttaagtttagtaaccactaactcactcatgaatttatgtggaagaacttgatgagttcagaaccccatttgcaggtttcttcttagccatatcagattgatgatcattatcagcagtagtaggacttgtggtgcctactttgaatttcttatagatatcaccttggtaaaattttcttgttctaataaccaaaaaaaggacaccatgcttccaaaagagcagctgcactgattatgaaaaaagccattctataacactgaacaccatcacaagtcaaatctttcccatcttccctttcagacctttggcctcaattgcttcaaagcttctttatcatacaatcgaccagctaccaacacgtttaggatataagccccaactgggcttgccaaaccacctaaattgtacaaagtagcatagtatttgagcccaaaaatctctgatattattgcaaatatcaaaggccattgagcaccaaaacaaaatccaatgatcacagaagcgaaatataatgaattagggactgccaaggctatcaagatatggccaacacaagcaaaaagaagaaccaaagtgagcattaagggacgagggaacttgtacttggttaaaaatacttcagaagcaaaaccagaagcaactcttccaagatagttccaaatgcttacgagtgagataaaagttgtggtgctgtgagttggatatcccatcgattttccgatctgtcccaagttgtcgatcagtgtcaaagtcccaccaacaccacagattgtagcaataaacaagatcaacatgtctacactgaaaagagcttgtaaaatggtgtagtcctcacctctctccggcgggttgaaaatgtttttacaccaacttgagccttcttcttgggaagcttcttgactaacaccttcattactaggctgcgcatccactaattgaactgaaccttgattattgtgaggtatgaccacatcttgcagaggcagagtagttttggctttccaaatacggtactcttctcttataacaatggccagaggtaaaaaaaccaagagaagaacaataattggagatgttcccacgtactgaactctagtaaacttcagcttgttctgtataataatcaaaaccatgagaaacccagcaaggccaagagaaacataaagaagattatagaagactctgatctcattcggttgtcgaggcatcttaattatccgaatgattctaagaaaaacgaagttaacagcagcaggaagccaagctatgagtaagataagagctttagtattatcaccatacaaagcatggtagagttgtgttatgatagctccactaagcccaacaaagcccttcaacaaccccagaacacttcctctgttttcggggaaattgttgacagaagggaccaaagctcctgtatttgcaaaagtctgagagttagctccaatacaaatgtagagacacatgtgccacacttggggtttcggtattctggacgtgacggcgagccaaatcatgaagtagccgaagaagttcatgactactccgacggagaggaccacacttggtggcatgacctcgttgagtagccctgaaactacaccaacgttggcacctaagtccttgaagaagcttataagattgagtgttgtttggtcgtagcctagtgagttttttatgtccgaggaataaagtccgaacatgtaggtggcacctgcgactgacatgaccagagttgaagccaagaacatgaaccatcggccgaacagtacttgggaacccaagctacgaagctgatcagtactcctccagccatggctaactccataaccacccgatgcctccaccattttagtaagcttcagctaagaaataagttagttatatgcgtgtgtgtgtgtgtgtgaagcctatatatagattttaaggaaaagtttcatagtgacttgttagttgactagagaggtttggatctataggaaggaatgaagggtgagaatactacaaaatagagaataatagaaaaaaaaaaatgaagaaagaaagaaagtgggctttatcaataataattcatgatgttatcattattatttttgcttttaaaactaaataattcataattttattaaaatattatattatatactttttttttatttttacgggttaagttgtttctataattattataattattaactgagttgttagagttgcgatttaagttactttgttgtcgttagtgctatgtaaaaataaaaaaactctattttattattattatttttgctgaaaataatttttttttcaactaaataattcattatttgataaggcaattaatacaggctttgtcgtccatgaaatttttgtggtgtaactccatgaaaacgatagaacatttttagttttaatttgttttgtttttattttttgatgcaatgattaaataagaaatattggattgctttatatatatgtacatatatattgatctttggtcattgagaaatttggttttatttcattgttttgacacagggattcagtttagaaagggataaggacatagggattccttttgggagttattttttactgtaacgttattcttgttttaaaactgtttaacgagtatgggtccaactttaaaacatgatagaattgatagccaatacaactattactattgcaatatttttggtcattttaacttggatgatattactttgttccctaaaatgaaaaagggaaaagattactttgttgccgtatatatatgttgccttgccgcatttgttgaaatatctcaacttagaataataaaggatacattgtatatgagggtatgtaatagggaatgtgaggaactcattcacaagttttcctcataataatgtatagaacaataattatagaatatatatggacaaagaatgccttaggagggtgtgttattttatgtttatccgtataaagatatatcagaataagacatattattgtccatcgccaataagttaacgttagttaacatggaaaaaaaacgacaaacaaatcaaaaacaaaccatttcaccgccaacatatatactcccttaatggtcgaagattcttagcctaaatctgtaatggaatgcggatgggaatttcttttggaagaaaaatattcataaataaataaaaatggttagagctcacggtcattacaaaataaatttcagtgatggaaataacgaaatacaactaaatttctagtgggaaaatgcctattttactacattatggactacaaaattataatttttgctaatactagtgaaaatacaactattaaacaaggaagaggatctattacaaaatgagacattgataactactcttgaatcactctccacaataataaacttggaatcatagtccttagctacatcttaagccgagcaacaggtcgccgcttccccacacaaagtatcaaaaaaatctaaccaagttgttcgaacccaaaccaccttgccgagatgactccttgctgccactgcagaacacatgctatctaatcccactttaacatcacaattaagctaaagccaattatgaggaggggcatgccagacatccaccaaactcagagaaggacgcaggaagatagaagcatgatgatttgcaaatgagatacgaatagagtcaataaacttcttcacatcaactggtctattattgtgtaccttgtcattgcggatccgccagatggtgtcaacaacaatcgatgcataaagaaaaatattctctacagtaatgcctttattttaggtcatagataaattttacccagtcccacaacctaatgccagtaccacaaacaggaaaaataccccaagaagaaaactgccacaaatgaaaagccacattgccggatagaaatagctgttccaaagattcctttttagatccacacaaggaacatctggtatcctcaatatgaaatcgtcttatgatcacagaacgaattgggaatgctttggacaggatacaccaccacaaaactttatgtcactccaagattttactattccaaagcttattccagagcgaaggagctacctcatagtgaggagccctatccaaagcttgggcaagatagg

SEQ ID NO: 299379 - DNA, 3678 bp, Cannabis indica
accatttctttgagaatctgtcgaatttctcgaagatttatttctctcaatctggtgtacttaacatttaacctatttggacgctttagtgcgcttgtccaggagaatgaaacagaatgttacaacttgatataatgctgtgtgtagtacatatgcttttcatctaatggtttgtataaatttcacttgaataaaagttttgagcacttatcacccacctcaccaatttattcggtgccttgatcatttttttttttcctattttaagaatatgtttggaagtaacatcgtaagtatactcttaacttttttcgttaagtattaagtaaatatgaaatttttgtttaatgtttgacaatcgatctagtatttactttgtataataactagttaacaattaaaaaaataaataaataactagttatccaaaaatagtgatattctccaatcatagtgtaattatacccaataagaattggaaaatggaaagtgtaattgaggaacactctaaacctaattgcttaatgatcaacgcaaaaatagatgaccgaataagctatttttgtataagcttaaacaagtacattttctaaatcttttttggttaaacaaaataacaaaagttctagttataaacataaatgacaagaatcatatcaattgtataaggttgtatttcctaatacataatgttattcacaagaatgtactgtactatgctattatttacttaataaattgtttatgtattaggtaggtatgtttctaattttctctgcttctgatggcttcaacgaattgtaccagtacagttccaatgatgtaccatgtaatcgaagttaaaaaaactggtaaccaagggctatttacaatctgtaatgctaaagaaccaccaggatgctcttccaacctccccactaccccttctccatgcatttgaactatggatgcggcgagcacccctattcccaatggtacaaaaattttaccgggttcctttgcttgttcttggaagttattcgatctttatcactggtctgcttccattcttttgcaggtggagtttttgggacaattcttgggaacaaattctcttgggatgaggctgcaggaagggcatgagttgatggactccagtattcatcgtcataaatgtagttctttgatggggtcccctgagtttgtctcgagccgtccctttcttttttcttcttagcagcaactgcatctctgagcttggcaatgtcaggttcagtggatttctgggtagttgctggcaagtatagttgaggtttcattgttgagccacctgccctaggtgtttgccaatataaccagttggagattgatctgattgcttgcattgtggacattcttgctgctctttgtacaagtgtctcctaaattaagattaatttttaagaaagatcaggaaatcagtaatcgatgtttgtgttgagacaatacagagaaaaataaataccgagttatgaaaagaaatatactatttttacatgtggaacatacctcagagccctgtgcagaagatttctccattacctcttggtatctggtctggaatttcttcacatctacgaatatgtttgagacacgcatacctgcagcattccccatacctattcttacattgcctcgtggctgcttggacatcagaaattccagagctgctagatcggacttctccacaatcctaaggttcaatcagccagtaagagagaaattgtttagatgtctagaaatggccatttccttctctttgtccaaatccttcccttaaatgatacatgagatgccacgaaataaaaattaattgctttcatctagcctagaaaattgaaccatgaattttattccattgatctattattaccaacctagaatgtgagatgccactctataatccattcccatgtaatgaacttgtttattgtgtcatgctaagaaacagaggaaagaaacttacgaaatacaatctactggacaagctccaatggcttcctggattttgtgttctggatcagcccactgtgcaacaactctagctcttccataaactgtttcaattgcaaaagtcttttcagcaaacaatgcacattttaagcaaccaacgcacttgacttcgtcaacaaacactgctcgttcttcactttctgatccacaccatactgagtaaatgggtttcccggtgtaacctttaagttgtgcatgttttgcatactcctgaagcaatatcatccattagtcaaaatgaagctctatagagaaactacataaacttcatacatctgatttcgacactactgtaacaacctagaattgttatttcgttcgtttataatatggggtaaagcaatacttagaatagtattagaaactcaccccatgttgggtcttcctatagtaatctacatctgacaacatcactttgtttttggtcttcaaataactaaattttagcagattataaatttgggactcatcaagaaacaatacaacacatggattttcatataaatataaatatatttatttatctgtatacacaaatgtatttataaatataaagcgaaaataacacccttaattaatcacaaattcgataaatccctgatttccccagactttaaatactcgaattggacttatttgcagaataaatactcactcattacagaaactaataaatacaataatcttcaccaacagtactaaccttatcgtaagccaaacgagaagaagggtcagaaagaactgcataggcttcgttgagtataatagccatgtcatggccaggcggtccggcgatatccgggtgacaccgcttctggagagaccgataagcattctttatctgagactgatctgaggagctatggactcccaaaagatcgtagagatcgaattccgtgacagaggtagaagacgatgaagcagtggacctggccctgcatgggattacagtagacttgcggattcgatcgaatcttcctctgtcaaaccctaataagagtttcgaatttggatcaactgaagctgtagaaatggtaggtgtggataaaggaagaagccatgcatggagcattgttctttcttttattattattgttatttattttattttattttagttctgggctcatatttttttgggagtggatgacatataaagtgagaaaaataaaaaataaaaatgcaggcatgatatttttgttaatggaaaatgacatttagatattttaaaggaagagaaatacagaaaataaaaacactctttcttcttcgtgtagaattctttacttgtatagaatcaccaaaaataattttatttgtgcagaaattgtttgtgtcattcaagattcaacacattcaaaaatattcctaagctatgaataatattctgtcagttaatcttgagacttttcataattggttcagcatgcattttttcggcatgctttttgatgaataaaaaaaagaattatttaaagagaaattataataaatgaagttaaatcatagcactatataactaaatactagataaatgttacgtgtcaattcacgtgtgttaattttattttaaattttaattttttttaatatttataattttaaaattaataatattcaatgtagtgataatcattgaaatttgaa

SEQ ID NO: 299380 - DNA, 2320 bp, Cannabis indica
attttattttttttttttttgaacataaagtcttcattcccacaaatcaatacaaaggattaggcaagtcttgcaaaaccgcaagtctcacacaagggggtacaaccccaatccacatagctctcactttgttaatcaaagcgtaattggctaactcatgtgcaaccacattggcctcacgaaatacaaaagagataccaacaacagaaacatgcaacattaactcacgaatacaacttacaatgccatcactgtcacgacagccgtcctccttagcatggatcaaatggacagcagcttgacaatccgattcaacacgaaagcaatgtaatccccgttgtatcccaacttgcaaaccatttcttatcgccagcaactccgcatgtaaaggcgtatactccctcggcaatgcagcagccgaagcaaaggtacacagccccgctgcgtctcgaatggcacaactaaagcttgagtatccctcccccttcttcacacctgcgtccacattaattttcagttcatccggcggaggaggctgccaccgtgcacccagtcgcacagcccgattactctcaccttgtctcggctccctcacctcttgcagataaccagcacacccgtccacaatatcagcaggtcgtggcaccctcccaccatgttttgtgctatttctaatgtaccacaattgccaacacaaaaccagaaaaaactcaaacatattcggatttaatccttttgcctttcgcatcagaaacgagatgatatcctccttcccaacccgttggatagcatctttaaagccactaattttccaaacccctttattagcccgacacccccaaatagcatgaaacacagtctctcggacccctttcgaacatcgctgacaaaccggatcaattgcaaccttccataggccaaagctgaattcgtaggcagccacttatttgctagcttccacacgaaatgcttgattttcgagggaagcttcaaccgccataacttagtccaccaatcattcataagcttctcatccgaagtggcaacatccttccgcatctcaagagccatacgatacccactcttcaccgaatactccccattgttagtgtaatgccacataattttatcctcaacatcatctttaacatgaggcaaactaacaattagattagcatcctcatcattgaaggtagcccggataaagtcctcatcccactcaccactaggaagtgtcaaatccactacaacaattgcgccggaagctccggtttatcataaattttaaaacttcggggcctaggcagccaaggatcttccactatacgcactcgctgcccattcccaatcctccaccgggttcctttctccacaatctccttccccaaaccaagcttcgccatacaaacgacgcatgagacccacatttcgcttccaaaacccctttattaggaaaataactcgccttcaacaccctactacatagcgaagacggctgtcgaagacatcgccaaatttgcttagccaaaagtgcttgattaaacaactccaaatctctaaagcccaaaccaccttcctctttcggcttacacaagtgtttccatttgcaccaatgagtctttcattgtttttcagttgaaccccaccaaaatctagcagccattttatggatactattaatagtacttttcggaagacgataacaactcatggtataggtaggaatggcttgaacaatggccttaatcaacacctcctttccccccattgaaaacatattggctttccatccacgcaatttattccacactctattcttgataacatcaaataattgccttttgttcctcccaacaaaagaaggaaggccaaggtattttccatgattatccacaattttcacaccaagaaattcagccatctccgatttcatctccaaaggcacaagcttcccaaaacatacctcagatttattgaaattaaccacttaacccgatgccaccgaatatctctccaacaaaccactaaaccgttgacaatccaccatattggcatcaaagaacaccatactatcatccgcaaagaaaaggtgcgacaccgtcaatccccttctcccaaaccgaaccccttgtaagcctcccattccctccgcctgctgtatcaaacatgagaaagcttccgcacaaaaaagaaacaagaaaggagacaaatgatcaccttgtctgatacccctttgtgggtataccttccctttagtttccccatttatgagaaaagaaaaggacaccgatgtaacaccctaactaatttaggcgtatta

SEQ ID NO: 299381 - DNA, 6158 bp, Cannabis indica
gtacacgatcatgaaaaaaaaattagttaaaaaactcttttgtatatcgaaatagataggaaatttactcaaccatctctttaagggatgaactgcaaacttacttaataatatatgtatttgaaaaatacattaataaaattactacaaggtactctactgttattaataatttgcaaatagtattgtctaatattgtagttatttaagattatctttaaattttttgaaaattttaaataatttataatactaaaataagattcaattcaaacaattacttatcacgtgtataataaaaaaattttaccttattatttcggtattataaattatttgaaattttctaaaaatttatagataatcctaaacaactacaatatctacaaccataaaaaataattagactaaaaaacttcttaaatgctagaactaatagaagatgtaccgaaattttcatttaaaagaataacgtcggttttttaaaactctttagtgtcgtcctgaacagtgtcggtaacgaatttcgccaaaatcgacactgaaagagcttaaaaaccgcctttaaaagaagtttttgtagtagtgaacctacaatttattttaagagtactatgtgtacacatttctttaatataattataacaaaatcaaaataacccatcaaaattttaactacaaagacttaaactttttgaatattttcaactaattaattttttctttctttttgaccataagcttataaaaaacattatttaaaataaaattaaaaaatattgaaaccccacatacaacagaaccctccataagggggcctgagagacaggtctgcaaggacaagattttctgtaccctttcaaaagagtctcaaaatctctatcatattattcatatttttcactcaaatacatacacacatatacatatatacatacacacacatataattcaattcatatatagtactaatcaaacttagtttacaaaaaaaaaaaaaaaacaccctcttatgaaagatcaaaactttattatatcaaagatggatttattatacatctgaagaaaaagactgcaccttttttctttctctttctctctctttgacaagaaagctttgatctttaatataatcttcttttaatttttgttgggtggtgtctctatctttggagctctcataaagttttcttttttattttttttaaggtaattaataataatcaaaactaacctctttttttccaagtcctctgttttagtattttgctcatcactaacttcatcaaagttttgttctttcctctctttcagatgatgagaatatagtttgaagatcatcatagtactcaattatcatcatcatcatcatcatcatcttcaatcacatatacatatatatatatatatatatatatatttgcatggctagtcatagagttgtagagacaacaacaggtttatcagattcagggccatatggagtttttcatcataacatgaatattaatactccttcaactagtttcatgtaagtaacaaaattcaacttcttttttgttgtaaatatatataatcaaaatttgatctttacttataattttgtgtttatttttccagtaatcaagatgggtcatcagcttttgattttggtgagcttgaacaagcaattgctcttcaaggagttaaataagtggtggaaatgatcaccatcatcatcatcatgaagttaataataataataataataataataaaacaagtatggtttgctttgttttacttattaattctctttcttacgtttaagatttgaaaatgtcactataaagttaccattttccaatagagtaatgatttaagagagtatagagtttgaataggcatgagtttacaaacatagaaagctaacatctttagcatgattttcattttagtttactgacttcataactgttgggattaggttcccttttacttctttttttaacctttttaacaatattttcattatatcatttttcaaagagagattttcttctaaaaagaagtattatttgcttttgtgattctttcttttacagctttattcacaacaagcagtagtaacactaacaacaacaacaacaacaacagacctgcagctactctggaaatgttcccttcatggccaatgagatatcaccaaaccccaagagttagtattaaaaaagtttcatactttgaccataaaaaaaaccaaaactttatcagctttcttctctcaaaaattgatgatttcattacccttttggaatagtcttaatgggttatgatctttttcttgttttgatacacaaaacacaaaaaagttccatactttatcatttcttcttcttcttctttaatgtttgaccataaaaaagatccaaactttatcagcttttttctatccttttggaatagttttaatcttttttttttggctctttctttgattaatatttcaggcaagttcaaaatctggtggtggtggtgatgatagtacagataattcaggctcagccaaagctgatcaaacccaattggaatctgaatctcctcttagtaacaacaacattaataatatcattaatcataatcaaaaaaaccaacctagttttgattatgatcaccaacaacaacaacaacaacaactccaagaaaataactcatcaaaacttcagtcatcaaattccaaacacacacaagaaaaggtaataataacaataataataatagtgataataatctctcttctttttaaggctaaatccccataacttaggaaaaagttggtatctttattattaaaaaaaaaaagaaaaattatatctttgaaattttttttaagaacacagatcccaacaactctcagaaaatcaaatgaaagacagagttttcctgatttctgaacgattttctgataaaaatgtctgacaaaaagtagtaaaaaattgtactcataataagaaaaggtaaattgagaatcttcacagtatagttttttgcttacatactactgtttattattattattattattaaaatttataataattaataatgacccactttactcaatccccataacttcaccaattccctctttgttttttgtatatatatatacacacatattcatatatatatatacacacacagttcaaagtattgtctttctctcttctattctctttctcttacaaaaaaaaaaaacaatgacagaaaatgatgtgttttgttatccatacaatgttgttcttgatgataataataataatgataatgatgttgatgattatcatgatttttacaatcaaaatccagaaaatattcttccaaggaatattattcaagtgagaattttccaagttccaatcttttcattctttttcttatttttgttttttttcttctttaatttctcaaaagttcaaaattttaattaaaaatcttgtttttatttttctttatttacaagtgtaactacattttcaaacacttgtctcaagaacaacaagcactatacttaaaattcattattttcatataaaaatcctattttttttttaaatggggtttctcaaaatcaactaaatatttttaaatataaatatttatatatatatatacatttttaattaatatttgaaaaataatgttgcagagaaagggagctggttcaacttcagagaagccacttgatgccaaggtttcatttttattattttttaaattaatataaatatttatttattccaccatttttttcataacttatttatttatttatattaaaaatttctgaaattttatttattattttttttttggggggcttcagactttgagacgcttagctcaaaatagagaggctgcaaggaaaagccgtctgagaaaaaaggtaactcatttttcactcaatccaaaaaaaaaattaaaatttaaaaaaatatattttttaataattatataataaaaagatattataatttttatgaatttttttcaggcttatgtacaacaattagagtcaagtagaattaagcttactcaacttgaacaagatcttcaaagagctcgagcacaggttttaaattttaatttaatttaaattaaattattattattattattattacctttttaaaataaaaaaaaaattatattaatttctaaatttattttgtatttaattttagggattatttttgggtgcttgcggtggtgcttccggcaatatcagtccaggtgtgtaattacgaaaatacccttacttatacattttgttttaaactcatgatgggtattttggtaattgtgtaacattaatgtgtttttggtagaggaaattagttcagctgctacaaatattatttattatatatctaaactctatttttatttttatttacttatatataggttgactaaaaatattattaatttcattttgtcaaaaaataaaaatattaactttgatatctatatagattccgtacttagaataaatcaacttataaattccaaattattattattattttttttatgttgttatccaaattagtctttgttttatataaatatatttatttataggtattaaaatataattacatttcgtaaatttaacggttgatgatcgtgaatttttttttatgtgtgtagtcaaattttgaatttttttaaaaaaataaataaatgggtttggcagacatttcagaattttgaccaaacacatttacaaaaatattttgatatatatatttatttaatttatatataaaacgacaaaattttggtgtccttttgcaaacgtgaaaagagccatgttttatgggttcaaaattttatgctttcattttttattttcattttaataatatgaaataaataatcctaaaaatatttgttcaaaggttataaaattcaaatgtctatattaatttaattttcattttaatgtgtaacaattttttttattacaatgtatatagtactagctattatgaaatatatatttatatattaatttatttaaattaaattaatttaggtgctgcaatatttgatatggagtatggaaggtggctagaagatgaccaacgtcatatgactgagttaagaacaagccttcaggcacatttgcctgaaggcgatcttcgtatgatcattgacggttacatctcacattatgatgagatatttcggttgaaagccgtggcagccaagtctgatgtcttccacctcatcactggaatgtggaccaccccggccgagcgctgcttcctttggatgggcgggtttagaccctcagacctcatcaaggtataaaagtaacttttagtatcattatttctaccctaatttaaccaagggcatatttgtaattttaccatttaaatgtaccaaatttattatttaatcatgattattaattaatcatacagatgttgatagcacaattagacccgttaactgatcaacagctaatggggatatacagtctccaacaatcatcacaacaggccgaggaagctctgtcgcaaggactggaacaattgcaacagtccctcgttgataccattgccgggagtcccgtaatcgtcgatggtatgcaacaaatggctgttgccctaggcaaactttccaacctagaaggctttgttcgtcaggtacatataaatataattttatagcaattttttgtttgtttttcatgcattatgtgaaatgacacttttgcccctatgaatatttatatgctatgatgttaagtacttagttaagaaataaagttcaggtggacacgtagatataatataaaggagtcaaaatgttataaatattgttctaaaacaaaactattaattaattaataatttagctacatataaaacatataattaatatttattaatctatattatgtagttgacaaaatttaaatctttacttgtcgtatccgctatataatggttgataaggacttattttatatatgtatttaatatattattgccactgattattagaaaaatatacatgaaaatgtttactgtgattacaaaaagtaattactaaaaacaatattttaatcgtaatataaattttttgtaattaaatgtaatttt

SEQ ID NO: 299382 - DNA, 3319 bp, Cannabis indica
aaaaattaattaaaaaattgttaataaacacagcctaaataaataagtgattattttcaatataaaagttgaaatcacgcgccaccgccgccatatcccactgctaccgtaaccaccgtgggaagaagcttaaagaaggagagatggtagtctaatgatcatatgtcgctcagatagagaaaacctcccgaacacgcttttcttttctcgtctcctcttcttattcttcccgcatcaactctgagctgagaactcatcgggcactattgcaggttcccttcttttttattctattattttttatgtatgcaattcgtaattcgctgacttcttttagattcttgtgtatatgttatgtgggttttttcgtagttaattgataaaatgtcttagattcttaaacttggactttgatttgattacaattgagattttgacctgaaaccagatgagatttggaacttaatttgggagaattcgagaattgatgcccttgttgtttatctatgcttaagtttttggtcaaatgcattcttggaggtttatattaattgtgtacaactgattattagaaacaaagattgactttggttgtcatgactcattgagtcattgtctattgttgttagaaaccgaatattgacttgagggatctagctcattagtaggatcagcgaagctttgttgtcaaaaatccattctcatcatttttttttgaaatatatttagattcttaattcagattgacattatttacgtatttattttaaaaaaaagttcagtgtgccaatcgcgaatcaattagtcctaaattggagccctaattttctgaaatcgcacgaatgagacggcccttcatctttctgctgctgctgaagatcgtttattcttcgtgtacgggatgttttgccaatgaggaaacctctcttacctattcaaatcctaccaccttcgaacactatcgctcgcttttgcccgttatcaagtaagtagcagaaccgattcaattttttgctttaaatttttaaatttgttatttctgtatatttattttgattaatgcatttgcggtgttttgatcttcagcgagaaagatgtagcagtggcactagttatcgatgtcgatggagaaatgtatatgtgggactttaattcgaggaaagttgtatggtcatggtcctcgggatttcctatctatgctgcttatcagaattttaatgaaacgaatgcatccgagcctgtaattgagtacgctgatattgatgatgattggcagctatatttctatcgaagaaacccgttcacgaaagtggtacaccatttattttttttcatgaaaatatatgtttagttaggtttacttgtatttgtgtgtgtttggttgctgcccaagttgtgtttttcttctcagacaatcgagtctgcactgcattggtattttcatttctaaatcttatggttgcattatgagatttatgacattttgtttgcttcagaaaccgtcaaaaactgtggaagactatattagaagtactccacatgtctcaaaagatggaggagtaacagtaggatcaaggagaagcaccgtttatcttgttgatgctaaatctggaaagttaattcggacgtataatttggcagatactccgtcagtattgagttttcagaatggggtggaaaatcaagttgtgttgacacaggatgcgaaagagttcatatcatctggggatgaagattctgaaacagttgaacaactcctttacatcacaagaacagactatgcattgcagcaccattctcctgtcactggaaaagttctgtggaatgtggcattttcagattttgatgctacttttaagtttcctaattcagggactgagttcggtgctaagtataaaggcgaattgcctcatgagattaagcctgtcatcctgcggattcgtgatcatagttggaagaagtctctttccttatatgacaaacgattttatggatttcctggtggtggacctctccctttgcctaatcttgattcagaacacagtcttgtcccggtacctttaggccaaatttcagtatcttccaaaagtactacaagtggacaattacttgcgctgccttctcctaacaatgaaaataatgggataaatgacagtggagttactgaaatgatcttcatgacccttacagctggaattgttgcaaggtttcctttacaatattttattccatttctgcctacacaaggttatggaaaatcgttattttattttgcctttttatttgccattggttttatctgttacggttatgtcaagtttaggaagcagaatgaactgaataagaagtttgaagaatttaaaacgcaagtccctgttcctaaaaagaagaaaactcgaagattgggaaataaaaagggtagtgacaataatgagaaaagcccacagtacaccaatgatattgatgactataaggctggacatgctgatgatgaaggaagtaaaaataacttcctgttgacatttactgatgccagcgatcgtattgatggacgtagaattgggaagttagttgtttccagtaaagaaattgctaagggtagtaatgggactgttgttctcgagggaatctatgacagtcgtcctgtagctgttaaacggcttgtgcagactcatcatgatgtggctttgaaggagattcagaatctaattgcttctgatcaacacccaaatgttgttcgttggtatggagtcgagtatgatcaagactttgtatatctttctctggagcgttgtatgtgcagcttaaatgacttgatttatatttgctccaagactttccaaagtcaagttattgccaatgatcaggatttagagcttgtagatgagtatactcttaacctatacagcattcagaaaaagaacaaggatgttgaattgtggaaggccaatggattcccttctcttcagttgttgaaattgctgaggtatctcttttcctatttgcaaatttactattattttgtgttttagagttattacgcttttgagtttctaatttaacatcattgaagaaggagagtagctcgaatggtcaagtatgtatgtggtttgcttccacaatatttgagatgtgagttcctctaggtacttaggtagcagttgttatagtttgtttttttattgggtagatggcggcaaaacccccaatactttcgttttggtttcattaaacccccacaacccaaatttctgcgggtaaacctccaaaaccacgaaactgttagcaatttaccatttctgtccaaatttagctgtta

SEQ ID NO: 299383 - DNA, 3244 bp, Cannabis indica
tatttttgataatataaattattcaaattgcaaactatccaaatgtatgctataactataatgtacgttgtcatttaaaaaattaaattattatttcttcacttaccgaaaatagaaaacgttttatgattatatgcaacataggcacaaattaagcttcttgtaaccttatctttagtttagcatattattagttgtgcaattcaatatcaactctcatctattttagtttaaattaaaataagtatgagttgaattgcaaaacaagatagggtgtgtaaaaaatagcaaagtgatagagggatctagggaatggtagagctagaactagaggcagaggcagagagtgtgtcttgtaaactttggcccttagtttcatatggaaagagcataacagagagcgcagagataagtaataccagcaaaaacagaactacggcagccgtttggtggcaacccgccacaagtcccactgccaccataggacacactattcctcctattcgccccattgcgctagccactccgctcccagttgccctcattggagttggatacaactacataacataacagatatcataatgaataataatgatttgttataaacaaggaaagaaaggaagaactgaacaatgatgatgatggaggtacctctggagcgtatatacaagctactgtgaaggtccctagagtgcacattcgagctccaaataacaacccggttgttaataaattagcagagttgaagttgaagttgaatgccattggtaagaggaaaacactagccatgaagaacatgataatcattgacacctttcgtccaattctgtcaacaatgatggctgacaaaacaatccctggaacttcagctaagcttgtgatgaatacatcaacatacaggctagaagaagaaccgtcaccaccactaccactttcactttctgaactcgaaatcgagaccgagtggtgacatttgatttggccagcacttagctctgaagtcagcaatataataccatagtaggaaaatgaattcccaaagtacaagacccagagcaggattgtggttctaatatatttttgggagaaaaggagagacaaggacgatggcggttgtggtggttgattatttttgagtaatggggttgtgttggaatttgcataatcaactttgctttcaattccatcttctacttctgcttcttcattcccgtggactatgtgttgttgtaagtcggtaatcaaggttccaggagggagttttgcttggttgagcgaagctatattctccattatatgttgtgcatcagcaagtctgtgttttgcacacaaatatcttggagactctggaattagtgggtagaacagaactaatccgaatgatggtaaggaagatagagcaagaagccatctccaattcagtctcggcatcacaatctgtaacataacaataataagatcaatttgattgattggtcgttaattatagtaatgaaaaagaagactttctcattgtgatgattcagtcttagagagagaaagtgaatgaattgaatgatttcagtggagcaaatgatacaagagtgttttgtatagagtacacaagctgtaattcttagctgttaacagtagtaacaaaccaattaacagaataacagtaaagacttgtaactattaactgacaacctaacactctgctcaactaactaactaacacttggccttaacactcatcaatctctattaagaatatttcgtttggccattgataaagcaagctcttttcacaagcttattactttttctacttaaaaggattctaaattctaagaattatggtgttgtaatgaaaaagatataataatctcatcattttagtttgattggttaatgatagtaattaaaaagaagactatctcatcaatctctattaagaatacttcgtttggtcattgataaagcaagctcttttcacaagctcattactttctcaacttctaaaaactccaaattctaagaattatacagtcgttcatttgaattacaaatgataaatctgaacagaaacttcaaaataataagcagtagcacaatttgattggctaattagtaataaacagagagaaaataagactatttcatcaatctcaatcacttttctaagaaattaatccattctaagaatatttctcttggccattgctaaaagaaagctcttttcacaaacttaccactttctctacttctaaatactccaaaaaattctaatcactgagaattaaaacgataaaatcttatagaattctaatatttcttacccaagccagcgcagcctcaaaaatggtaccaaaagtccaaaaagttgagaagacaaccatccatttccctcgatccgaaacaggaacaaactccaaaaaccaacacgagaacacaggagcaccgcccaagccagcgccaacgagagtacgaagaatcaacaaaaccgtgtaattaggagaaaaagagcttaaaaatgaagaaagagtaataagaatcgaaatgcctaaaaacgaaaccctccttccgaattggtctgaaacaagaccccagaaagatgctccgacaagcattccggcgaatacgacggttgataatagagtctgttgagatgaggaaagtaaccattgagattgaagagctggacctatgaatgagaggagcattaattctgaggcgtcggcgaagtagcctagacctgcgtaacaaagcattctgatttggaattttccgaaacctactgaagaaagaccttcgtctactgtgtagccatggccgttgaccacttcttcttcttcttcttcttcttcttccatttcagagtcagccatagccatttttcgaaacctaagcaaaacctttaattaaggtgataatcaaaaataactaactaactaactacacacgttaattatttgtaaattattatttttttttttcactttgcttttgaaacgacgtcgttggggtttgactttgaccaaatccaaaagggctttcagtttgggctcagtcggcccaattgttaaaaatattgggaaatctacatgttatactaacttttgtcatttttttacaaaaatactgtcagacggaatttttaacttttttactatattttttcataagtttcatactgcagtatactgtattaagttttcactggtgttctactggtgttttactagtgttctactgttgtttt

SEQ ID NO: 299384 - DNA, 5773 bp, Cannabis indica
ctggtattttataaaaacacagtatttttgaaaatttgtccgtgtgattaactcaaattccaatatttttataagttttcctatttattttaggccatttggcatataagcccaacccattaatcaccgtatacggcttacaagcccatagtatcccccaaacgaatcccttcccgcggtttaaaacagaaagaatcgacaaaaccctaactaaatctcagttacttaccatccactcactgagtcgaccaaactcgccgccatgggccgcgtccgaaccaagacagtgaagaaatcttcacgccaagtcatcgaacactactactctcgaatgaccctcgatttccacgtcaacaagaagctcctctgcgaggtctccaccatccccaccaagcgactccgaaacaaaatcgccggcttctccacccacctaatgaagcggatccagaagggacccgtccgcggaatctccctcaaactccaggaggaggagcgcgagcgtcgcatggactttgttcccgatgtatccgccatcaggaccgaccagatcgaggtcgacaaggagactctcgatatgctctcgtcgctcggaatgagcgacattcccggtttggttcgggtcgacccggtttccgtgcagactcaacctttaggatttggccgtgccggcggagctggaaagagatactgatttgaattttggggcagacataatggttctagattatattcttagtgggttttcagaaggtagtttttttttttttaacgattcttcattatttcataaaaatctctcatttttatgttaatatttatgaattatatgtccaattttaatgaatcaaagtttttattagaatgaataattcaagtagggaaaattgagttgattttcaatgtaagcaaatttcattccaatattttatacaagaaacaactctgagtttttgcacaaatatatcaacaaatgtaagcaagagatttgggtttgattaaaagcttttgtattatagtttcattcacttgaatttgcaaggccaatcatgttgagcatgtggcgatcctctttgaatcggtccaagaccgtacctttaagtccttcgtgtttgtcttgctctgattttcctgtgacaacaccccagcattctataacttctggttgtattcgggtggttttggagagacaagggctgccaaatgtggtgcagctgaagctgtgcccttgatcaaaacttgccgataagaacagcccaaagtggtttgctcgtccaccaaaaccgataccattcgggatggactctgagctaaaattcgaagcacactgcaatatggagattaattaagcaagatcttatgataatcttaatcaattctaatgatcttcatgtaaggactgcataagaataggtaaaataatcaattgaaagacctttaaaaacgtgtttgattattattatggagggagtaagttgattttgatcttcttagaaaatggaaccacgttttcttttttagattgagaagtgggaaaaactcacccattgaagattggtgttagctcctgtaggcctgaataaagctgcttttggatagagttggaaaatgaaagacttcatatcaccatagaagtcaccatgtttctcccaaggttgagaagcatagcctccatatatgtaaccttctttatctttgataattaagactgttggcccttcatcatttctgcagttaaattgaagagttactgcttgcccacttgccatacttaaaaggaaccaagaaaactgaaatatgaaagaaccttaatcatttatgaatacatatacatcacttaagggctgcaaagaagcacagtgcaaaatggtacaggagaacaagataagcatacatgcataaaaataaataaataaatgaggcttaaccaaggcataagatgaaaactagtgtaattacacaagaaaatcaggtacagaagatagtattatagaaatgagcaaatggccaatccaagcacaaccaggatataacaatgcaatccctctaataactaaccttactaattgttagccaccctagtgttgtgaagaaaattaacataaaagctaaggcattaattgaaaccagttcttatcatagccaagaagaaacagtgaatgataagtaatatgtgatattccaaaggatgttttcttggtactaggctactagctcccattattatgaatagaaactcaaccaaaatggaatatgcaaagcctgcgtgaatactatcaaataaaatttagaagcatgttactcacgatatgtggcccaagaatgtgctgaaactcaaaccgttaaatgaactatggtataatagtttccactcctccagctcgtgctggggaagtgctcctcctatatgccaagcaaactcctttcttagtagtatcaagttagaatctacattctccccttgcaatagacgaggaacttcaaaacctggcctccctgcacaaaacgttccagcaccaaaattcagaaataacagctatttctgtttcaatcaaagtatcggctctccaatcctcgaaaggaagaagaaacaggactaaccaaaaaaagacaaggacaccaggttagcaattaacagacaagcaaaaaagagtgagacaatatgctgtctcaataaatttctttaacttgtagaaccagcaagcttgttattgtatgtttcttcgttcggaggtaaaaattaccacaatgacaattgtcccctgtttgattctatcagaaaaaactactaatgtctgctatcttagggccacttaaattccctagacaaaataatatgtctgctactttaatcatacataaaaacagacaaggcatgaaacttttcagagtacctgggttcggtggcatcaataagcttccaagaagttttctcactgatgggaggatagagcaccaacttctgaagtcttcaaaagacatactttcttcaggatggctttcatcatgctttgaaaatttagcagcatcaagaaatatgcctacactatccttggatgagctcaaatgagattcagaagaatccggttgatcatgaaataaaatttcaaatattgtaaccaaaacagtttctagatcagacctgaattaaaaatagaaagttacattcatcagtaacaaactacaagaagaagaagaagaaaatatagcaaggctagtcatttcctgaaagttctgacagtattctaaatggaaagtaccaacccattctataattatgcaaagaaaaagaatcaaaaaagtatcaaaccatcatccaatgcttgcttaaagaagcaaccttgaaaagaataaaagctaacataatacaagaactgagtatttccatagttataacatacttaagccaagagagtactagttccactagttaaattaaaatggtataacactacctccccacaattccatccccagagacatccaataactgatagataaactcttcaatctcatctttggttcccttctcataggtcccctgcaatacaaccaaaaacaagcacaagggtatgtttagtacatgatcatgtattaaagaaaacccgtatcaaggtttttgtgataaaaagataaaaattagaaatatccattcccctttgcctattgaagtgagattgataaacatgcacctttgcaattatgaggtcttcaaaggtgagtttatgatccttccgtttctgggtaaccaaatcaaaaaacctttccccaagaggaccgtgaattccaaaatatgtctgtgaatgtaaaaatatataattcagtaaggatgatacaagatttataatttttgaagttgatgatgttgtgttggtgctatgaaatactacccacctggaaaactgatggagagatgtatttaccattggtttgggatttttctactaaagattcaaacaaggatttaaggtcttccagcttctttggagtaaaagctctgcagaagtcattgttcaatcgattcttaattgtcatacattcatacatacatctataaatatataattacatacacacatatagacatatatataaaactagatagagatatacctggaagcagtagcaaaacgaagatctgcagctgtacgaggtgagtgagcgttgcccatctttggccctgaagtttatgcttctacgctcaagctttcttcttccccgtcgtcgtgcttagttctttcttttttttttttttttttgaacaaatatcagactatcaacaaaaaatatcaaacatttttttttggtaaaaaacaaacaaaattaatatcaaactatacttttaaaataaaaaataaaataaaataaagggagataaagtgggcttgcacatgcaattcagttttacacaagggtattttacaaaaatataaaattttgggcaaaagtttaaaattttaccacaatgttttttacaaaattactgtttttataaaactacagtaaaataacaaaatagaacagttaaaataataatagaagaactaaaaaataaatgtaaaatgacagtgaaaacttaacacagtatacactataaaacttacacaatatttttaaaaaaaaaattgccacatagtaaaaaagttaaaaggttagatatttctgaagtataaaaagttataaacctctttacacaatacacttaaaagtaatttttttttttatattttgcagactttttatatatattttacacaatatcacgaaactctgaaagataagtgaaaaggcatgtagtttgatactttgtttgacgtttacgatgatgtcgagttattggttgatccttgcttgagataatggcttgagttgaataagaatgaatagcgtacagtacacaagtgagagagggattgaatgccaatttaaaaacaggttgggtaggatctttgtccaagagtttttttttttcttttgaaagatgaattttattaaggaaaaccaaaactacataatatcacaacagtcggccttacaaaacttggccaaccattcagggatagaatgagcaaaaatttgtgaggtttaagtagctaggcatttcctagctaacatattagcacattcgttatggtttctatttacaaaactgatattagaatccttagaatcctccaaccgagcctttatttgatgcagaagtgttccagcagcactcagatggttgtcctggtttttaattgcttccaccacagctttgcaatccgattagatctcgaagggtctggtatctgtactcagccgcccctttaaagcttctagaatggcccaagcttcagccacagtcaccgaacaactgctggggatgtaaaccatcccagcagtaagcacattcccactctagtcacaccataaaaagcctatacccactccaatttggtcaggattcatcgcagcatcacaatttgcgcataattttccccaatgaggagcctgccaatgtgtcgggttagatggggaagtcactctagtctttactgttggaaattattttaccaggatcttagatctactcacaagtatgttgattaacaccctaaatatgaactttctaaaacgatgaaataaacacatataagtttagtaaaccttacattggtgcagcagaataatatgactccttccgttccagatatctagcccttgaatcctttctgtagcagagcattatcaatatctaaacttggtatctctttctctgtattctttagtgctg

SEQ ID NO: 299385 - DNA, 5265 bp, Cannabis indica
agaaagattatcaggactgagaactggcataacccaattggtggttcgtatcttcaccgctcaaaaggttggtcactagaacaactcatctataccagaaaactttaaaggaaaaaaagaaaaagcatggacctttagaataataacagccgtacaaaaatgccccagatattggagggaatggttttttcagccatggcagcagcatcctctttcatgatggtatcgtcagctaaagtttcgacaacgaacttgggttacaacataggtagaagagaattgagaatgaagaagagaaggagtttctccatttcagcacaaaaagcccaggaatcaccagaacaagagttgaataataatcaagatagagtgaaacaacaacagggaacaccactaagaccagtggagactcaagtgaatgtgaaaagcaagaacatgagcagagaatatggtgggcaatggttgagtagtgtgactcgacatgtgaggatctatgcagcttatatagaccctgttacatgtgaattcgatcaaacccagatggataagctcacccttattcttgatcccaccaatgagtttgtgtggaactctgatacgtgtaataaagtctattcttacttccaggagcttgttgatcactatgaggtaaataaatctttttatatatataaaattattgagttaatatcatgatgctaacaaattaatcatcaggatgcaccattgactgagtacactcttcgcttgattggttcagacatagagcattatataagaaaaatgttatatgatggagagattaagtacaatatgaatgctcgagttctcaactttagcatgggaaagcctcgaattctgtttaataataatgaaatccaacctcaggaggagtaatatgttatatatatatagttcttgctttaagagtgtccattcgagaagaggttagcactacttctatcaattgtaacattctgctcatctttcgaaacaatatgattcaaagggtttaatcttatgtagaaaaaactatttataacattgtaaataattttgcatacacttcattcattccatacattaatcatccattaagctatatctctataataacactccaaaacttactcctctgttttgtacactattcaaaacacccaggaaattaaacaaaacaaaaaatggatttccaatgtttctcttctcaaaatttgaactccatgtaattacaattataataatagaaaaacagggattcacaagaaaattgatcaaatatttgagacataaaattactaaaaaattagatcaatctgtactgaaccatgcttccttcatcattagacaaatgtcatatgcagccttagtttccaattatggttgagacagagcttcagaaaatgatggatctttccatggagctatcattccatggggcaaattctgcaaattaacatttttttagaaactaaataataacattcaatatgaaaccaaagttctcctgaaagtgaaattgatctagcagatagattagtataatttctaaatttggattacaagtcgtctaagttaagaaaaccattcaactttgaagaatataccacatatggactcacagaatttcaatcttcattgtgaaatttgtaaatgacatcaagctagacagaataataccattcctttcactaagaaaacaacaccacaactcaagctaagaccagaaatggaaaactaaccttcaaccagtagaaaaacccgcgtagtaaatttagtgttttgcgatcatctgctttggcctgaataatctgatctgcaaaatctgcattaaaaaaaaaagtcacctttttcatgtaggagcagcctttgaataatttcatgaaatcaaattatgatagaatgtataaaataaaagcaagttcttatcatccattcaaatcaatcaaaacagaaaaactaaaccaagtgacctttatatagatccaaataagattttttatgagttactacttcatcccagagagccttatgttgctgtggatcgtagggacatcttagaatatccagtagttcctttttgaactcggattcactgcttccacctttagacaaattcttgtcttctaaatcaatctataatatactttgaaaggacaaaatcagaagacaagatttatgcataaaaaagattaacatttactatcatatagatagacgagaacattaccaaagttatatcaaacttataaactccattagggtcttccttggttgatattatcattatctcatcgtcatcatattcattactttttttgagattagaatcttgtccctgatattttcggtcagcacatttttgaccttcaaaacaaagtccataaagaccaaacatttatgtatatatataaatatatataaatatatatatatatatataaatacgtattgaatttctatttttcacttttttaaataaaaaaaaattgaagaacttaccgcgccaagaattctcaatctcaccatcttcgtcttcatcatcgataattataagatttttaacaagatcattcttgtaaggcactaaagtttcttcagctatcttgttttcgatcgccttgctctgagggtcatcgtcacagcgattttgatcagctgcgctctctgatcggagacgcttacccttgcggtgagtgtttgagttcaaaattaggctacttcttctcaatcttctctgtaacctcaaatcacagttctcgtcagccgggctcccgactcccacgcaaccgccgccgccgccatgtcccttcgccgccgaaaaatgacccattgagcttgaaataatgttagtaccgtttccaattttcttcagattgatccttcaccagcgatttcacaagaaaaaaatatcaggggaaaccctaatttagaggtgaaatccagggttactgtaattatccaggactataagaagaatctcaagtttcaaatcagagtatatttatagggtttttttttcccgccctttctcgataaccaatgtgcttttttttttcgctttaagtaggatgtacttactagagtcggtttagaaataagttataaaaaaggaaaaaaataaagttgaaaaaaataaagttaaaaaaaaattaagtgttatgaataaccatatatcatagaattaggtagtttactctaaataatgtactatatgttgagaaatagagttttcctctattaactcaactccacagagtattatttaggaagtaatgattaaccttttttcaattctattagaatatttttttattgtaattatctttggaaattggtcatgccacttgtaatagagtcattgctcttatcatcattttataacaacttcatttcactataaaagaaaagttttggctcatcatgaaaatgaactgagaaaattatttactcgatttctctgaaatcgaactttggtatcagagcccaccttgacctctgtcaatggctacaccacaagaacaacagcccaccgaaggaaggtctcagaccccctcgttgttagcaccaacagaattggtgcatccccatctcagctcccaaataccttttcccagcaacctaccacactaaaccaacaattttctctaaaactggacataatcaattttaccatgtggaagactatggtgtccaccattgttcgtggacacaggttacatggttatctcaatggcacaaaattgtgtccaccagagtttatttcatttcagtagctggtgaagttaaatatgaaggcgagcttgaaaccaactctgagtatgaacaatggatcattaatgatcaacttctcaagggctggatttacagttcaatgattgaaggaatagctacagaagttatgggatccacttctgtagcaggcctctagagagctttagaaagcttgtatggagcttattccaaatcaaaaatggatgatattaggaccttaacccagagtgttcgcaaaggttcaacaccaatgggtgagtatctatggcaaaagaaaaactggtccaacattcttgttcttgcaggtgacccttattcaaaggcacaccttgttgcaaatatgttatctggcctgaatgctgagtatctctcgatcgtggtccagatcgaagcaagaccaagtacaacttggcaagaactgcaagatatacttatgagttttgatagcaaaatctaaagattacagacacttaccatcagcaacacatccatcaactccaataatcctcaagccaacattgctgctaaaaacaattctggatctaattcaacaggatgtggtcgtggttccaacaatcacagcagtcacaattagtattctggcaatggaggtcgattttttggcaatcgtggtagtcctaggagatttcgtggaagaggatgcaccaatacaactcgaccatcttttcaggtctgtggcaagtatgcctactctgctgcagtctattacaacagatttgatgaaaattttatggggcagatccaaaccagacaagtggaggaaacaaaccatcatagaccagtcacaatgctttcgttgccagtccagaagttttagagagtgatgtgtggtttgttgatagtggagccagcaaccacatcacctctgatggtgcctcaataaaccagaaacaaccctatggtggtaaggaaactgttacagtgggtgatggaaccaaacttagcatatctcacattggtagtagtgttttggacaccaatgatgggaagcatttgttgttaaaagaaatgctacttgttcctaaaattgctaaaaaaattaattagtttttccaaactcactaatgataacaacgtgctaattgaatttcattccaatgtttgtttggtgaaggacaaggctgttagaatatcttttactaggatctaaattttctaacaagtatgttcttaacatcctaaatataaatttctaaaacaatgaatcttaaacacatataaagtatgagaaactttatattggttgcagtggaatataatgactccttccactcagatctctaaccattgtatcttttcatttgtagagtgttattaagatttgagcccaattctccttcagttgtttggattcttcacaatcttatacaatatgattgaggactaacttgctatgggtgggcatgcactcaattactaaggctcttgatgaagaacactcaaggattcgaaaattataagagcaaaaaa

SEQ ID NO: 299386 - DNA, 2348 bp, Cannabis indica
acatactttctttcaaaaaaaaaaaaaaaataatacccacactagattgaatctggttgctctagacatgtgtattcagtgaattgtactggtactaatcgttgattttttatctcaaagtagtacctcttgagagcactacataaacataaaataaagttaatcataaattagtgatgattaaagatggaaaaatagtgctattcatagatctttaaactactaaaatttacatttgaacacatcgttgaatttttggacaaacaagattatttaacaaatctagaaatactacactctactaccccgtttggatgaggacaaccatccaatttttgctaaacatattcaaacaaacttataagattatactaataccaattattgtttatacaaacacagaaaattataaaagcacttactcaaggtgtctgtgaaaataagaaatcaatctgcttatatgttgctcaactgctcaaaagcctagcaacacgctcattaactctcggccatcaatgaccatagttgcatgattaattaatgcatatacatctttcaatctattttttaggtcacgctgcatgacacttgcaaacaataaaaaaattaataacagaaactgtaaaatatatactaagttgattattaactatcatacctgcaccatacatattttcgagtagctttgatcttcctgaggttgtagacatccaatatgtcagtcttttataagtatattttgcgtgctaccataacaccttctcaccaatgctaactttgagggcatttttgtaaagctctatttgtttaggcgcgctaaaatattttttaaattactgtgtcaactttttctaatcaaagagtttagtggaaggtttgatttatttgaatttttataaataaaataaactttgcttaaataaacatatcttttacaatttttgggatccggtattttaacttctaaatatttcaaaatacatcataagcaaaagatgtcactcaatgaatgcaaaatctgagcctaagttgtcccgaagaaccaaacactctaggcctaactatcttgatatgtacaatcaccaacaagcttcagactcattattgcttagcctttgccttgcctttacatagacatgaaaccatatctgtgagtcggcagacttagtaagaaaaatataaaacatataaatatataacctgtctcttaactcaggtgcccatacacctagctataagtttgacccgcatcctatgcgtataatgagtctcgaatgttcttaatgatagtatgacctctataccacatgcaccaagtatctttctaatgctagtgttggcaggatttgttcgtaccataagtacaactgatcgttctaccatatacactcaatattcatcaagtactagtgttggtaacgctatggcatacccccttaatagtatactacaccacatacactctatatctcaactgtactagtgtcggtagtaatgattcatatattcaaagtatataatatatacacacacatgtatatcaattatactaatcttatctcgtttctatattcaggtgtgctggtcatcctaagtggaaatatcacttgttgaacggaggccctatgtcacatttacataaaattagtaagtgttactctacacacttttggggatttaaactcaaaactaaaagtatccttataaataaatagtgtagaaataccctaaatatcaagaaaatatgaaaattaggattcccaaaaataccccaactggtgaaccggatcccaaatagtggactgttttctgggattctgcttaaggaaatagttcacattttcctagggaacggtggactgtttgtacaacaaaaatcacaaatacatccattgcaaactcaattgaaccccaaagttaatgaaaatctccaaaacacctaataacatcattataaacacatcatcaaggccctgtagtgaaatccactattattgggtcaagctttgagcttaaaaactcaaacctaactcaaccaaagctacaacaagcaaaacccaacccaactaattattagaatttttatgccctatataaaacccaattcaatataatcttatttactattaatagaagattaaaaatcatataggattacatgaagttttcataattatgattttaatatatattttctattaaagctagatgacactcgatcatttccggtgacacccatgaagttcaggatcctctcaattaatgtgagccactattgaacttccatgacgtctagacctcccaaaaaaactagaggtgcctgtatgcgaaacctttcatacaaaggt

SEQ ID NO: 299387 - DNA, 3460 bp, Cannabis indica
attttagtttttttttttgtaactatagttgataggttattaaatgataaaaaaaaggttgaagttttgcattatttcttagtcaatggccttttaagtcaatgagcaacataaaataaatattttaatatctatttgttcatagattattctccacccaattaactacataaccataaccaacaaccaattttcttttctctccaaaactctctcctcaaactccaaattctcttcccttttagtttcatgaacactccaccagatttctccggcggtggctactggcagcagcagcagcagcagccgccgcctccgtcgccgccaaagagatcccctcagctccaaggcccacgccccactccattaaaagtcaacaaagaatcccacaagatccggaaaccacctccgcacccccacccacacccacagttccggtatcctccgcctccggccgatgactaccaacaacaacaacaacgacatgagcctgttataatctacacagtctcccctaaagtcatccacgccgaagtatccgatttcatgtccgtagtccagcgtctcactgggccttccccgccggcgccatccccttccggtgccggggatctctccccggcagcaaggctggcctcaattgagaagactagcccgtcagatagggatagggacagggagaggcccgggatcagcggcagcggcggtggagatttatgggatatgatagagggggttgaattgggtcagtttccgggtatattatcaccggcaccggcgactttgcagccgatttcatctgggtttttctcgccgttgacggatctttcgtttttaaatgatctgagtccgttttggcataatagtaacagctttatgccgagcccttcaggcttgctttcggctccattgatttccccaagtccttcgtcatctgacatcttcaacaatttgtttgacttttaaacctcagctggtaaagattttgtattcgactgacttttctttatattttttattcctctcctagtgtagttatatttttaaatataattttttttttaagaaataatttgttttgccggtatatttgaccgacttccttaaatgagtttgtagtttttagaagtaggaagagaaaaaaaaaagaagaaaaaaaaaaaacaaaaacaaaacaaaaaaacaaacattgagaaagttaaaagtagttgcacttgtaattgtagttgttatttgttacaattgttacaatgtagttggaagttgcatacctttggccttttgggtactactcagtactcacttttgtaatttttgtagctaatttctttgggaatcgttatcagcttgtccagaagttgtatgagtaatttatataaggacttctttttcttttggtggatggatgattgaggatatatacttgtttatcttcaatctaaaaagttgttgaggatcatttattaaattttagtttgatgtgaaattttagtacaacagtatctcacaattttcttttcatttttctatgattactaactttagtaaactttttatttttttttggtcttttaggagcttttagaaacttcaacgtgtaatagtagatagaacactcagaaagagggagcgtaacttacaacagtttccttatattatgtgttaaagttagttatccgtattatttgttggttgtgttttttgtttgttttttttttgtttgtttttttgttttttttgaatgaaggtaataatttccccaataattttttatctcgagtattttcatagtgtaaattaaacaaatggacattaagatcagaattaaagtctaataaatgctaatgtttgtgagcacaaatataaggtggtgtttgctttgatataatgtaatgagaatagtaattgtaatatgaatagtaatataatagaataataattgttataggaatggtattatgatgtttgatttaactctataaagaacattgtaataaaataagtttattgataaaatactcttagttttattatttgtaatatttaaaattttaaaaaaaataagtaataaaaaagagtaaaaaaaatattttctaacaatgtaattatcattacattagttttatgatgtaaccggaattacaatacaaccattataatgtaaagccattataaaagtttaaaaatgaaaacaaataatataatggtaataataatttcattacaattcccattacactaaaccaaacatgccataaatgtcactgcactaaacagtttgtgataaagacgaaattagtcaccaataatatgacaaaaataatataagcccaacttgtccctttaatagccacttattgtggcaatattttactctagggtctattctgttcgtctaatatttggagtaagtcaaagcgtgtgcatttttggtggaaatgattacaagctccaataaatatatcaaacttaagtaggatgaaaataaatacatgaaagccaaaatttggaagataaaaagactattctcctcctaatgttcctcaaggattatttacaaggaaaactaaaccttcatactatacccaatccaagttcatctctaactagattcagtaataatctactctcaattcttctgcactacaattttagaacggaaaaagcgaattctcatgcacttgccatttcggaattctttcttcctccaatcaaagtgccaaccttctctcccttgatggcttttgagatgtttcctggtttgtttaggttgaagacaacaactgcataaattgaatgaagtttagccttttattttacaggagcaagaatactgatatactattcaaagttaaatagtggcaactgaagataccgggaatattattttcttggcacagagtaattgcagtcaagtccataactgatagttctttcgaaatcacttcttgataagtcagattttcgagaagacgagcgtttgagttgcaccttggatcttcttcgtagaccccgtcaacatttgtagctttcagcacaacttctgcattaactggaccaacaattgaatgctactaatcagttcaaaaatatcaaaacaaaaaaagcattttcacaacacattcagaggccaaatcactagcttttgaaataaataggactactatacacctgaacagactagtttaaagagaacttggtgtcaaaataaataaatagaaaagaaaattttggaatttctatagagacatatcatcaattcaattgacattataatatgcattggaggaactcaatagaatagagcattcaataaatgattacttagtggcttttggcttcataatttaaaaactgtcttcagtttataaaaccagaaaacacttttaaaaactaacaaggtgcgtttggccgaaatattttagaaacaagggtccgaggtttaggtttgggtcctggg

SEQ ID NO: 299388 - DNA, 4217 bp, Cannabis indica
ttgttattgtttttcttcctggcatagctgatatttaaattctgttttttcaattgctagaggcggcgtactgctttagatgaactcaacatgcgcagtatttttgaagagaatgatgtcatttgtgtaagttcgtttattggtttcctggaaaaatacacttcttaattactttataagatgaaaaagagaaggcaagtaagggaattagctaatttagttgctaattttagtgttaattattgtcttccaggctgaggttcgcggttttcaacatgatggtttacatctccaagcaagaagtcaaaagtatggaaaggttggtcttattttgtgatttcatttcattcttattcaaatatgataaactgaaaataagaaattagctctttggcatgtattaaaatggagaaaatctaagaacagtacccttttaacttagggtacattattccttattcctgtagttaggacagtgttaaacacctgacccgtcttaaatttacataatgtctatttacttttaagattatattttaactacttcatgatttatcttatagaaatgtattcaccttctctgctgaagtcaaaactaagctctaattatttgcattgataagccgttactgttttgttgtataatattatctgtgacctgcttataagggattatcatagttattatgtacattcttcattacagcttaaaagaggtcaattgcttacagtccctccttatctagtgaagagaaggaagcaacatttccataatttggaagactatgggattgacttgattcttggatgtaatggattcatctgggtaggggaacatgttgtgcctgcagatgatatggtggaagatcaaaccgaacaacaaaccgtgaaatctgatgtaactttgacaagtctcgaagaacaagagcaagtctctacccctcttgagataagacaatacatttgcaggacagcaaatgcaatccgggttttgtctactctgggtttcattgttactgtagaagttatcatggagatagtagacttgagttgctctatgaatgttgatatacatgaaatgcttggttcagagttttgtgttttggttgccgagaaagaggttgaactgcgaaccttgaccaaaaagaagagatgagaaagaattggttgacagatctttattgcaaacctatttctctcaatgtaattttatcttttgttccattttactagcaccttgatattgatttgaaaggtttcccctttgttgtggtacttatcaaagttttgtttcctgacgaattataaggaaataagttgggaaaggagaaaaaaaaaggatagctgttccagctttttactgtcaaactcttacaatcatacaatagacttagtataatgtattttgttgcactttgtacatttcaaaacactgatatgcaaagaaaggaaaaaaaaattaaaagtgacgaatattcacattctattaggtagcaaatattagtaaccatacatgcatcaatggcaaaagaaaccattgaagtaccatacatattgtgtagtttatatcatgaaactctattgtaaagaaaactgtaaaagtaaacagttatgtcaattttgtagggctacacaagtctcggcttacaattcatccttttggggtggtgattggaagcattgttcatcccaataatagggaaacttcagttttgctgcattgtgaggcattgaccagtcttcatatacaaacctgaaagcaaatggagacataaactaaaaacatgaaaatcaaatgtaaaaagattgttggagatcatctttataaatgttaaccagtagaaagatcttccacagaaaatgcttcaaaatcgagtcatgctatgtcatattataaagcttcagatatgttattttcatttattataatcaaaccaaataataaaaaaaattgctgctatttggctaagccatcatgtatttcacgattcaactcttcaaccaacatggaccttttgtggaaggtaaatgcagaaagtgagagaatggcagaagttaaaatacatacactttgactggggggcgagaaataataacgagcatctgcaaatcttcatgatcattagtattccaaacctgaaaaaagaaagaaggcatacttaatgttgctaaacagtacaagtattctatgagtaccaaatcagctttcattctgtggcgagcttataactttttttagtagaaaatttgtccaatcatttacctggtgaacatcattaacgggtatgataaatgtgctatttgagaaaatagagaactcttgtggagttccaggatgcttcaggtgtgagcttggagaaagatagaccgtgccagttcctctcagcacaacaaaaacttcttcgcatgaatgcctatggatcggtgtacgtgatcctggagcaaatgtttgatgccatacttccacctgtgaaaagcccaatttttgcacttattaatgcttggaaaccagcatgtggcatctattctgtaatgagcttgaatcattagttgactctcaagtcttattagcgacttgtgaattgcaagggagcaagcgccttccagctatactatacaatatgaattactagggtacttttcgcttactgaacaagtggttaccctaccttgaaccttcccttcttctagaaaccaactgtcattggtgtctataaaatatacttatgaatcatgatgcagatatcaagcaaaccttaagcaaaagataaaggtggtccaaagacaaactgaatggaaggccctaatttcaaatcatataaccaacctaccaatcacatgatttgtaatcaactcttggagtgtaaacattgatattacaagttctatatgcacatcatggaatttttcaataaaaaaaaactagggcctctgtattagccgaataagcggaagaagaataactgcaaacttcaaaaaagagaaaacattaatccaaaataacttattattgtatcattagcatatacctctttcatcccatgcataactgaacctgctatagtaatgtgggacaagcctgcccttccatagttatcctgttcaagctcactgatattccttactaataatgggaatcctgcattcataaatttacatatataaggcaaaatgcagaaacaacttttaagaatcataagtttaacattcacagattcattcacgataaaccacactagaagataagtcaaattaaagataaaaaaagaaaatacgaggtgaactctttgtgggttaaacaaagattgctaattcattcattttaagggatcagtaagaatgtagggccatttcctactaccctaatccaaaattacgaatggtaaaaaggaaaacacacacaaattgtcacatatcacttgctaatttttccaccagcagctaaagataaaaatagtacatacaaaattagcataactgaacatgcaattgcaagaccgagaaatatcatcgataaagggttccaaacagagcaatatccaagttaaagcaggtatcaaggatcaacttataatcagccacgaaaatatagaaattctcagcagcaaataaacaaatgttcttcataaaaaaattacataaaataaaagtgtttgcgtgtttaataggcgaagaataaaagcggggaaaaaaagagagagcggcaaagatgttatataccattaatggaacacttggaagcttcagaagttgcagataatagaacggagctaacaatgaagaagataaacaaaaccccacccatttttgtcacacactcgctctggttctggctacttccatagactcgaatactgttgtaattaaattgctttcagtctgagaaacttatttagtattataattatattttattatattttgtggaggttctagaaactactcgtcgtttacatgaattttgtgagtgcaaatttatttttaaattccattttaaattttgtgtttttgtaagagttattaattagatattttattttgttaaatgataaaatagattctgtatttttcaaaatggtacaaataagaccccgaactgaatttttgtcaaaataaaatttaataataatccgatctagagatacttttgtgaaaatagttacattttctgtatttgttctattatgaattgtctcaagttggttttattaaaaaaa

SEQ ID NO: 299389 - DNA, 4678 bp, Cannabis indica
tataattcttaattcaagttatacatgtacattatattttattttttctctcaaaacgtaagttaaacattatataattttttttatgtataagaaatactacaaaatataatttagaaactatacaacccaatataattactattagtgtaaatgaatattcatgcatttaatatctaggggcgatgagttgactttcattaaattctttattcactcaaacaaaaaaaaaataagaatatgaaaaagtcaaagacaagaaaaactttgtataattcttaattgatctatcagacatttcaaagaatgagaaggcctagatatcacggccacagttgatagactgaagatcgagcaaaatcttgttacagatcaaagagagataaagtcgctattttattatcttgagacttcattattgatagtactacaatataaggtttatatagtcaataatttatcttggtttttctttaaaattttattgatcactgttagtaaataattgggttgattttaaattctgaaaaaatattagaattaattgacacacaatttcagtggtccatgcttaaagttttaatttcattattttagtgatatagacatatattattatcatccatatgtctatagaattgatgcttaaaattatatccttaaagttaaattatattagatatatgtggtttcattaaaggattggagtgacttcattggaagtctattaaatttattacaattcttgactatttaatgttttgttgctataatatcaatttagtattagtacaccacttgaggctagctcaagttaccataaagaggtatgggagggtacgtgtatggggaggttgttaggatcgaatttccaattgtacaatataatgtatatataaacccttcaataataaaaaaaaaaatctagcatcacttcatattagagggataatttttatagcttaatatctcatatatgaaactttgtgctactatttttcaattatattctttgtactttatttatttttaattagttatttatttcctatctttagatcaccatctatttttatttaatttttatagtgcatctatttttatttaatttttatacacttaaatcactttttagagtttatttttccattagaagcataacgatagtccctctggagatgacgtccagtacttgcaattgtattacttgttgttgatagtgtatacttgtactaagattaattttacccaataatattacaacaaaaggtgcaataacccttatagctattgaatcaaggagttgtaaccctaaaatggaaaaatatcaaaatctagcattacataacttacttgaccatctactacagatgctctaataatgttgtctttgttctatgcgtctaaaatttggtggttgtaatacccacttttgtttggccataatttggcttgctactttcccttttttttattctttgggcaggagtaggtacaggaattgacttttcattaaattctccgcgactcaaaaaaaaaaaacataaagattaagacaagaaaaaaaaactcgtataattcttaattcaagttataaatgtacattttcttttattttttctttcttggagacgtaagttaaaaattatataattttttcatatgtaaaaaatactataaaataatttagaaagtataccaccttatacagttattatttgtgtaaatgaatattaaatttgagacatttcatatttaggagacgaggcgttgacttttcatcaaattcttcattcactcaaacaaaaagataaatcaaaataaaaaaggcaaatacaagaaaaaatttgtataattcttaattgaattatcagaactattgaagagtgagaaggcctcgacccgccatagcctaacttaacaaactaaaaatcgagcgaaaccctactagagctttcgaagagagagaaggtcgttattttattatcttgggacttcaatattgatggtaatgcaatataaggtttatttattcaaatatttattttggttactctttgaaatttgattcatcgcttttagtagataatttggttgattttaaattctgaaaaagttgaaattaattgacacacaatttcaatgggatatgcttgaattttttatttcattattgtagtgataaatacttatattattaccatccataatcctatcgaaatgattcttaaaattgtatccttgaagttaaattatattaaacatatgtcaaataattaaatgattgaagtgacttcgatggaagcctatgaaatcaattagaattcttgactattaaatagttttgttgctgcaacatcaatctagcatcactgcacccctcgagtctagctcaagttgccatagggggtatgagagggtgtttgtatgagggttcctgtgatcgaatctcaaattgcgcaatgtaatttatatataaacgcttcaataaaaaaaaattaaaaatgctagcatcactactatagttcacatattagaaggatagttgttgtagcttgatatctcatatctgaaacttcccgttactgtttttctagtttgttctagtatttttttggttttaattagttattcattgcctatatttgatcaccatctatttttgttcaatttttgtacactttaataattttgctcgagtttattttcataattagaggcataaaaatagtccttgttgtgatgatatcttgtacttgctactgtattacttgttgttgatagtgtacacttgcactaagattcattttatgcaataatattgcaacaaagagtgcagattcccttatattaatagttgtagctattagatgaaggagttgtaatgttaaattagaaaaatatcaaaatgtagcattaaaccactcatttaatactttaataatgttgtctttgtgctatacgtattgctaaagtttggtagttgtaatacccacttttgtatatccatagtttggcttgctactttttttttattattttcttttacaaggggagttgacttttcattaaattctttatcactagaaaaagaggacaaagagaagaaaaaaatgtgtatcattcttaatgcaagttataaatgtacattttattttattttttctctcttcgagatgtaagttaaaaattatataatttttcaagtataagtaatacaacaaaataatgtaaaaactatataaccctatataattattattagtgtaaataaatatttaatctcagacatttaatatttagggggcgtggagttaacttttcatcaaattcttcattgactcaaataaaaaaaaatagaataaaaaagtcaaagacaagaaaacgtttgtataattcttaattgaaatatcaaacatatcgaagagtgagaaggcctcgacccaccatggccactgttgatagactaacgatcgagcaaaaccctatcagagctaccaaagagagaaaagactattatttcattattgtaggactttaatattgatattaatacgataaaaggtttatatattcaaatatttatcttggtttttctttgaaatttaattgatcactgttagtaattaattgggttaatttttaaatctgaaaatattggaattaattgacacaatttcagtggcccatgtttaaagttttagtttcattattgtagtgatatagacatatattattaccatccatattgtaatagaattgattcttaaaattctgttcttaaagttagaatagattagacatgtgtgatttaattaaaggattgaagtgacttcgatagaagcctataaagatttattttgattattaaatattctgttgttgcagcatcaatctagcattactacatcacttgaggttagctcaggtggccataggggagtatgggagggtgtgtgtgtttggagatttctaggatcaaattctaggttgtacaatgtaaggtatatgtaaaagcttcaataataataataaaaaaatgtggcatcactaccagagtttgtatattagagggataattgttgtagcttaatatctcatatctgaaatattgtgctattagttttccagtgtgttcctaattttttttttaattagttattcattacctatatttagagaaccatctatttttatttaatttttctacacattaatcatgttgctagagtttactttgacgattagatgcataaaaatagtccttcaactgatgacatctggtatttgttgctatattactggttgttgacattgtataatgccactaagattaattttacgcaataatattacagcaaagagtgtaaatacacttatattattagtactagctattagatgaaggagttgtaatcctaaattgggaaaataatagaatgtagcattacagaactcatttgatactctattgaagatgctctaataatattgtctttgttctatgcgtactgctaaagtttagtggttgtaatactcacttttgtttggccatagtttggcttgctactttctttcttttttcttttaggtgttttgtggggggggggggggaggaattgacttttattaaattcttcatcactcaaaaaaaaaaccaaaaatataaagacaagac

SEQ ID NO: 299390 - DNA, 1695 bp, Cannabis indica
atattcttttatttttaagtatattctcttaaatcaagaaatgccgttaggtagacacttttaatatataaagatatatatatatattttattaattttgaataaatcaaatttgatttttatataaaatcaatttatatatatatttataaaatctgtttttgttttttcatatttttatgtttttattaatatatttaaattaaatattaatttcatataattaaaaattaaattaacaatctaaataaatgtatatatttacattactctaagtaaatatattatacaaatattctaaaattactctctaagtgtttacgagttatctaattaaatatagaaaaagaaaaaaaaatcccatacaattgttctactcatcatcatcaccgtgaatcaccgcaagcagttttgctatcctctctcggtgtatcggtaacaacccattttttacatcgtatgttttttttttctccaaactgtaaaataaaaagtaaatatttttattagtatatatatatatatatatattaaattgtttattaatataataaataagataactaatgattaaaacttacaacttttatttagggtatgtatctggtaggatttgcagctcttatgatgccactaatttatttcatgacataaaaattacatagactattttgggcaagttgcttctaatatttcagtattgagtccaattaatgcatttgtcccctcactcttcttgtataccttattttgaaaattatgttactatttcaattaattaacatatatatcttagttaattaaatattttttttatataaagactaattaaatcattacctcctcaatatagcatcaatttcttcatggaggtttgtggctttttatagattccaaatgtaaaatcctccccgtgatgcaatgacctcgagcattcaatgtgcactaaatatatatatttatataagattatatcaaaataatttcaaggaacaataaaaaaaaataattttaaatgatctcttaagtaggtttacccgatattctaaggaatgaagaacatttgatattgactttttatcgtttccgaccaactagccattctggtagccgccttctcaaactgattctctttatctatatcttctttaccgtggattgtgagaagctctgggttataaacttaaaaattcgttgcaaatacacttgcattaaattgttaagtgttaaagttttacaaaaatttcagcagaaattgacatataaagttaattagattaaataaagtatatcttgttttgaaaagcattttattgatttccaataaagtcacataaaccacttgtgttgtacatcttttccaattatcgtgatatgtgtacgaggcgttataaatccacgtggtactggaacatcaactgtatcatatatttcattgatgctcaaatattcgtcaatcatatatcagatcgacttggaaatttttgccatgattgctagagtgaatgattcatcatatcattatttgtgttattttaaatattgtaactaactagtaactaattctactctaaattactaactagtaactaattttagcatacttaattactaaatagtaactagtcctaactctactgaaattttaatgtctataattgaacttttctaaaaaatttaaagttattaataaca

SEQ ID NO: 299391 - DNA, 5573 bp, Cannabis indica
ggtccctttttatcccggttttttcaaggactttttatcccacaggcatatataccggttttaattttagcgaaaaccgggataaaatgccttaaaaactgggattaaaggcctttgtttgtagtagtggttcttgattgttgatgtaagtttgatgatggttatcttctgtgtttgaatattaattaagttcaatgggattgttttgtttaatattatgtttttcttcgtatagcaatcatttaatatgagaatagaaatattctaatcgtaacggtcaattatggttacaagtttcttcttccagaaaagaaagctatttgttactctggaaaaaagttccggaaatcttggtgttcatccaaaaaactttgttcgaaaagttatggccagcctggatggttcttcccgatagattgtcctccgtaaggatagtctttttggatagcttgtcactagtcaagagatatattttcacatatgttgtcagtcttgaatgcccatatggagggagtacttgtattcatcagatagtctcgtgaggattaactcttttggattctccgcactaaaagcgtgcttctgaagctgatgtggaatatgttactagcactgacttgaagaatttaaggcaacattaattagccacgatagaatcagagctaatttttgcagctatgcaaatcaatatatagctatcacctttgtaatctatagtgaattagaccatcaaaagcttgagaaaaaatcatgattgtgtaaggttaaagtgagagagtctaaactaaaagagagaaagttcatcttctgatctttgtaaaattttgaaaggattcttgtaaccttaaaaacactaatatcaataaagatatgattgttgttgttccgaccgaaatgtagagcattacacaaggctcaaacttgttaaaccctggtcttatattcttcttgatttactgctttaattcattatttgtttcttgtgattatttgatagtattattcttgattgcatgtttattggtctagtatttttgcaacgtaattcattgattgagtcacaacagtaacttatgcatttctatgatgttagtcagtggaaacaaaaaagaataatttaaaactcagacaaggttaaaggagaaagttaaaattacttacactgattgtaaaaccattctagtaaaaaaaaactaccatggagaagttcaagaacaagattgagatcgatccaaataattttctttaaagacgcttcaacaatcaaaagtagattattgtggaagatgtggtcctcagctgccttaggtatacattgcgctccttctgatgagctcaacaataatttgtaaagccaagggttcttatatctaggatttggttgttggctaaagtaaatatttaaggtttatatccacaaacatgtgttataagatttgcagggcgtgttgatacagtcatatctgctgtccataaggataaacaaaaaataaaataagtaaaataaaataccttaatcagttaaaattatcctcagttggtttgcaattttacatcttttttccacatgttaactaccaaagtacatatttcctcacatttattagttaatgccaaaagagtatggttttggcaagaaaaagcaaactaagtttgggcaacaaaagatgtaaaaattgttgatctcaattttgagcataaaccaacattggggctcccaattatggtgcaatttttatcctagaattgcttggaaagttgtggtggttctctatataattttattgatgaaggctagacaacttcctcttgaaattgtttatcaaacacttcacaaaataaggtccaaaagtgtctacttttggatttaaaagagcaagtgagccaaaatttaaatgcatcaaatgcattgattgcctttgctaactattaggattaggtttgttagttagttgtaatcaagttacttaacggttgttaagtgagttgtaattgttttactctcttttcaacttgtaacttgagctatatattattaaaaactaatatggggtcaatattaaaggggtcaggtctgataatgctaaggaatttaaatttcccaccttgtttagttctcttggaattttacattactattcttgtgtacaatgacctcaacaaaattcagtgatcgagatgaagcaccaacatcttcttaatgttgctaaggaactttttttttaatcctatgtacctttagaatactagaatgagtgtattagcataggtaaacacaagactcattttgaagttcttaattctaagcctcctagctatgatcacttgaaagttttttattgtttggcctatgattctacactgcctacttctaggtctaagttctctcataggtctggctcttgtgtattcctaggctatcctattggcgtgaaggctaaaaaacttctagatctaaacattaataaactttctattcaagagatgttatatttcatgaccatgtgtttccttttgttactactgaatcattacaacctcagtatcataacatgtttcaattcctagatacataatctgatatttcatcttctactccacagatagaatctgatatttcgcctcttgcagctcccaattttatatcttagaattgtagaccagctagaacttttgttaatccctcattcttaaatcattatcattgttttttgtccactaacacctcttctttttgttcacaagcctcaatatttgtcattgcacgccctttatcttaagttcttgactactccaagttatctcgaatgttcaatgcaaccatattttccatttctagtcatatatatagattctactactttcaaccaagctcatggaatactagaatgggataatgccatggacaaaatgagacttgggatgttgtgactttaccacctgataaacatgttattagttgtaaatgagtttataagatcaaattcaatgatgatgggactattaaaaggtataagccgaggcttgtggctaaagggtataattaacaagagggcttggactatacatatacttttctccagtggtaaaattggttttttctggcattggcagctgtccatggatggtttttacaccaattagatgttaacaatgaatttctacatggagatctccatggggatgtgtttatgactatacctcaaggatatagtcctaagggggagaatctgccaccgaatgcagtatgcaagctcaagaagtctctttatggtttaaaacaagcatccagacaatggttcaaaaaattttcacatgccttggtagatgaaggtttcactcagtctgccattgatcattcattgtttattaaatattttaagacaagttttattattctactagtctatgttgatgatgtcatattggctagcaatgacttgcctcagttgcaagcacttaagactagtctaaacaccaaattcaagcttaaagactattctactttcttcgtcttgaaatagttagatccaacaaaaggatttttgtgtcacaaagacattatgctcttcaattacttgaattgactatttaggatgtaaacctgccaattcacctatagatgtaaacttaaaatcgtgtcatgatgataaagatacccttcagattcaactttgtacagaaaaataattagtaagttgtaatacttaaccatcactagacctgatatttcttactcatttaaaaaaaaaaaactgagtcagttcctagcttctccgcaaacaaaacatctacaagcagtgcaaagagtatttaaatacattaaaccctatcctggacaatggattttcatggttgttgcatcagatttgagttaaaggcctatacctactttgatttggcagcctatattgagacaaggagatccattaaaggtttctgcatatttcttggtagttctctaatatcttggaagaaaaaataacatactgtgccaatgtcatctgccgaagccaagtatagagcaatggtaaacactatttgtgaattggtgtggattttgtcactacttgaagaattaaagttggagcataaagagtttgcaatgatactatgacaataaagctattgaacatatagcatccaatccagcgtttcatgagagaacaaaatacattaagattgactatcgtcggattagagaaaaagtgtagaaaagaatgatcaaaacaactcatatctcaaccaaagatcagctagctgacatactaacaaaagctttattatttccatcacatttcaatatgcttaaaaataagattaaattagtagacatataccatttatcttgagggagagtattaggattaaatttgttagttaacaagttagttagagattgttaagtgagttgtaattgttgttctctcttgtcaagttgtaacttagttatatatatgtatgaggaatttgtggtgaaatctccttatgttttgattttaatatatttgactcccttatttttttctatggtggcaaaacccctctaagtttattttttaaaaaaaaaaatttaaggtgtcaattagatattaccgttaaatactaattagattactactgtatcgactttgagattttactgtttcatatacgtatatacagtggtcattcagttgatatttaacggtaatattaactgacatagtaattttttttaaaaagataaacttaagagagtttcgctataaaaaaactaagaaaattaagtgtataaaaattacaccatcagaaaattttgccacaaattgttctatatatgtaagactcatcacttttttttttttttttcaatttaattcaattaatgaattcaattcactttaccacttctcttactaaaactgacaaagaaaccagaactacaaatatctaagttaaatatccaaaaacacaaaaaccttcttaacaaaacccgactcgtggaaagtgagtgccaagtagtcatgaggtattgatcaatttcactgtttatgtagctaaaatttaaacccttttatatcgtttcctcataatttattccaataattacttggataattgatcatggtagattatttaatatacttatttttcttttttctctgaacctctgcttgtcacatataatagaggagaagaatatatttactttcttattgactgtaatatggacaattagtcctcttgttgcatgcatcagcactgttttgctcaattagaataaaagaatatattcctttaaaatttagtgagtacgtattagtcaatcctagtatggtatggcatcatatgccttaattgagttgaggtttactacttctctctccagacctattgtttgtttttgtcaagaaacaataggttttatctcaaaatcaaaatagagtagctcatatttttatacataactcaatattttgggataagttgagaattactttttttttttattactacattaatcaaatataattataaaataattttaattgataagtattatttttgataatcaaagtatcaaatataat

SEQ ID NO: 299392 - DNA, 2452 bp, Cannabis indica
caaaaaatctaggccatatatatatatactacacactacagatgatcatgataataatgttcatatatgtaatgtaatgtagtacattcctattccaccaacaagagaagaactaattaagtagagcctttgtgtggtttggttttttttttttttcctgtcttttccctattcatgcaatcaattccttctttagtctaatatttacttttacgaatagcttatatgttttggagcatatgtatatattctacactttagtcacgtggatcaatataaagatagataattgctgtaaagttatatatatagtgtgatcaatattttagagaattaactaaattatggattttaaattattcaaattaatttatcagatttgatgtttatttgcacaattgtaacatatagaatggtagtatccaaggtctaaccatttgcatgacaccctcatttaacattacaatgatgagtattaattgagttaaacgggcattggaatgctatcagacattttttaagtcgaggtgagggaggcttacctctaggggtcatttttttttggtagaattatatttggagcctttccattcagccaaaaattaaagtgttcatttgtaaagtttgtactacaacaaatataagatttagaggcagaaaggtgggtccgccgataataataaaggaatctgccggtaaagatttttggagacgagctccgcctgtaacaaaaaatcgctatgaactataattagtgatagtgaatctaacactattattaacacgggtgtccgtcctcatctaatacttctaaatttatttttcaatttaaattaatattaaatatatttcaaataaaaaatattaaataataaaataacaattaactgatttaaacataaaccaaatctgcattaaataaatatataatcacaatttagcaaaaaatgaagttaataattaattataataatattcattagacaaactaactaatactgatactatctaattaaataattacaatatatatcttagtttataaaataataaaaatttacataatagaccaaaagattgaaaaaatttataaaaatgtatcaacacgaaaaaaaatttcaattttactctttaaattttattatttacaaaaatacctcttcaataaaaataataaactgtttttttagttgtttgttagtttatttatggttgtattataattgtcataagattttttttggttgttttataattaatttatagttgtgtggggcatgatttcacctttgttttttagtttttttttttttttactttttgttcttaacaaaatgtatttttgtaattttgaaactttataataatattttataattaaaaattttatactgtaaaattgtaaataaaatataaaagaagaatattttttaaaaaaaattctttctataaaatgtataaaggaacataaaactgaaaatcatctaaaggtgagatctatcttaaaattaattctaagattgttgtcatatcatggtaggtaaaaattgttgctcttgttgctgcgaattattattaaatacttaaattaactatattataatttaaccaattcacgacaccaaaaattagatttactaacatttgaaaatgtcacttttagctagttttagtaacattaatagttttaataacacatctcaaaaaatagttttaataacatttgtgaaaaatataaattaatatacctatgtgggtataggtgaaaatgtcactatattctttttagtatcatttggaaaaatatcactaaaaataattaaatattaattttataataataaaatcgtatatatttaaattattttattaaataattattttgatataatgaactttttatttgttaataagaaaaaatataattagaaaatagaattttgtaatataaatttatagatattatcataagatgaaattatataaatacttttcattaatttatatcaataacagattaatacattacattaactcaaatttaatttctttcactgataaaaaaatatatatctttaagcacttatttaagcctattaaataacaatcatttgagttaatgtaatgtgtgaatatgtttgtgtgtatctctttagacacaacgacagttttggacctatacaatacaataattgacgataatttggacttatgcaataattgaccattattattaaagtgatatactggatgatttatgcacctgtttgggcttttcagtacgatcataatttttgcctcatagaatcgaaatgccaacattaattaattaaattaaatcttgttttttacaccatctccaatacataatataaattttactactacaaaaaagaaaattctcatccatcataaaatcgatttttttcaagaactaacactatatatatat

SEQ ID NO: 299393 - DNA, 1530 bp, Cannabis indica
aattgataagatgaaccaaaacatacacaaatgaactaaaaatgcttctgtttttttattgatgttaaataaaatggattacattgaattggatttttatttagggcataaaacccaacaagatcccccatgacaattcaagggcaagaaaaatcactcattgtcacacataactccttccagaaatccaaacgaagagatctacaaggaggggcataagtgaaacaactaatccactccggggcattcctctccataccaaaacgaactatgatcttatggaaatccgctgtaataacttgaagatcccatccacgtctccaaaataaggctaggccaccttaattacccaccgcagacacagcaatgccttccagaaaacccaatctttgccataaatcttccatatcctacgaatttttcttagtttccatgagaaagattacgtcggggttggcactccgaataatactttggagcgaattcactacctcgggtttgccaagccctcggcagttccacgagaggattaacatgtcaaattggggggcatgattcggcctgccttcttggccatggaaaaattctcattaaccaactcaatgcacttttcagaacttttagcagcaactgaaggtaattactcatggagatcacatacaaatttagaagagctttgtagtggtaggttgttagatacctcccccttatttcccagacacccaccatcttcgcatcccagtttaatatcttttttggaagaactcagtttttttgaaggttcagagcaaagtttctttaagcccccattaagctctcgagcactagtgggctcagaaattatttccaaagctgggtcatgaaggccctctaatcttcttttctttcctggcccagaagctccagaaacagaggcctttttacccacttcttcattagatttaatgataatcccacacccctttcggttgggccttgaatctttatgggccaattgggccctgggatccaacacaacattaaaaaccatagccaagtgagaaaccttactctcttccacgtcagcaatttcctttcctttttctccagaatttgaaaaaataatgggaccaccaaccttcatgtcagaagcaatacgtttgcccactactacgtccttctgtccttccatttcatgcacatagagacctttttcctgaggaccagaatgcccctgagccggaaccaccacatttttctcgacgagagttcccccagccgccgcttttatagcaagggtatctctatcaaccccctgagtcttctccccccttgtttacttgtctccgcctccaccaaggcttccatatgaatctcagtaccgattaaggccggttcaaaatcttccaccccagcacaaagattttgctccaccacctcttgggctctgatgtccgttacttcccgattgaacctttcttgtttatattgggcataatcagagaaacaatctttctttcgggacccaagccgctgttgggttttatgccc

SEQ ID NO: 299394 - DNA, 1540 bp, Cannabis indica
aataaccggattagcaatcctaagtataattaagtattaatgagaaattattttattatatgatttaacatgtgaaacaattatgatgtattgcattttaaaaccctattgatgtattaggggaattttcgtaatttaaaatgatatgggtaaagtcgtaattctattgtagattgtgcttatagactatattattatatattacgttaattctatctttctgtaggtgttttatgacaagtcgacacggtatagtcacaacaaggtattttgggtcgaattgggttcggggccaaaaatacatttttcagaatttagttatggcttcatatgttaaatgaggaaatctgaattatgtgatatatgcatatgagtggtaatggcaaagttgtcctttgatgtgaatatgctaataagtgtgccttaggggcaatttggtcctttgaccaaataatgcattattcaacaaaatttgatttaagcaaaattagaaaacattcttctaggttttgcttctcccaaacaacctttctctctcaccctctccatttggtatttcaaaataatttttgaaggaaaagcttggaatttgggatgtgactttgtgttagttgttgcttagagcttaaggaatttatggtaaagatttttaatctctttttcttatgttcattctgatatttgaagctttataatcgtgttcttggtgttcttgatatgtttggttgtggtgattgcatgtttatgaaaattgactaaatttttgtgaatatcgtatgattgtgttattatgtctttgattgattcaaccttgttgttttgggaggctttgaaatgttgtattgatgtctaaattcttgaaatttctttgaatttcttggttaagctttgaaactttgagtttcaaagtttgtgaacttatgtgcaattctgtttttgtgtggcatgcattgggtatgttctggctttgattttgagctttgttttaggattaaattcttgctaatgttggatacgatggtgtggaatacaacttgaggttagcaatggttttgctttagttttggtatgaaattggttgatttttgaagctatgaaaaatttgaaattttggggtttagggcccatcaccgcggctacggaatggctcgccgcgtcaaggctccaacaggttagaactactgtggcaagggcctttgtcgctgtggcgaggcccctattttctcggggttttagtttttctcattttctccataacttttgcctcagaactctgttttggacgttcttggtacgttggaaagctcgtttcatgttttttgtgttaatatgtaaatgggattcaaataaattatctatgtgaaaataaatatgggattaaacttatttgtagaatctcggaaatgtgttactaggattaccaacgcttgcctaggaacacccaaggagtttgaatcttcacatgcttggagtaccagataagacactaaactagcacatagagtttagcgtagtagttgtcatacccggtaaaaatata

SEQ ID NO: 299395 - DNA, 3063 bp, Cannabis indica
ttgtgtaatgactgatcattcttttgatacatatactgttgactgctcctaaatttgctgaaattgaatgttgggttcataactgtgtaatataatgaactagaaagttctagggtagaatatatggtgagattttcagtgcaagaatgtgcagaacatgatttggtaaaatcagtgacactgtaatagcctggtagatttgcattcttctatgccactaatgtgttggtgctcatggatttattcttgttttaatttgaacatgtttattggatggtgcagatagaaggaaataatggaaatgctggtgatgcaatcatgcttgactatgaaggttttgtgtctgaaacaaatgctacaaatattgtaaggtttatgcttaagtaataataaatatctgagtgtttgttttagtactttccagacaacatttgttaaattgtggaaagcattcccactgtggatagttatgattatgaatatcaaatgtatataattgtaatgcgaaaagtttggtcattaacttctggcaatccaattgttttggtgtgcagtttttagtgaagaaagcccgtatttcgacacctcatgctgattactgtcttcctggcattacccgtgctactgtaagctgttttaactttccatctgcagattgcattagcgtctccactgactgaggcttatttcatataatatttaataacaagagatgagtaggtcaagaatgttaagctatctatgtctaattttaatatttcacttatgaatgtcaataaaggtgctttaagtccacatagcaaaagtaaattttggtctggaatgatccattcattttcttggaggtgtaggttatggaccttgtagtgaaggaaaagtttgtgttagaggagcgcagaatcagtctttcagagttccatactgcagatgaggtatgcattcatcaatacttatacatacattatttatataaatgtacctacagataatttctatcaaacgagcattttacctcaagtatctacatatccctcttgttaactgctctttcaagtgtattaaattgagcaatgaccagaagtagaaagtaacatttttaagacataaaaatctcttgccagttgccatgaacaatgacatgtcttgaatattctaacctccggttcttcgagttcatatagagtgaatcactgaccaatatataatataggctggactgctgagattaaattatttgttgtctttgtgagaatattgttgctccttttcatccctctgtgttctgcaggtatggactacagggactatgggggaactcacaccggtaagtcccttattaatattccagacatttataaatgagtgttctcaccacaatttacaatacagcaatatatttagtgtgaagaaaatgaccatcgacattagtatgtacaaattaattgaagtagtatctatataaatatatgtagacaatacattataaactcaaaaacttcaaactatatttttgaaaatgtaattatgattcacattcttgtcatattgtattactagatgagatttgctattctttaagaaaaacatttcactattaccaggatcagataaggttgggattttctatttgcaccatttgattcagtgattttgaatagtgacaaagacaggttcctatagaggaaaacagcttagattcatttgtctttaaaatacgcagtttttttctcctgtttaaaccatgcaacaatttcttcctatcaatagaaataaaatcttaaagacttctggattacatttttcaggttgtgaagattgatgggcgtgtaattggagatgggaaagtggggcctgtgacccaacatactgctaagaagcttacaaaaagctgacagaagattcaggagtacccatcccaacataccaaaagacttaatagtcactgcttctaaaaggtgtgatttctacactggcgtgaaccatatcagttcgtcagttactgagaaatgtttccctattccattatctcctcagttgtgagattcataactggtaactctacactaacataacaaacttcgttgctagttatatagttttttgtcatctttattcaagtaatcctccatctttaccaataaaaatatgttttatttagcaggtttttctgctatcttaggtcttttgggccagtggtggagatgtgaatccaatgattcatagcctggagttagaatctaccactacggagaacgcctacagagacctgcaagtgtagtgatattcattgccatcatacatgaagcttcattgtgtaatcttttatcatttgtgtttgtttcagattattgttttgcactaaataaagactgttctttgagctttaagccaatccaagctaattgatctatgtcatttacactgtaacgtgtgggaaatgctagcaatgataaataaattcctttttttttttttttttttgaataagcaatgataaataaatctgataaatctgttttgcatccttttctttgttatagaatacttcgttcccaaaattttcaaaattaaaacctttacatgcaattttggtcattaatttagatgttcggtacaattaatctttgaactgaaattttgagaataaattcctttaaactatagttctgttgtaatttctactgttccatctactttaatttgttaagtaccaagatagatatacatgtggtagatttttattggtcagccttattataattattcaaataattaatttttcttgtaaaatataaaaataattagaaatcatcttaaatataaaaataaatgataataaactaaaataaaataagcttttttcataaatgtacaacaaaaataaaataattacaaaaagggctatttacaaaaatatgagaaaataattattttataaaccgggtggcagttaaatttctctgtggcagttaaatttcttctgtggcagtttaatttcttcttcaattttttctttttccttcaaagaaaattttatataatttttgagatgatgttatcttt

SEQ ID NO: 299396 - DNA, 2229 bp, Cannabis indica
tgagaaagatgaacaaccttagaagcgcgtgagagatgaagtaagaagagggaaagagagccctattaggtgtgtagaagggagagagagagagagcgagagagagagagaatagggttttagacttagagtgatttagaggcttagtgacttaggtttctaggctagggttaaggcctttatataggaggcctaaaccctatatagcagtttaaatcccgagatattttcataggttattagataattacaaaagactaaagtgtctctgagtctagatattatttagccattatgttcggcttttagggcccgattcccaacccatgacttgttgttcatattttgggttgtacatagagtctttccaatttaatcatggtcccccatagacctacaggggaggtctggctacccaatgcctgcaggatctagcaggacaaggcttgcaggatctggcaagacaaggccagcaggatctggtaggacaaggccgacaagatcttccaggacaaggcctgcaagatttggtaggacaaggcctacaggatctggcaggacaaggtatgcaggacccggcaggtcactatagctccaccaagagaaggccaacctttgagtgtggatgccatccttttacaatttgaggacagctttgtacaccatttccttgtagagatgaggttctcttggtcgaacaaaagctcccttgacccggaagtcacctcttggttggccagcttgtgcacaaatcctagccagcctataggctcactttggccatcctataggcttttctcgaccgactagggttattggtacaactccttgagggctcactacacttcatttggttgctgcttgacggttttgctatatcttgcatggagagtctattctgctactggcagggctatactccacctgtactctatctttggctaacgtagacatgccacgtcaggtggacaaaatttgggattacaactactgtcatctcagtccgacccgattcacttccaaaggcattaaatacatgtctaccttatttgtgctgaatgcttctcatccacccacgacaccaactagctgtttgacctaaagtctagccccaagaaaaataggtctagatacttctacttctcctagatcgaagagaagtggttgactggcaccacagatattgacgtgtccaagattggtggttttatggaggattattattttgtcaaggacatggggaccaattacataagcttccaacacattcttttgtacttttggcctcccttcacactagaacgtaggaagagggctcaagaaatactccaatttccctcagatgcttagaatatttctctcttagctactgaggccaatttcatcatgtataaactctacccgtctgatgatgaacaaggggccaagcaggtagcaggagagcctatgcctgcctaagaagaggaagttgtaaccaaacagaaggttccgaagaagaagaagaagcagaataaagctccctaaggtgaaacagtacctattaagcagcctatcaagatcagggatggtcttgaggagactgctcattcttctgtccaagtggtaggaaagggaaaatccattgtggtttagtggaagaagaagattcttctaatgaggatgttccttccttgcttgtttgggagggggccctgttcacgtgcagggtagtttattttgcacttgtttgattcatgctgtcctgacatctctattttacttatgtgcagttacatctcagagaatgatgcgtgcactaaagaagaggtcacgcgatgcctctggccaaaagtccccagcaaagcgtcccaaggtggatgatataccgccaaaaagcattgtccctactatggaggttcctaaggttgcagttttagactttgtcccaccaaccaagaagaattcgaagtctcaatccacgattatcccgtccaagggttctaaggggtgaacactgaagggcccaatctgcctaagcctctagccattcctcctgtgctaaatctagaaacaaagaaggggaaggagatgcttcaattctataaagatcgagtgcttccctaaatgaacgatcagttaatcgggggaggacatgtctgtagagcttcttatgggcggttgctgatggaatgcaccagagtaagtaattttcctttgattttcttttacatgtttttgttggaaattatt

SEQ ID NO: 299397 - DNA, 1478 bp, Cannabis indica
gcagtagagactctcaatgcatctgtttcaatatgcgtgattgatagttgtgattgtgatacccaattgagagcatggaagagagctttagcttccatttcatctgatcgaaaactaccttgaaccacttttgataaagcagccaccaccattccatcatgactccgaataatagcaccaatacccagcttttgttgatccgaattggaggctgcatccacatttaatttgaatccattgatgttaggaggcgtccatggagtgtgctggtgcatagtttgaggagtggaattctggtgtgtggaagatagctcggcagcagcagcagtagattgactactgaggtgcttggttctgctgtagtcacggtgaaatcccgtggtataggttatgattgaggaacttatacgagctttaccaccatgaaacacacggtttctatcagtccaaataccccacagcaaacagataaaaagttcaaagtcctcttgagtgtatactgctgaaaggtaatgcaggtagtctccattgaacatagattgtgctttattgaaatctatgatgaatttggactctttccaaatattcttagcatgagaacaaccaaaaagggcatgtcctattgattcccaacttgagttgcaaagagaacatgctgcagaatcaatgacttttcgtttaaaaagagcagcagctactggaagaatatgttgaattactttccaagcaaaaatccggattttgtggcaaagataaattccaaaagaatttccaccaatctcggtttgcatctgaagagaggactgcagctgatcttccaagtgagtagccaaatgaaatcccgacttaacattgtaagagcctgatgtagaatgatgccatattaacctatcctgagttgcaaagtaacttaaaggaatggataatattttttccacatcaattggttgaaaaaagtcattgagaagagtagaattccattctctattgtcatttattaatgcagaaactggcagctgtggagggccacaataactaactggccgaaaagagtcatgactaggaatccatggatccttgctacaatcaatgtgagaaccattacccactttaaatcttaaacctttgatgagtaattctcttccccaacatatactttgccaagtataagaaggagaatgaccaatactagcatccaaaaacgaagttgttgagaaatatctgtgtttgagtaaccggcttaacaatgaatctggcatgtcaaaaatcctccaagcttgtttagctaagagcgcttgattgaaatgtacgaaagagcggaaacccatacctccttcatgtttggacttacataaagacttccatcttttccaatggatcttggttccattttgattagtaccccaccaaaaatttgccatcatactctccagttggttgcaaaatttctttgttagcttaaagcaactcatagcata

SEQ ID NO: 299398 - DNA, 2530 bp, Cannabis indica
attcaccgcggagaatcatcgtagcttaaaatcgttaagagaatgttaaaatatgaatactattgttttttcatgtcagctaaaagcagctaccataaaaaggaaatgaaaaaaagaaggttataatttagtaccttttagtcaaacaacttaaattcaagagtattgctgttgagtacttatgcccaacacttataggtattactctatgattagttagcaatattttctaaaaatttattttcttaagttatataggacctcatacttaattataacaataataatattacaccgaaaaaggtgctaggtactaatagtattggttccttttagcaattctctaaattcagacattgtgtgagtctcttaaaagatcactgatgtgataacgaaagataaaaatagctaatcctttgtagtctatctgtagtattgctcaaggtgacaatttgttaattactgaccaataatacagtgacctcaattagcctagtttaggagctgttattacctataatgttagttaattacttgtaagcgtaatcaagtgttcgtagctcttaatacaactgaattagctttggataaacaactaatagagcaataaagaattcacttttagaagactttagtttcttgtgtgattgctctttatatctcgagtggattgcatggacttggatcgaatattgaaacttaagaactaaaatgtaataatagttaatgtaattaaaataatttagtgcaatgaaaaaatttattctgattatataatatcacaacagtaacttttgtagttcataaagatgatgatttttatttactatttagttacaaatcgactaatagttcggctaactatctaaaaaatgacagcttatatggtactggacacctataaagataagatttaactagtttatatgttcatatgttatatatatagttcttttgaaagaatgtttatatgttataattttcaggttcctggaatactgtttaccccaatttgtcctcattcactgtcgtttcgaccactgataatgccagagcatgtaaaaatacgtgtggaagtgccaagaaagagcagaagccatgcgtgggcatcattcgatgggaaggggaggatagagttaaagcttggggatgcacttgagattagtatggccccatggcctgttcccacagcttgtctagaaaactcaactaccgacttcttcaacagcatacatgaaggcctccattggaaccttaggaaagcccagaatttcgacggcccaactgatttgtaactacacattcacccttacctttcttcttaattattcttatttcttagagctagccttacttttcaatatgcaatacatttggtataagtggtcgtaatatataaattttagtgttatactaggagaataaaacatttgatagattttctttaattttgtgtcacttgcatatgtgggggcgggtggagttttcatagctagctctctaccttttctcattcaaaaatatattgaatatattttcatagctttattatatacttactttgagttcttacgcctaaaaatcatgttgaattaaaacctttactgtgtctaaacgcaaatcacaatatagaacatgtataaaaagccattgaaccttacatttacacgggtcaaagcgtttacttttcttttattaatgatgctttatcacaggaattaacggcgcagatgtcactagtgcctaatgtgttggagcaacagtacaactctcagcccatagatgaatcaaacaaaggctcaacatctgaaggattataatcactataccaatggttctcgggcatatatatataataaatatttttatacgtgagtcaagtgattcattattttatctttttgttggcaaggtcaactgtcattcgttaattactcttcaatgtattttcagcgagtacgtataaagtatgaagtgtaatatgtgatttcccattatttaatactcttcaatatagtaatatgctttgtaaaattaaatgtatttttattaagtaattagtattttttttttccctactttaacatgtaccaaatcatgccctaaacttttaaggtcgttaaaaatacccctgaactattgagattgttgaatttaagtatttttgtctaattttagtatacaaaatctaacatggatgaaagttcaggggcataatttagtacatattaaagttcgaggggcatgatttagtagatatcaaagtctgggagcatagtttagtacataaacaatcactaaaatagtaaaattgaatgaaattagacaaacgtctttaaatctaacaatctcaataattcagggggaatttttaacggccaaaaaagttcagggaacatgatttggtacatgtcaaagttcgagaggaaaaaatcctaattagcctaaatacatatgagcccacattagagattttaatccaacaatttcccacttgggctacatatattttctgatagtgtgtaacctt

SEQ ID NO: 299399 - DNA, 2200 bp, Cannabis indica
aagtactaattccaatacgttccaatagcttcaatatatatctaatgactatctaccaggaaattacacttggcatgattgaactttgtctatttttgtatggcgttttattgttttatgtttgctatattgttataaatatttttctaaatcacctatttaatattttaaagcttctttctttttgtttgaaacatttagtagaaatgtattgtattcaagaaattggtttttcatcaagaaattgggtttttcatcaaaaaactaattttggattgtatataagtaaaatttatacatgaatttttaagatttttttgatattttttcttatctatgatggtttcatcaaaaaccgattttttatcaagaaatttgtttttttttaacaagaaattagtttcttcaccagaaaattatatgagcttttacgtttttttttatagtatttcttttttatggatgatgatatattaagtttttttaaaatgttatatttggtgtaattaagtttgcatgccatatacactagaacttctatctaagaatactctattcaagaataacttctaatttttttataaaaaaatcaagtccaaatttgggccaattataaataaaaataacctctaaactataattaattatacatttttaaagtcacgtattaacacattttcatatacatttttcattaacaaagaatgcaccaaaattatgatgaaatcttgttttaaataaactaacttttcgttgttgcgtgtagctttattaagatcaatcttgatgttgttgatccccaagatttttcctctacgtacaaagtatctattcgatcaataactacacaatgaaaagcaagtataaacacatctaataaaggaaaaacttgtgaaaagcttttggcccttgcatggggagtctcttgtgaaaagcttttggcccttgcgtgggtctagtctcttagtggactggttattgatcttatttcctcttctcggttagaacatttggaggtatttcttttctgactgcatcttggcgctcctgtttttattggtgttgtgtctctgcgttgttccaacaatggttgtagttgaggagtttgctgaggttacgctgggagtggattcggtcaatcctagagcaacgaaacttttggaaagggaccgtgaacttaaaattgagatgatggagctgtttgaagatctttctctggaggatattgtggtcaacaaagcttgtgtgggtaaagtgatgggttgtaaaaccatgccagcttcggttgttaggaagatactactgggcatttggaatctggaacagaattggaggatgaagaagtttgaagagggagtgctgagtttcttctctgaatcggaggaggactgcactagggtcatgaatcgcagactgtggttagttaacgatgtccttctgaacctcaagttgtggcctgttgagggggaggttcatatgtcggaattcgatatcgcccgtttttgggttgagtttcacgggttacccacgagatgtctctcggaaaccaacattcccattcaagcaaaaaaggttggccaacttgtgaagtctgatgccaagcaaaaggaggaggttgttcatcggggatttcctaaatgctggactgatgtttggatttgtcacccgttccctgcggtttttttttctaaaggcggatgcaacactagagtcctgggttcaattcaaatacgaaaagctaccgtatctttgcttcaagtgtggcaagttagctcgttcaagcagggagtgtgtcccgcccacggcctgggttactccagcccaagggtcttcggtgagaatgtatgggccatggctcaaggttgaaggagcgactgggaactgttttacaactgcctcttttcgacgagaactcattctttgtaatgaaggcataaatctgaagggagggagtaccaaaaacaagggcattggaggagattttctgaaggctgccggaaccaggggtgggaccttcgtcggagaggagtaacgaggaaggacaagtggcatcccataacacagttgattatatcgtacatgttgggttttgtgccctaaataaaaccccttacaatctgattagttatcaatctaagtaatttgaagtgattcatgtttgcatgaatttttttatgcttatggtttaatatttttaata

SEQ ID NO: 299400 - DNA, 1158 bp, Cannabis indica
ttaactaaaaaagtttcttcaaagaaagtttcaagtcttgtcttttgacatgttaagaaagtttctggtatagtgccgcaagtttttttgttgtttttgttttcttttgagagtgatctgctttgttaagagagatggcttcgagtagtcatccagagagtgagtttgtggatagatatgctcagttacaactggaagaggaagaggaaggtgttctaatagctgttgatcaagaagaagagtgtcaagcttttgatgatagatggtgtctagtgggaaaattccttactggtcgatcaatcgattttgatgcaatgagacatatgatggcatccttatggcaaccgggaagaggtgtgtacatcaaggagttggatactaatagatatctctttcagttctaccatgagattgatattcaaactgttactgatgggagtccgtggacgttcaatcgtattcaattagtcttccatagacttcaaaggggggaagatcctcgaatggtaaaattgcataagctggacatgtgggttcaattacatgatctgaagtatgggtttatgtctgaatgggtggtaaaacatgttgggaattatattgggacatttgtcaagtctgatccaaagaactttgtgggaatatgacgcgactaccttcgagttcgggtcactattgatattgaaaaaccattgaagaggcgtaagaaactggtgaaacaagatggtgcgtggatttggacaacgtttaagtatgaacatgtacctacattttgctttatatgtgggctcattggacatcctgataagttctgtcctagaagatttgatcaaaattttgatgcttcaattcaattatatggcgaatggatgaaagctccaaccagaaagaaaaattatctgatcggagctcagtggctgaaaacgggaagggaagaagatgagggggctattgatggtggcgatcgtgatcggagtagagtggcaaatacgatagttaatactatccctgtaattggggctgatgggaagcatcatggagtgattcatggaggacagagggaggacaggggcaaaggaaaatctcctaaggagaaattgtggaggtcaatgattctcataataatgatggtgatttaattgtggaaggaaggtcaga

SEQ ID NO: 299401 - DNA, 3576 bp, Cannabis indica
atatgtagttagttagattatatatatatatatatatatttatataagcatctaatgataatgataattagtattagggccgttccagagtgagttaaattttgaaacttactaagtaccaacaattcttatagtgtttccttgtgtttgttcttggccaaacatccttgccatgccaaaatctgatactttaggagacatatttctatctagtaatatgttgctagccttcaaatctctatgtatcacttttagccgagaatcttcatgcaaatatagaactcctctagcaatgccttcgattatgttgcatcttattgaccaattcaactgggactgtttcttggggtctgcatgaggaaatatgttgaaaacatggacaaatgagtagtagagtagtaatattaattacatatagattccatccaaatagtataattaatgtgtgtagctgtactaaccaaataaaaaataaatcaagacttttgttgtgaacgtattcatagacaagtatcttctcatctccttccaagcaaaatcccaaaagccttacaagatttttgtgctggagcttggctaccagcacgacctcattcttaaactctgctgcaccttgtcctgagcttttggacagtctcttcacagctatttctcgtccatctaaaagcactccctttaaaaaaaagaaaagtaaaaaacatgcttgactaagggcaatatctaagtgttttcctcacaatagttttgagtttttcattttattctcaattttcatctaaaatctgtttcagtacactagtgcataccttgtaaacatcaccaaatccacctttacctagcatattatcatcagaaaaattgcttgttgcagtttcaatgctcttaaaattgaactgcaaggactcgacatcatttgttaagtcattcgctgcagtagttcaaccaaaagaaaattatgaaaaaaaaatgagaaatggtagagagtattaattagtactttgtaatgtgtaatattattatttgggtaattaaatatccaatctcaaatattttactttaattaaaagtataaagaactactaatcaagcatctcgtccaccctgtagcactgctaaaaaaaatagagtacaaatacagagccgattaaaataataataaattagtgcaatagtacacttggcaaattaccgttatcttgggttactatagtattataattatttcttgctctcatgcgatggacatagcagcaaatgacaagtagaaaggtggcaacaacaactgggaccacaacggaaattacaatcactaccgatgatgttttggtctttcctgcgcacatacataataatagccacaatttcactattttgtatatggtaaactatttaggcgagatttcgtcaatgataaatatcaaagatttaattattaacgcaataacaagggttaatgttgctcactaagaatttaattgcaaagctcaggttctttttaaagtcacaaagtgacaagtttaatttctgtttaaagttacaaattgacagcatttcggctttactcaaattgagctgtgtgctacaaaactctatttatatgtggttgtggatgcttagggctctttatttaataaagagagctaatgacattatttttccaaaacgcacgttaaatacataatttacatgaaagaaagctagagatcacgtgatgagtgagtttttaaaaacaggcactaaatttttcatacccagcaagcaaccctgagtagccatgtctaggactgatatgggttctaacttctaagtacccgagccgctagtctcagactaaataatttcattgctgatcatatttttataaaacgaaaaatgtcttatttttatagaacaaataaaattaattatgaaaaaaaaaaaactaccatttgaactcgatgtgaaacttggaggcagcgacggttgtggtgtgggtggcggtggcggtggcggggttgctgagttttgattgtaaaagcgatagagttcgtacctaacattacaactaggaaacataactcttcccccaagttttccagagcagcatctatgaaggcctttgatggcatcagtaagacatctaccgcaacttgaggcgttcaggtccggcgtacactgcacgagggagtacaaactgttcaatccatcaacgtcgaattctttagtcgcgaactttttatccccttgccggcctcttgctgcctcagtcgctgccagctggatggccccgaccagtaagttgaaccggtctatgtcagtactaatggtagtggggttcaaataatagtttctcgggctttcatatacggtgccgaagaacaagcggttggagtagcgcaattggcactcctcgtaccatatcatggtctccttctgcacagggcaccgcttgacgacgtcttcaacggcgaacgtcacgtagtcatgacaggcggtggtattgacgtctccgcgacaaaggaagctaccgtagacgggggaggaggagctttcaccggcgctggtgttatgggattcgctggaggcattggatgaaagggatgagaggaggtttctgagattaatttggtagacactgttaggtgtgtaagtggtggagttagtgcagatgtggtagatgtaagttgggacaatagctccaacgttaagcccaatcgatataattagtatcgacgaagccaacaaaagggcatttgggaattttgtggaaattagcataattattttgttttagctatctgtgcttctgataagctcacaaaagatgagtgggtagttgatgatcatttttctttcatatgatttggtcagcaatataataactcctaaggagatcgatgagggtttatctctgttacaagatttgtaaaagtgagcgtagaacagcagataatgtttgcccaggcgagggaattattggttacgagaattaatgaatcaatgaaagcatggccaagtcaagtcaactgatcatcgtgaattcgtatcgtttctacactgtacagctctcacacaggaaaaataatcttcgtaggtggtcctcatcccgacaagcaggggcggatgtacacatgggttaaagtggccgtggcccccttattttttaaaaatcatactgatatataattacaactacaaacaataaaaaaaaatactttgaaaagtcaaaagcaaaatcaatatataaaacacaaaatgataaatttgacaaattatttacatttttaatgccacatgtcattttttacttttatacaatttaactttttcatttatacctttttaaattttgttaattacaattatacgaaacctctttttcctctatcttttacttcatccctatcttcaattgcagaaaactcatctccaagtcccttgctgtcaataagattgacctcctcctcctcctcatccctcaatggccgcacaaagtccatctccctccccatatcgttcatctccattctcatttgcttctattaatttgtaagttatttttttttttgtttaattttcataaatatattattaatt

SEQ ID NO: 299402 - DNA, 4981 bp, Cannabis indica
tttgatgtgggactcttaacaatttattataatcattattttttattagtttcttcattctgaaaaaaaaaacatttctttgtccaacataaataatttcaattgtatatcttacatattttatattaattatttgctcatcttgtttaaacacaggtattggtagtttcaggagaaacaggttgtggcaaaacaacacaacttcctcaattcattctagaagaggagatatcatgtctgcgtggtgcagattgtaatatagtttgcactcaacctcgccgtatatctgctatttctgtttctgctcgtatatcctcggaaagaggagaaagtcttggtgaaagtgttggctatcagatccggcttgaatctaagcgttcatcccaaacacgactcttattttgcacaactggagtattacttcgccaattggtaattcaatctcatgtcaatttctctgtacagtttccttggatctcttttccttttctcacagttggtgcttgagtctgtttcatgaacttcaaattacttatgtgcgtaattttttcatctggcctaaaacatcaagaataacaattgttttttggatttcttaaaatgaaatacttgtgttatgtgacatggaaactgatatatgctaatcacatggggaagatgggggtgtaccacccttaaacacattacagttagcacaacaaaatttaggaataatactccaaaagcaccatcctctgggtttgtcttttacatgtttttataaaaagtttagcctcatagtaatttacagaatctttttgtgtctgcttcttccctggtttgttatattcactaattgctgccgttattcatgcaggtccaggatccactattaaccggtgttagccacttgcttgttgatgaaatccatgaaagaggcatgaatgaggactttttactaataattttgcgtgatcttcttcctcgccgcccagatttacgtcttattctaatgagtgcaacgatcaatgctgacttgttctctaactactttggaaatgccccaaccatacatataccagtatattatctttctcttgaagaatacatattgatgttcttctaggctgattgttaattttgcatattttctttattatttgcagggctttacttttcctgtaaccgacttatttcttgaagacgttttagagaaaactcactatagtataaagtcagagtctggtaacttcgatggaaattcaagaagaagaagacaaaaagattccaagaaggacccgttaactgaactatttgaggcaatctctcgttccatttttatcttaacaaatttaatgatggctggaatttccttaatttcttacaataataattttgttgctgtatggaagctgatgatactaggcagtttttttttttttccaaaaaatattaaacttacaaataattggtctatgattgcaggaagttaatattgattctcaatacagaacttatagcacatctacaagaaagtctcttgaagcgtggtctggttcacaacttgatttgggtctggtaacatgctttctatgaacccaactttacttttgttgttctaaagtctagcgagtttgcttcatttttggttcatatatgttttccaatttgagtttccttttctttgaggctttttttaagccttgaacagggtagagcaattgtaatgtgtgaaatactgaaagctatatcaaattgtttaagttttaattttggaggttaaacaaatcaccagtagtttattttatgtaggtagaagcaagtattgaacatatatgtcgccatgaaggtcctggtgcgattcttgtattccttacgggatgggatgacatttctaagctacttgacaaagttaagggaaacagattccttggagatccaagcaaatttatggttcttcccttacatggatctatgcctactatcaatcaacgggaaatatttgatcgtccaccccctaacaaaaggcaagcatatgaaagcaattaattatgttaaaaagttccttacggtattctttctctttcaactttactcagttgaaatagtgagtggctagaggcaagaaagatgaaggaaataaaatactttcttaatctgaagatttaatcatcctgctacaatcacttcgatatcagatggattttgcaactgcatttctttttatttgtgctcaaattctaaatttgcctgtatctgtcttgtagaaaaattgtgctggcaacaaatattgctgagagcagtatcaccatagatgatgttgtgtatgtgatagactgtggcaaggcaaaggaaactagttatgatgctcttaacaaactggcatgtcttttaccttcgtggatttcaaaagcttcagcacatcaggtattttatgagataagaatccagactgccaatcacttttttatccttcccacaataatgtatttgtatatacttttcttttcttttgagatgattttagagaagagggcgtgctggacgtgtgcaacccggggtttgttataaattgtacccaaaaattatacacgatgaaatgcttcagtatcagttgcctgaaattctccgaacacctctgcaagagttgtgcctccagattaaaagcttgcagcttggaactgctggatcatttcttgcaaaggcacttcagccaccagattcccttgccgtccaaaatgcaattgaacttcttaaaactataggagctttagatgatagggaggagcttactccacttggtatatatacaccacaagttttaacctttttcttcctctactaatttcatctttagggtgctgatcacaatggcatattttcacttacaggtcgccatctttgcactctgccgttggacccaaacattgggaagatgctattgatggggtctatctttcaatgcctgaatcctgccttaacaattgctgctgctcttgctcatcgtgatccgtttgtcatgcccatagagaggaaagaggaagctgatgctgcaaaaaggtcctttgccggtgattcttgcaggttaggtcattcagctgagtcacactcccctttctgataaatgacagtacgtatggacatacttgagtttttgaacctttcagttatttaaatcttcacactgttgttgcagtgaccacatagcactcctcaaagcttttgaaggatggaaagaagcaaagcgtaacggaaatgatagagcattctgttgggagaactttttatctccggtaactttgcagatgatggaggatatgagaatgcagtttctagatctgttggcgggtattggctttgtggacaaatccaggggtcctgctgtaagcatttagtctctttaacctgactttggctctgaattttcctgtcgagtgactgaatttttatgcctatctgtatgaaaatcgcatgctatgttttacgtgcttgtaggcatacaaccagtatggtcaggatttggagatggtttgtgcaattctttgcgcagggatgtacccaaatgttgtccagtgcaaaagaagaggaaaacggagtgcgttttacaccaaagaagtggggaaagtcgatatccaccctgcatctgtcaacgcggcagttcatctcttccctctcccttacatggtttacagtgagaaagtgaaaacaaccagcattttcatccgggactcaacaaatatatcagattacgccttactcctgtttggcggtaacctaattcctagtaaaacaggtgaaggtatcgaaatgctcgacggttatctccatttctctgcatcaaagagtgttctagacttaattcgggtaaatgtggctcccaaattcttgctgtaaatttacagatgccccatctgttttgattgttcatcaattaatgcagcagtgtctaataaagttttgtcttttgttttgcagaagttacgcggggagcttgacaagcttctaaacaggaagatcgaagaaccggggtttgacatctccagagagggaaagggagtagtcacagctgcagtagagttattgcacagtcataacataagatactaaatgtttatttatttattttggttcttgtgactcagcagtcttttaggaactctctactttgtttcctttatattctgtcatttttagtcccctcctagtaataagtgcattttttgaataataatttacagttaaattttcggctttaggtgtgtaatttagttggtgtaagtgcagaaaaagagatttttttaatacatatctgggtgatgcaatttcaccttagaagcctttctctcgtcatgtttgagctagctaatatggaaattgaaatctcaaatcttcattagtaatcattagtacactgtacatttatgtttaaatgtacaaaatggcaaagcttttcctcaaccataaatatatatattaaaataaataaactgaagctacatattagtttccatccctagtgttaaaaaaagaaaatacaaaacgtaagaattaacttaaaatacattcgtatgtgacaaaaaacaatgaatattctcgccaatataaggttctaaaatttggatcatttctcgttatatataattcaactctttgcttatattatatcagtaataacaaaatgtataggcaagtaactttgaagtgtatatgataaataccatgatgaaattccattataaatatcaaattcccactttctgatggtgataggattctggatatctaattgtttgtttatatggcatttataaatggtttgctaatattttgttgcgtcatcattctgctatggtgcttaatataatatggtatttgtttcgtttgtttccttttgaatcgacattcccacaatattgcactgcaaataagattttgattatattatttaatatataaatatctttatatattaaaagtgcctatctaacggcatttcttggtt

SEQ ID NO: 299403 - DNA, 1411 bp, Cannabis indica
gtaatgggttttatttagggcataaaacccaacacatacgacatatacaaagggttttccccatctgaggaggaatcgggagacatgaaactggatcaactagaaatgtcctctgctagtggagcaggataactggaatcgaataaaccaatgacctcttttagaagaacaagtgtaactttggaaaagtacctgtagaaagctttcggatacaatttgtgaaagggtgtctggaaacgataagggtcgcaaaaactaacccacattgcacactttagacatgctcccaagaaaataggcatcttgttccttttgttagagcacaaagaggctcacgaaaaaaaaggaaggagccttttttccaaacgcccatttatactaacattctctttcacgaggccttcagcacccatacaaacgtcactatccactatgtctccctgtacaggtgatggttatatgttgtttgggcctcacctaccaggcccataatgttaatattttattgtatttaccctatcactagactttaaacgtgataacagctgtaaacgggcctaagccagcctaggttcctgacccgctacctataaatatgatagaaaccctccatgcagaggggtggaatttttggagttagaaactcatacaaagagtagaaaatactccatagcttaagctttataatcttgactcatggattaaggcttgttaatgtccaaaccacgtaaaatctcatcctatttattccttaaacacatttctttagctcaatcttcttttaatttgatttccaaaaaatgcggtaacatacaccaaacttcatatttacccagttataaagattctattatagagttaaggcttgatagtgctattgagagaatccattttgacttaaaaatatcaaagattctttattaattacaaatatctttattgagctctttcgtaaagtttagttcaagaatatattcacatgataaatcagaggtcatatcttgtatatcaaagaagatttactttctccagtgtttgctatttattaaaaacttattgatgaaggtaaattttactcctaatttacaccatatatacatggctagcttactttctccagtccacactattcaagatggtacgaagacctttgtggaagattgtgaagaaatcgttgcatgtttcttattaacggaaaagaagattcaagttcattacttggtgatactctactatagaaagaatttaagggttagagtattaaacagaaggagccatttattctgctgcgtttctagtgtaaggaaattctaaactagttatgtgtttaatttaatcgttttagaaatattttcaggttgttgatcaacatacatgatagtaaattagatcctggtaaaataaattccaa

SEQ ID NO: 299404 - DNA, 6385 bp, Cannabis indica
aaaaaaaaaaaaaaggcaaaagccaaccagaaatacaaaatcttaagtgaaaataagatgttccacaccaccctagcatcaatcaaagaatctagccgatccataagaagattgaacgaacacttatcatgccagcatagaactttttaagcagaaatatcatcaaccaatactttacaatccgaaaaagaagaatagaactttaacgggcacccaagaagcagaaagaagctgcatgaagaaaaataatgatttctcctttaatgatagtataaaacttcattaaatagctaaatatgctattacaatggaacagaaaacattaggaatgatactcttagtgaaactacgatcttaccaataataagagtcatgagccaaacagtgaacagtttgttaacaaatcgtttaacatcgtaaacaagatgacatatcaacaaaactgtgtaaagcttgtatggtaacaaaacaatccatgtcaacgaaacattattaacttttatccaatttaaggccttgatgttaaagtttttcaatttttattataaggtttcaatatttataccctatatcacccaaacaaagagaataaataatagaactgaaacacaacaaggatataaatatttgaatccacccaaaaaagaagtttacaattaaggtaattaatttccaatatataaatattattcatgtaataaattgtataaatattgatacaacatgtttagtcctttctagttgactaaactctaatctcagcctattttaattaatagagttacaataatcacatcagacaacaatctacaaatcttgtgctatataactttatatatttatatatatagttggtgaaactacaataagatgaaagtgaaagaatggtcaattgggtcaaaaacaccataaaattagttttagttctaagaacaccctcatcatcagtcttctgaggctataacaacaaaaacatcatcatgggaccattttcttggttttgatttctctgatggattaattatagcacattctgtgttagcaaggcgataaccgataacgatttcacacctttgtcgcgctctaatcatgatttcgtaaaagcaaagttcttcttgatcgaataagtagaattctgctggttttatacacatttcgtttccctgcataatagaatccaacaacaagtaagttatagatgttagattctttatttgcgcttaaattaacttttattgttttattaaaatatggattgattagataatttggacttaaagttagttaaaagagaagtgtggattttttagtttactgaaacctttgatgaacaaatcagtctaactacagttatgtacctaagtttcttcctaactttacatatacatattgtctcatcgcgacttttaataatcaagtaaagaaaactgtttttaatttagaaatctagagagaaagacttattgtactatttgagtaccagaagaagaaaatgatacctgctctgcgaaaagttcctcgagtactcgattgatttgcttgtcttcagcaaccattgctagcgccatacttacgagctcatttgacaatacataatcgctgattctcgacactgatactagatttctagtcctagagtccaaaatttcgctaatgattattgatttgtgtgaagcttgctgcatttcgcggatccaagagctgtgtgagaacccggcaaacctccaagatgttgactttgtatccttgcttggaagacgctttgactgaaatcgtgaacagaaagtgcagctttaacattaagttccttttttctcaacaatgatcatattttcggggagttgggtcaaagcagttttacctggatatcgcgaatgaggagaagagtggcaagagatctcgaatcagactgcacaacagagtcctctaatgactcatctgcaagaattaaaatctgtccatttagagttagtattcaattcaataataatttcaacactaatcatcattaagcacatcaaaatatcaaactcaatcagtataatacgtacagaatcaaaagtttcaagaggaagattctctaaatgccgtttgatcacagcatttccctcgcgatgaacaagtttcaagttcaccaatccagcaatgtcgagccctccatcggtaagcttcctctctcgatctttctcgggaacttcattaaacatccaaagttctgattccggtggcaaaaatgcctcaagaacctgcaatgtggaattatgtaaagattttaaggctcgtttggtacgatatatctggtcgtattatatttttatataatactatgttaaattttaattataagcgacttaccataatcatatcatcgatatcacgacgccaaccacaaaacagtatcttctcaggatatttcgggggatcaaaaatttttggacaagaacccctacgaacctgaaaataacacaaactcattagaaataaacagaaataactgtcaagtggggttgagaagaaaaaagttacctcaggaatggaacctggagaatatgtatcgtcatcttcggctataacaaggatttcatccccctctccaagaacatagttatcatctggattcaaaattatcttcccaccttcagaagcaaccttaactccacatggaactgcctctggaaatgaaagtaacacatcttcaaagcgaagaccatcgagttgaggccaccttttgatataaaactcggcattctcaaaccccaaaatgtcctcccatatctaatcgaaaaaaaaatgaaattagaaactgaaaaaactgaaattggaataaggtgaataaggttccatctcaaaaccaattagcaatggtaggaatagtccattcatcttatatattctattatctttccatatattatcaatgcgggactctctaacaagtcaagttttaagtttgaacttaatcgaacctgtgcaagaccgggttgcaaagcacattggatcatcaagcgtccaatcacatcatgagcaacaactgtttcgatgagttctcctccaacgagtttcaccaaaggctcgttatcaaggtcactcaattccacaacaacatggccccttaaaccttctttcactcctgtaaggctgagcacaacccgcaaagcacgagcatcgctctggaaacaaaaaacacaaaacgtaaatagcttgtccacaatgatgacttactgaaaagcataacagcatcaaaaattggggcaataacctgatcagcattttcattggatgctagaacaatgatagcccgtgctttcgaaactgaaacctgcgaacggcacatcactgaaatttaagtacaaaatctcacaattgagagagagttgggcaagtaaagcaggtataaagtgtaagcaccttttttagatcagccagtataagaggactaccacttctgcatataacagaagtccccataaaatcgaattcgagctttgatatatccatctccatttcttccttgtctctttcagcaagtacaaccactacaccaccaccaatgctcttgtttgctatggctagttgtttcaaaagtgaaccctacaacaaaagtatagctactcaagactttatttcgaattcaatgtttaaatcgcgagaatgataaaggtgacaaaacaaaacatgtcaaaagattaagcaaacgtttggttggaaggaaagaaaacacatgaatcaaacgcaacctaagaattccttatatgtatgtgtgaaggatgagttgaagcttaacaaaccaatgacaagagaaattactaaaagacatgaaatttgaaggtattagaagaagctaccaaccagtttgtcactccatccaagaatgagtatatgattcctttcaatgacttcactcttccctttccttaacgaatccaccttctccgatatggcatctgaaacaagcccgagcatcatcgcaaatataagcatacctcccgaacttatcgagactgaaacaattctcggtccaatgccttcagtatcggcatgatttccagaatcagctacaaaagtccatgaaagccaaagagcttcagcaaagctattggtattaacagcatacaatgccaatccaccaaacccaataaggaacatagttgcaaatagaagagcaagcagcttggcataaggatagactgagaaacaaacatcaacagtgtaagcaattctcttcttcaaaggaacttcttccttgtttttcttagtccttttcgagaaattcattatatgaggaagataatcaaggtatttgcacaacaagaatggcattactagtgtgattagaacagaatacaatgcaacacttctatcttcagcattgccataatccaaaataccaatttcatcattctcttcactctgcatattattcttggtgctttcataactatgactatctctattactacaattcctacgtagagaagcattctcagcctgaaaacccaacaaaatatacaaagttcatatctatacaattacaaatctaaacgaaattaaacaacagatccaaatgaaattgatatatgattaccttaagttgctcaactcttccatggagatgtactgaatatactccaaatatcacgataatagcaaaaggcaactacacatagtacttacatccatcagtatcaaaactgtattatgcaaaatgttagaattttatgcgctaaataaaattctcaatataatctttttaacttatgatatagaaatcaattttatattatctagttcacatcatttttcgcgattatagttttaatatgtaaattctattaaatcctgaacttatggataattatgactattgcgttgtctacacagttaaaaaaaaatcatgattatatgcttcaaacatttagtcttatgacttatcagtgcattgaatttatactaacgtgataatcaatggtaggatttgcttacacttagattagtggaatgtctttttcaaggcattagtaaagtaaactagcatcggatgtattggctatatatcagattggactgatattcacagcagaaaagatatcgtaaacttaccgtaatatattttctaagtaaataaatatcacttagttaatcttaaattaaagatctttatcctgagatggttaggttttggcttaactgtactgcatgtgttccttgacttgttcgttataagcttatcagagaatcaactcaatacttacatcttggaaacatagtagtgtaattaagtgggagcgctaatcatagaaatagaatttatagcttctataaatacttagaagtaaaatgataatttccttaaagtttttggctaacagacataaatggaagagctcttattttagtaattctcttattttagtaattatattaattcattaaaatatcatttataagaaactaagtgttttaaggaaaaaatacattgaaggataaaacggtaattttagtccctattcaatgtaaaccatttatgaaagatcattgattatttaaattaaaacaatagataacttatagcgtatttattcttagtaagtgttttaaggaaaaaatacattgaaggataaaacggtaattttagtccctattcaatgtaaatcatttatgaaggatcattgattatttaaattaaaacaatagataacttatagcgtatttattcttagtaaatagagcgttctatgtaatcaaaagtgcaattccaaatctacagtggaattagaaggaattaataagataaaaaatttactcgataaattctagaactacttattgggaacttgattatataagtctatggtccctacacttgctgagttaatattgttttgcagtctcaattaactgattttaattaattaattaaaattctaagtaagactatgttttatttatgagttttactaaggaaggacatatttgagaagaaactaaaatctaggatttatttgttaattaagagagcttgtaaggtctaattaataaatatgataaatattaattttatttaataattaaataaaattagcatttaaacaattagaatagaaaaatagtatttttagaaaaaaaaaaaaagtatcattaagaaaacaataaaatggcaaaatttaaacttgtgggcctccatatcaattttgaccatttaagtttattaagccattttttttttatttttttaatccattttaattctaaacctaaccctagacctacactataaatataaggttaattagcaattttttcccctgaactttgacatataccaaatcatgccccctgaattttttttggccgttaaaaattctcactgaactattgagattgt

SEQ ID NO: 299405 - DNA, 3738 bp, Cannabis indica
acttataaaaactaagacaaaagaagcataccatttagatatcacaagagaaataataataataataataaaaataaattaaaaaaaaaaagagcaatctgaagctccaaccccaaggccaagttttggttgaccttcgaagtcgaacaaaaagaactagcatgaagtgaaaaatatcgactctgaggtcataacctgccaagactgggtgtttgaggcaagcctagttggggttactatatccgataaactagaaagaaatgctacctcggaatggacaacaggtgacatttcacatgtgatttcttgttaaatgtttgttactatactaaatataaacaatcaagtgttaaaagtaatactttagtcaaaaattatgactacattcaatattctcaactgcaagtctagatctatcttaattataggtttaatagtaatacattatttaatctagcagaaggaaaaactagatctcatagtaaacataatttattagtggacaagttgacacaacaactcttatttgacagagcaaaggagaagaaaagtcaagtaatgaaaacaaaaagagggaacgacacatatcttacataatgctagagtaacctacttattaacgtcgttttcctcttcaacaacataacgttctcaatctaaatttgaaaagagaaaaaagagcaacatcttcgatataagttgaaaatggcaaaataaggctcctgggcctattattctcttgaccgcgtgcttaagcaacagtggtgaagttttaaagaccaacactggggccagagaagttgcatagactatttagtcaaaccaagttacttctataaaatcaaggctccatgtgattgcaattgctgattcgatgacttgcaatgggaggaaccgcacttatcatcatgctttgaataaaggctatcatctacacagttaagagttcatttcaaatgcccagctaaatgataatgtaaactcaaataaagagaaaacctatctaagataatccaagttatcaatgttaattaaaaaaaacatcttttaatattaaatgatcattcatttgaggctaaaatgtcaaaatattatattgaagtcggcagtggtaaaaaaatgagctagatattgttattttactgatacagatggttgccatacttttcacatggcagcccattactatcataaagttgaaggtcttaccgaagagaagcccgtgcacatgatactaaaaccagggaagtcaaatggtgcattatcggataggaatagagctaaaagagacacatatgtatatgtattagtttaaaaatgataacatcaacgtaaaagacatttttaagtataatttcccatcacctgttagaggggaaaatgccagcggagaaactacatttgccaaagaacatatgcctgaaatgcatccttgagccttcccctgtagaaagttagtatataaagatatattatataatcagtaagtcagaacaagaacatgggagcatttgtgatgatgacagacatcctctaaaactaagaaaacatgatcatagtaaatgttctctttaccatgattattgcaactaatctctttgctatgtaccaagccttacatcattatattgtcaaaaagaagtgtttcaaacaaattattaattcactcaacaagaaaactacctgctcacgggacccaacttgtttggaaacaatacttcgcatctgcacattttgtaaaagaatcacttacgggttcctggagacagctaaaaaacagcctaaaatataaataaactaaaagaaactcacgcatggttgtgcaaacacagaaatgatggaaaacatagctgcagcatagggaacctgcccagcatttataatgttagtacgaattggtcaaatcaaataccgaaaccaatgtgaaaacctatgaagttaaggtataaaaaattacccagaaggaccatgctacgccataaagaaacatctgcattcaagaacaaaatagatataatcgacttagaagtggaaaaatttcattgctttacatattgaatttcacaaaagtacattacagaagatacaaatgtcttaaaacaatatcacatgtgtaattcaatgcaatactatcactaggagatgattcagaaggatttgtgcttacatgtgaagtgctaaaaaggagccctattgaaagcagcctctcctcccctagaagaggagccaatatgggcatgagaaggagctgcatgtcacttaaaacttttaggtcaaaaaaattatgcaggctataataagaaaggaaacaaatgaatgccaagatatgtggtatgaagataaggtaattacctgcgagatagtccctgcaatcccggaaatcaccatcagatcagcaaattgatccttgttatagtggaattcggcttttaagaagtactgaatagtaaaaaataaaatcagttctttccttttatgagatcagagacgatcaagtgagattcattactacaccacaaaagagtaattaagtaacaatatgggaacaagaaatatcaggtttaactatgtccaaatacacaaaccagaagtaacaaagttaaggttcttttactaaaagttcacaacgttttctattgacatttaaataaatctttgaaatgtcaatctaactcttccttaaccaaaaagacaataaaaataaaagaccccacaagaaacaaactaaatcctgaactgttctattagtgcataccatcattgaagcatggagaccaacttccgccaagttgctgaaaaaggcaacaatcccagcctgcaaaagcgtggggctgcaaaatcacggaaagcacacaattaattctgccctaattacgcggtatactaagttaaactcttatcaaaaatcaccatacgtgagcgtgtttaaactctaacactaacctggtcttcaaaagagcaaccatgccattaggcgaaggcaatgacttgagaaacctccctttcttactcgaaccttggtccgattcagagacaccaagctttacctttgacaaaattggtacggaaagattgtcatctatgatcgtatcaggaagaaaaaccctcatataaaccaccgccgctatcgaaaccaacgcagcaacctgaaattaggaataatcagacaataatttgaagggtaaacagaatgaaagagaatggtggattaaaaagaaagaaaacctggaaagttgaggaggtggaaaggaaccgagtggacagagttccacagacgaaaccacatgaactaatccccgataagattccaaatgcggaggctcttcgcccttccggaacattatctgcctgaaattgtttttgatgaaccgttcaattgtttagtttcactttcttcaatttggagggaaagaggatattaattaatgaccgtttggtgttttccgaattgggactgtgggttttggtattatttttttcaaaaaaattacaccaccaaaatacggtatatttaagtgttttacagttacactattatcactgtaattaggatttttactgccttaatattgacatttattaaattatatccctaaatttttttttcgttaaaagttctcgttgaactattaagattgttaaatttaaagactttgtttaattttattcaattttactaattcggtgattgtttatgaactaaatcatgctcccagaatcatgccccctgaactttta

SEQ ID NO: 299406 - DNA, 3813 bp, Cannabis indica
tctgacgtggcatcacatgatggtgacacgtggaattaactttgagtatctgctcagagggcacagtctgaacaggatgcctcgtagccatgcccgaagcagagcgatcagtaatccgcacaaagcaaccaacacttagcgaatttatctttcgcattgagtcattaaagaaatccctataacttggggattaagattacagagatatggcaatctgtccatatcccacgatcagtgtattctgcatttatcatgcaatctttccgcttatatccattgtaacaagaagggaaacacttcctcttcaagttcacaaccctttaaatagtgatgcatgttcactgggtagagggccgcaaacagttaagtcgagattttaccctagagatattatctaagaattcatattcagagatactgttgtaagagctataagaaaaggaacctttctccttgttcttaagtcaatacaaataacaaggattaggctattaccgaactgctcggggctgaacctctataaaattcttgtgtctttacattgctttactgtatatcgattgctataaattactaatcgcttactaaataagactcagtgtcgttggctaaaagcgaggtcaacaaactcgaacatgtttttatagtagttcgatcgaaatattatttaattataaatgtgaatactattttactatttaattatgtttctttcaaacataatttaatatttaaaataaattatagtattattataaattattaaactataataaattattaaattttagaaaacattaaaaaactgcttttactagtgcataattacaccgaaaaaacttacccaaccatcaaagacatatgatgggtaagccttttttttggtacataagtgcattggtataactatttcatgccataatcctattgccgggtaactgcacatatttccacatacccgccaattgggaaaaacgtgcaatcttatgcgtcggtaaaagtcattttatatgcctatgggaaaaatttatccatcttttaacacttagttttgaatttttactggtgcatttggctattgtaccggtaaaaaccatttgactggctgagtattgcagagaagttttaccagcccagttatgcaccggcaaaagtttgctggctcgttgtgcctagtattaccagtgcaaatttgcacccgaaaatgtcctctttcatgtagtaagtaacagtactttattgttcatggtggtcataagataagtccaatttttccaaagaggggtatttgtcaggtagacccactttctccatatatgttcattttgtgtgctaaaggattttctgctttgatttgtaagtttgaagttgcttgtcttttgatagggtgtaaggtggctagggggctccttctgttactcatatattgtttgccgatgatagttacctcttttgtcaagcttctatttctgcaactaggaatatcaaaatagttctttccacttttgagcgagcttctggatagaaggtgaattatgggaaatcttctatattttttagtccaaacacaagtgatgttgctaaatggtagatttgtgactcccttggaatgattgaggattctcttgatagtgtttatttgggattaccgggtattaggggaagaaataaatcactattttaaagtttttcgagaaaaaagaatgtcaatcaatagttgagaagggaagttgttgtctagggttgggagagatatcttattaaaatccatggttcaatctctgcctgattatgccatgagtgtctttctgaatatgttgtgagattgaacgcctatggctaatttttggtggaaaacttcttcgagtaaaggtcgtggcattacttggatgagttgggagcgcatgtctcagccaaaggaagcaaagggtttggggtttcgactgctttatgactctaatcttacaatgcttgctaaacaagggtggaggttgttaaccaaatcagattagttggctgccaaatttgattttcctcattctgattttctctttgttgatcttgggtcaaacccatgtttcatttggcgtagcatttggaatgctcagagttttgtacgggaaggagttcattgtgtggtgggcacgagggaggacattagtgttctgtctcaccagtggctgcttagggataaagacccttttgtgtcttcaaggtctttgggtctgaatgataagtttgtcactatttatagtaggaaattgtgaatgagacacagagataattcatgatatgtttaatgctcatgatgcgagtcttattataaatatacatcttagctcttctgtctctaataatttttggtcttggcatggtgaagagatgggcatttatctattaagagtgcttatataatgctccaagatcatcatcaaactcaagaggggactaataactctggtttttggcgtgtcttatggtagttgaaaatatccccaaatgtgaagaatcttattggagagtagtgtccaattgtctccctacaaagttttagcttcgacaaagacatgttgatatctcagattgctatcctatgtgtaatggtgagactgaaacaattactgatatacttgtcttttgtccttttattgttagtttatgttttttgctggtttggtaaatggggtgttgattccttcttcttttagttcttcgctttgtgattcttttgagaagaggagtgaggatcaaaaatgcaagtcggccatgctttgctgggctatatggaaagcttggaatgcacttgtttggaacaaaacttcttcctcttttagtgatcttatgcttaatgctactaatactttgtcccaatggctaaaggctcagcctcgagataaccttctttctttaggagtgtgcttactagacaatggtgctgagatatggaaaaaatcttatcaaaacaacgttaaagtaaatgtaggtgttgtaacctttgagagagagggaatggttggatttggctatatggctcgaaatgaagaaggttattttatcgttgattgttcgtcttgttttaattgaatctatccatcaaaggttgttgaggctatgggtcttaaggaggcgctgtgttggattaaaagttagcgatggttgagggtaatactagaaatagacaatcttctcacagtccaagcggcatgcaatgaactcattatgaattctttgtttggtcatttagttaaagattgttaagttattctttcttctttaaattatgttgattcaagatttgtcaagtggtttgccgactgtgtgcccactttgttgttagggttcttgactcttgcatgatcgtatggatgaatgttgtattcctgcagagctatgcactattgtatttgcattcatccttttaataaagattttattctattcaaaaccaatactaaaaataaacactactacaaatatgggctttagaggcagtttttaatgtctttcagcgttagttttggcaaaattcgctaccgatgtgatccaagtgacgctgtagggtctaaaataaatgacgttgaatggtaccctatggcgtcagttattatatagtaattgacgccatatggtacatatggcatcggtacatagtgaataacctatgcgatatacccccataactgacgccatatacccctaacaaccgacgccaaatctgtaataattattttttttagttaatttatttaaattatatatttattaatttatatattatattatttaatttaaatttaaattaaatatttattt

SEQ ID NO: 299407 - DNA, 5519 bp, Cannabis indica
ttaaaaaaaagaaaaaaaagaactactgacagcagctataacatcaccaattcaggtttgttatatgaacatgagctagaattgaaacccttggagaccaattctttgattgtttcttttttggatttgaaattcttaagtaattaactttggaaaagttaaactttcttccaaaatgatcagtagctggtgctaaagggcttataggatttgagatcaagagccacaccagctatggagccagcagcagcagctacggttatgataagacaagccacacttaaggtttggaggcaaagccatctggtgctccactttggtatcttcttttgaactatgtacatctccacagggtagtaaactgtcaaaggccagaatcccagagccccaagaagcccaactatgtcgttaaagaagggtaaaagcatggagatgacagttgttatgatcacaaaaatagtcctccaaactactctaaagaaattcagcctataaggactgcaaccaggaatggggattatgatttctttggtgatgaatttgctgtcagggtacatttctacagccttcttttcaacaaaggcgaaaaggggttggcagtagacttggtatgcgccaacaaggtggattacaatggctgcattagctatgtcaaggagccagtaagggttgtagaacccaaaaccagtgagaaggttcccaggggacatgtcgccgaaagcagcatagcccatacaaccacagagcatgtagaaaagagtagtcactgttacactaaccaaactagctttcttcattgtcttggcttctgctggtggggatcttactgtgtcctgtttaagcacacaaagtcatagggggggtacttagtttgacttgttaagacaaataaaacagtgaagttttgcttatttgacttaaaggattaaatgaagatgtgttatgttatatatacctgaatttcaatgaggatgattgagtaagagtaggcaaaagcaatgtcaccaagtgcttggaagctcctccaaattttctgagtttgagtcacagttccaatgcttattcctgtcatagttccactcatttttccattttctggtgtttaacatcaacccaatagagtcagttaacgaaatactaaaagtccactaaaccaagccaagacataaaacacacaaagaaataaagacctgcaactttagctatcccaaggcctagaccaatcgtcgaataggtgaaggacataaccgcagcaacaatagatagccaccaaagctgatcaaagtctgggatttgggaaaagatgatttgggttatcccaaaagcgatcatgtaaggattactgttcattttacaaggatctttcccatcactctcgtggaagcaattagacctttttattgccctgtttaaacaacaattaagccaaaaaaccaatcagtcaagataaaaatttacaaaaccatttataaaaaatcctcaaccaaatcatacttgttactcacatcatgcttatagatgaggctatagtatagccaatggctactccaaaaagattcaagtactgaattatcccacaaaacttgacctgaactccacctgaggaaaattcaaatccaataccaaatcactatatgagaatagagttttagtactttttgaaagacacccacatcataatctcagccaaaaatacaatataaagccaaatgcttttcttttctttttaccaagatttgatcgaactgcatccatgtaagtgtagtttctcttgccagtaacagtgtcaccggaacgatagcaatcagagagaagggttgaagtgtagtaagttacaaaggagaacaagaacataacagtaggaccagcaacccatccgagctgagcagtggcccaagctaaggatagaaccccagacccaatcacagctgttattatgtgagcacttgcagtccaaacagttcctggttgattaatatatacaaaaaagaatgagtacccagatcaagaaatggttcaaataatcaaccatctaagttttttaaataggaaaaaaaaaaatgcatacctgttctcttgagacgcccatcatcgtcaaaacatttggagccaccttgtgggggaacatcgagtgaaacatcaaacacttggcgatgttgaagctggttctttccagtaccaacgttttcacccatactttttgttaagtaaataaacacaaaaagatgttatcaaactaacaacactaatgtctctctctgtctttgaaaaatctcaaattttgtgcactttttacatgcaaagaaaacagaggaagaagaaaagggagtgggtgtttaatggagtcaagattagttttttcaccgagtattaaactctcaactgtattaacgtagactctacagaaaattattgacacacaaatcgagacccaaaccccaaaaaaaaaagacaataaaaatcccaaattgatgatgatgatgatatgggctatatttatagatatcaaagagatttattagaaagagaaagaaggatcaaacactagaagttggaaactgtgttctccttcctttcagtgagaaaatggaattgggtttgagtttgagatgtatgtaggaggaaaggactgggttatatatatagagaagggtacttagaagagtttgaaaatggagtttgacactcccacgtgttattaaagtgtcatatattttaatgtaatatcaagcataaagcttggtgatacgcgtcaacgacaaacacaccttttcttttcgttttccgtgtatccaaacacaaaggtttgactcatcattttttgaatttcatatttcatatattattttaaaaacattgctattattactgcagtggcgagccgagccaaatatgtgaatataaatatgaaaactgtaaatctagaagggataaaaataaaaaaaaaataaaaattttatgggaggaaaataaatatatgtaggggtataattaaaaaattattaattttataagggcaaaattattaatcctaacactatattgtgggtgattaataattttttatattatttattaaattaaaatatataagattaataatagtttactatcttctgtaaaatttagtaattggcatcttagtagtaaagtatttaaaattactttaaataatgttatattgttattggtattaacttatcgtctaatataatttaatttaataattattataaaatatcattaactaaggtatcacatactaaatttaccactattatattatcttataggaatgttttaaggtgcaccttcgcattttttttaacggtccccactctcaccactaagttctcatttttcaagtttcaattcaacactctccttagtccttgcctaaaagacgcccctttctattcatttttttagtctgtcaatacatattactttggggtaagatttaggataagatttttcttttcatatagaataataaaaataattatattatcaaaattttatcatgtgtgaaactcacttaatgcaatttcacaaaaataagagacaaatgataaaaaaaacttgagaacttaattgtgcatgtatccaattatgtaacacattagattaataatttatgaaaaagattaatattgtaataattattactaaacacgtattttaatataactgattatcccatttcgaatatatatacatatataaatatagggtatatttatacataactgattagacacgaagacccttattttggacaattaaatgtgaatcctttgtacaactatacagcttttggacttttagttagcaagtttttgtttcatatagataatttaataattctattttggttaattggacacgtagagaagttagtcaatgctcaagctaagtaaatcatcattttctttaattaagtctatgattttgaaatcaagtagatatctatgattcaaaatataaacttatgttagttttatatatttatataatatataaaagctattgctttgtaatttcaaaaaggagggaaggttgtaaaatttggtgtgctaatttcttttttttatcttcgaaaaaaatctcaaacttgatttatttttgttttccaaaaaaaaaagaaccaaatttaataaaaggtggaacgattttattggatatatacgattaaaataataagatttctcaatataaattattctaattattaattctcttgattaggtgcacatgtacctttgactacatttacgtatgcttatttatttattctcatgaaggttgaaggagtgttcttaataatcttccttatttaaaaattaattaatggtactctatctacgatgattgattaacatgtacacatgataatagaagtaaatatcgtattaatatactaattaatcaatatgtaataccgtaatacgtatacatacataaatatatatatattggtaggtaattaaaactttacttatttaagacataattaccttgaaatgtcttcttgctctctctccttggctatttatttaattttttttctttctctatatgatcaatatagaagatgggtatttttgttaatattattctgtgatgataactgggtgcctctcttcatcaatgaccttagtttatatatagaaatttcaaaacaacagcaaaattaataaactaatcaacggctaccttagaaagattcccacgtgtgtggcttctcgaccatccttactgatcaagagaatatggttctcctctcattattattattattattattatttcaatacaatacaaataatttatttatttatttattttttaaaaaaagttcgtgtctataagccattcatcataacatggacagcatattatcaaagtattatattcatcaaaatttatatgttttatttgttattatgcgatagtgaaattaaaatatataatctaagaaagagatggagctgccccccttcttcttcttcttcaattttttttgagccctaaaaaacaataataacaataaaatcattcccgtaattcaacaattaaattacccggtatatatataattctcaaagatttctacttaaattagaaatccaagcttactattcatattatgcacagacacaatttatattgtgacaatgacactataccactagtagtacttgctaagtagcttgtgatgttcataagtgaaatcaagctcaggcagtctctaagatagcaaaggcagtaatctcggtgtggctctagagctgcgcacaccgctttctcttaagtctcttagtgcatttgccctgcaacaaacccagaggcataaatagtggcgccaaggctttgtgtgcttccaatctcattcaccaagagtcttgtagcctatcctctgcctcccttaaagactgtcaagctttctcttgcaatttctttgccacgcggcttgtatgaaacaagcttcccatgttctccattgtaaagaatataat

SEQ ID NO: 299408 - DNA, 1385 bp, Cannabis indica
tatatatatatatatatatatatatatttatatggagatttacaatgtatatatttatttatatatcatcgaagagattttcttacagaagcagtagtcacggatttgcatattgaagtatgcaaatgaaccaacaacaatccaaaatctctatttaatttcgcaatggaacaatacatatcttacatactgctattaattactaggcagagtactaatcacgggttgctatttttataaccttatagctagctatatataaaccattcaacccctacactcaacttataaaaccccatccaaaaccctaccccaatcactagatcgatcttctcaatcgattaactagtgctacaaatataaaccctaaaaagaaaaagaaaaaaatcatgggttccattaagcagctccctgccatctttttcattttcttgatctttatggtgatatcattaccaccaattcaagcttgtgttccttgtcaagatccacaaaaggagggaaaggaggtagtggaggaggaggtggcggtcatccgaaatcaccacctcatacaaaaccctcaccggtgatcccgccaccagttataatatcaccaccaatcataaatcctccagtgataatgccaccaccttcatctcccggtaacccgccatacaatcctccatcatcacctggtggcggtggaggtggcggtggtggcggtggaagtaatccttcaccgcctacctcacagacttgtccaatagatgccctaaagcttggactttgtgtggatgtgcttggtgggttggtgcatattggtttgggggacccagttgagaatacttgttgtcctgtactcggtggacttcttgagcttgaagcggcaatttgtctttgcactgccataaggattaagcttcttaatctaaacatattcattcctcttgctcttcaagctttaatcacctgtggaaagactcctcctcctggtttcatttgccctcctctctagtgatcaaccctaattaagctagctagctagtagtcatcgtggtactgtttgatcgaacatgcaagtttgttttttgagctaattaataactctagtagtttgttttaatttcgaaaccgttgttattttatcaattggaaattggatttgtaacatctggttacttttataattttggtcttcattatcatctattaacacacttttactacattaattagtagtactcatcgatcgagatctatcattctatttctgatcaaatcttttggtactcattggtaatatatatatagccttatcaaaaatatatctttatatattaaaagtgtctatctaactacatttcttggtttaacagaatatacttaaaaataaaagaatattc

SEQ ID NO: 299409 - DNA, 3985 bp, Cannabis indica
aaaatcaattaactgagccttacaagaagattgtctcaactagtatgtggaccatgagcctacataaccgagcttccaataagcagatctagaatttaccaagtaaattcactaacttattaattcctcgttgaaccactatagaacttggaattgcactcttatttacatagaacgctctatattttccacgatatagatacgcaattaattatacattgttataatcccaataatcaataatcctctattgatgatttacattgcatagggacaaaattaccgttacaccctttcaatgtattttatccttaaaatacttagccaaaatgtactaccgttacactccatacttatgattagcgctcccactcaaaaggacatagcacttatccaaagtgctagtaaactatgttgtagattatcatatcagttaaaccctgtgtactgataaatctagcaatacatttaatcacacaatcttgtttactttccattgtgttgaaaacacaataaacaagaatatcagtgtgataagggtttggatgaatttttttaatcaaataagtaaatagatgatcacatgaacaaaataacacattaaacaagcaatgaaattaaatctgtttctttattgatatttgaatagagaaaattacattgaaatagagtcttatttagggcacaaagcccaacatattttttcacccattaaaggaataacagacaagttacaatgactttccctcacccattagactttccccccttaatggaccccctctttatcttcattagataaaattttattaatatcaccaagaattagccatggttcagaggtagtggatgatgctaatgttttaagtgagttccatgtatgaattcttaaatgagcttctagttcaccatagaaagcagtaaagtggaaacagggactgttatcatacgaggcaagagcatcaaaatggttcgttgaataggtgtttaaagttacattaacatccctaacaacaataaacatctttcatacctaatctagggacttcaagaccatgactaaacttaagggaagaacgaatacgtgtgacagagttacattgtaatttagattccatgataaaaagtagatatggacgccgctgattaaccacgagttgagatgtctgaatgcagaagggttgcccaaacccctcgcattccaactaatgatcttcatgggtgggtgtggggctacttgaaagcaacctccactgaaaaagatgaaatctcctcagtagaatctgtctgtgcaccagaaacatgctgagggttgaaatcatcggtggacacgctaccttggttgatatttctacatctctttaggacacttaaaatttttttgggattgatttgcctcataaaagtcatagcagaagtctcaaaatgttggctgttatcatcactaagaatagcttttcctttgtccttagtagatgtaatgattgaatctattgtaataacttgagtaccaaagctagagtgagttatattttggacagtaggtctagtattagcattactggtggccacagacatagttatagttggagtatggatacttggagtagcatggagatttccagtactagtatcagctaaattagttatcatagcagataacaaactttggaaataggagggaaaaggggaaggtaagtcaagtataatatctttctgtttgtcaatagagatgttctgtgaacaattttcagcagtggtaagtggcaaagggtggagtggaaggatattaatatttgggattgatgagacaatggttttttgagccattctagtaagaaaaggacaaacatttgctttagaaaaattacttctatatcgatcgtaactcgaactggggagtttatcaccaatcataaacgaactgaaagggagatcaggttcaacacccttatccaataattccaaaaagctaatacatttctcaaagtggtgtcccagccagccgcaatgaaaatagaaaataggaagattctcgtaccgaaactccaactaatgttcatctcttactttaggaaggctaaccatcttgcctctcataagcagttgagagacatcaatccaaactctgatttagataaattgcccccatccttcatgaagggagtcttcatgcacatctatatactctccaactcattctccagctttcatagcaagtgctctagatttgcttagaaaggccaggcggtgtatctgcacccagaattgaactttgtaaagatcctccttagtaatattttgtagcaatgttggggagtgaagcaaaatacgatggttgaaatggtgccaaggttcacccgttaagatccttaatttgtctcctccacaaacaattgttagtaagaaaatatcagaatgcaattcaaaaactacaatttcaaaccgacacttattgctccagaactcgcccatatttttgatgaagctttttgggttaacggcattggaaagtcaccgagcaaccaagaagaattttggggtttgttgtggttcaataatatcagattcagagcgagtgtggacctctctgtctttttcagaaagaacaaggtttgaattcatgtcttgaaggagagaatccatacagaaaattaaaacagaatgtgggaaaatgaagtgaaggaataaagtgtataggctcagatagaaaccataatagacccctaagagaagtaaaactgcctaagttgtaatacatcgtggtgcacaatgagaattggtggagttagagggaaggagaagaagaacatgggtttaggcatggtggagatgaaggaggggaaaactagaaaaaaataaccacaacagagaaaaaaccccagtcgagaactatttttttgacgttttatataaagttacgttagtactatcagttttaatttttttttttataaaaatgatatgaatgtagatatataataataattattattatatataattacataattattaagtaagttatattattggtattaattatcatatatataataaagtatagattattaataataattgatattaatatttatatttttaccaaatatttaaatatccacttttaacttctgcatctataatatggtaagcaccacctcctaatttttatttatttattaataattttgtctataaattcttcacatatattaatattagtatttatatttctgtctaatatatacatattatttatttttcactatattttaaatttaatctatatttacgcacgtatatagtaggcaccgcttcctaatttttctttttattttaatttttgtgatacttggtgtatgattcattgggaacgaaattctaaaaaacatttagtcaaaagaaacttatcgtgggttgaaattaaaagtaaaaattcttacatcatggaactaaatcaaccaaatgtggaagaaaaaaattcccattgatcatttttctcatatttctgctaatcctccatcatgcattactttttctgaaaacaaatgctacacattttgagctgaaaccttccataattaaacttttgccatctttttatgggttggatagagatgatccatacatgcttgtgaaatatttttttagaaatttattctacttttagatttcaacctaatatgccatatcctcaacaacaaagaaaactatctttagaggatactctacaacagtttatgcaaaccacccacaaagatttacacacaacgtcttaattcatgttaaggcttgagacataaaattggtcagcttgctactgttgtagctgaaagggagaaaggaaaacttcctaagtcaacctgttgccctggtatttttccaatatacctagcaatcccactatgagcaacgtggcaggtcaggctctcagctcagagataattaaggaagagtcattacataggccaatcccctcgag

SEQ ID NO: 299410 - DNA, 2305 bp, Cannabis indica
ttaaacaacatacttgtgagtagatctaagatcctggtaaaataaattccaacagttgttcctcctgcgaaagaaaagactccaatcaacaagtcgacctcgctcgaaaaaccacttgagtaaagttgtgttcccacctttggtaggctgaactagtgactgcataaatgtggcagcaagaaccacaatcttcaatttggctccggaaccccaatttaaaacacaaaaggcatttgagtttgccaaatttgacttcactccattgtacctagcggctgccaatctttcatgtacaacaatcaagcaagtcacttggatctccacttctatctctccatgaaaaagagaaacaatcaagcttgccgccaaatcaacttcgttgggggtcgaccacggaataaatcctcgggaaatgattattttgcccttgtaaaaaacccatggaaatagcatactctgtctgaattaggtgaaacatgacaaattccgacaccgaatggacgttagtgctttccatggcccgattttgtttcaatagttgttgttctttgggtctccctttataaaaaatcatcctaagatattttctcacaatttgataccatttttttaattcccaaccagcaacaaacaaagagtgacaagaggaaaaattccttatgtgcttcctttggacaccttcaatggaaatttgttggtatccttgcctttgataaacaattggtgaaatactagaggaaacttctttctctggccataagttcacaacaacaaaccctcctccatttgcccagtaagctcggaataccaaataacaagagcaaaaatttccataaatggaaattaaaaattgattctactgccattgtatatcattgctcattaatagataatcccatgtatcgtaacccaaattttcaagccaaaaggaaaacaagaacatagcatgagatgtggccttagtccttccgaaataccttggtaaccatatggtgttgtgcacacttggccatgcaagatacttttgaaaagtaacttttctccctctgtcaaaaatccaacgagtagttggtgtatttcctttctctgtgaacaccagatttgaacacgaagccacgttgtcaaaatggaaaccttcccaaattttcttctctctcattaacacctttgtcaaaatgggatgagattgaaatagttgttgtagcaatttcattgctgccatcagatttgaagtccaaaaaaacacctggaaaatattcgtccgccatggatggaccgaaaaagaaatgatgaaattcaagaagcatggtcgtgtataggaagagattacgtgagggttctcattaagtaatacttgcttttcttttgtactgtccagccccaaaataatagataaatgggtttctcctaggcccatatcaccagcccattacttgggtattctttgcttaagtgggcccaatcaataatgtaattaaataaatttgggcttgtttatctgatatgcttttatttctctagtggaagaaggaaacaataaaggcattgtgttacgggtattcttatgggccagatttaaaaagttacccaatggattgggcctaacctaatagggttggaaggtacgatttgataatcttgaattctcaaatcatcttctacagtccgccgtcatgaaacagctcgcaccaggtacgggttccttggtgatcagcgagctagactcctttttgaccatcgctggccaacaaaagttatcctctgtatagtgtgtcttctccggaaccggtgggcagcacaactcccatgagcttgacgtcgatagttgaccacgctgctcctccacctttaagcagcgtcgtgtctcacccatccaactaagaatctccgaccaacataatccgacatcgacgattgcttcatttttaacagcgtcgattgctagctggtcgtgctttccacgatcaaagagcttgtgagcctccattgacaataacagaggattgctttctaaccacgttgccttcccttgccgagcttgatgaatttcgggtggaaaattcaagctcgacttctctctgtacaacaccggtatcacctccagcaccgatgtcgtctccaaccctggtagctcaaccttcatctccggcaatgcaagcttcgtcgctagaataaattgattgttggaatatattttaccaggatctagatttactaccacgtatgttatttaacatcctaaatatgaatttcttaaacaatgtaaataaacacatataaagtttcagaaaccttacagtgggtg

SEQ ID NO: 299411 - DNA, 1731 bp, Cannabis indica
ttttttttttttttttgtttgaccgtggaaaaaaaatgacttagtcaaaggttgtgggtttgactttgactggtccttattacagtactagtaccgagtggcggctcgagcttaggtggaatgaaatatggcttatggaactagagatcagcagctgtaatgctttacagccgttggattgagtgggacccttcattaagcgtattgtgtgatcatgtgatccaatggttgtaaaggcattagtctagtcaaccaaatatatataagggtttgaaattgaatcatttttgacaaacttctttattttcttaagagatgccaattactcaaatagagtgattatttagtgattgatgatttaattttatacttagtattaattaattttgtccaattattgctaatcaaatattttatatggtatttttatattttttatttttgaatttttacatacaaattttctagacatatatacttgatattagtctaaaataattttgtaagaaattatcagaaaaatgttattacactaactaaaatagaaacattgtaatgtatttaaaaaataaattaattgtttctttacaatgtttacatgtatatttttttttaacattatcagaaaatgtgtactttatttattttattaggacaaagcttatctacaattttatcttaaacaaaattaattagtgtagagaactataaagtccttactatttgtgagaaatgaaaaattgatttaacaaacaaactatatttgtgttgacagagtttgtctttattacaaaagtatataaaaataatgacacatgttttcgttctagtagattaagtaataatagaaatagttctttttttcttgtcataagaaaaaaatccaagtaatttaaataataaaatcatatatacacttttctttgccaataagataacatgtaactttggaagtttcattttctatcatctcacatggtctttatttaattaagcctcaaaagtcttaataagaaattatatgaaacgtaatcagtcaggctaaaacttgtgttgaaatattcaaacaaaaatattcaaaaaaaaaaaaaaaaaaaaacaataatatataaatttatacaagtacaaaagtacattattaaccaaacatctaaggttctatggtgtagtggttagcactctggactttgaatccagcgacctgggttcgactcccggtaggaccttttcttttatttatttattttttgggtcagatctaataataagttttatttgattgtttagcaacagtcctaataagtcaattagtactaataatatcatgtattaagaataaataatagtccttaaccttatatcaaatatataagtatacatttatttatgtaagaaattaatttattttgcttatcatgaaaactaccttggctattttatgctatttgtgtatctattaattatgtagttatatatgataaattatgagaattgctaaaaagtaactaagcactttcctttgtacatactgttattagtgtagttaagtatcaggtcgtgttattccgaaattaaatacagtgaaattggaacgaattaccgatagaataatctggctgagtcgcggacaatgtcgctctctttaagacgtttcgcggctctgcccgaagtgtgcacggcagtctagcaaccacggcgtccccaggataaaacagcctctgtataagtacg

SEQ ID NO: 299412 - DNA, 1997 bp, Cannabis indica
ctcctagacagtgacaccaagaggctaaaggagcaaatcgctgctctcacaaagttagtctggaagaaaagtggggctctcaccgactgtgaagatgaggacccagagccatgccttaggaggatcacaaaagctccactcctggagatcttcaaaatgccctatattgaattatatgatgggcacagagattcaaagcccacctggccagatataataaaacgatgcaagtggctagagtaagtgaagatccaagtgcttgtgcttttccctgaccctcaataagtctactgaagattgggtaaaaagattggctcccagatcaattcattcctgaaagaaattgcattgtgcctttcgaaatagtcgcctgcgactaagatatggaaatgggatccatcaccaatgtcaaacagcaggctaaaaaaagcctaaagaaatttattgagaaaactatggaggcagaaactaagataagggtgtatgatgacatgaaacttgtggccctatattttgtacttgtagttggctccttattatggagagagatgcaaagaagaagggttgagacattgtcccagttcatggaaagagcacaaagatttatcaatctggaagatgcctatcaacaagcgtttggagtctctccgacaccaacccctactgcttctacttctgaattcacctcacaagttcttgttcccaaaacacagtataccccaactatctatggaccttctgcatccatgcaaaaagctacacaaacatatttttctcagtatggagcgacacaaactagatgtagtatcactcccagatagtcaaagcctcaaatggaagtttcaaaatagaatgtgagtcattcccataataagaaagaaagggtcaaatcgaagtgaaacttcgaataagccaagaaagaagccgcatctcctagttattctagtccatccattcttgaaacttttgacgttgctgctcaaaagtttggttgattgtaacttaggtcatcgtggcggggattgttagtgtgggcttggatctgacaaaggacgtgtaggagatgctcattctatgaattgtatcccaaattgactcgtggctctcctcgattcggcagcccaattcccagccaattctagccataataaggcttgttagtttctcctagcatcaatgcacctgacgtaactccaagggtaccccatgtggtgctagtggttacacctcgtcccatccacttgttggcacaatggtgacacttggttcgaaccgtaacgactaggttagtgactagtgtcttaaggcaagtgggttgcgtggggaaagtgtattgtggtgttgttgaggctactaatggaccacacctgaatagatggattagtagccataggatcacatggctctgatacagatcttatattttgaaccattatttttcagtgatgaaaagatgattttgatgataacagaaatagattgaagaaattttctctcaatgaaagtaccaaaatattgatttagaaaatatcgaagacacatcaaataaatgacaatgtttaatttagaattctaaagttaaaaaaaacttatgaacaaaaaataccaaaaattatagaggtttagtcttagatgtttggtaataactaatccccttttcgttatatttcacttacgaacacttgagatcaaatggaacttaagctaattgagtctccaaatattcaatgtcaattacaaatatatttcaataaggggtcttttcaatattatacctaaaattgattttatttataaaaatacctttaagaaaattatttgcacaaataccgattgccacgtcagcataaataccgaaatataaaataattaccgaaaaattgaaaaaaaataaaaaaatctcgcttccagaaattttagtgttttgcaaattttaaaaaaaagcaaccttttggttgcttttgatgtaaataatatatcaattagttactttttat

SEQ ID NO: 299413 - DNA, 5461 bp, Cannabis indica
attccatgaagcagccaaagtagagtactcgtgtctaagattcatcattcagtgggtgtaagggcccaatagaagcttgaagcggggacgttacaaaagttgtaatgatcgtatgatttagatatggattagggccatagatattaattgttgttatttaatgattatatgtgaatattatacgtgatgtgggtcccattttttagaatgggcattagaattataattttttaattttggagaaattatttaactctacaaatgttatttatatcaaatgcaaaatatgtaatttttgtgattctagcccggtggcgatgaaaaatgcaacggagggtcgtcaaacatagaatctttttattcttgagagtaatagcaggttgagttcaagtttcgggtttaggcggggtaatggtatcggaccattttacccctaagccattctttgagttaggtattaagacaatggtagaattggaattttacgcttgatgataggtggctttaaagagtatggacagcgggcatttagaaatttagagataaactaagtttatctaaaaagagaattaaattaaagaaaaaaatattagaagataagtgtaaaatcccatttctttagctttctctcgtttatgaagcagtcctagaacgaaggaatttcttcaattttcctttgttgattctagaagaaattcaagggttaagaagaagctttggaagagaaaaactaaggtgagccctagaactatttttttttcccaagttttgaagttatgcttgaaatgttgatttagttactgttttgttagggtttcggttagaattgatttctgtatattaggattggtgttttatgcttaactgggttgttgttattgaataattatgaggttgagcatgtttgagttctaagaactcaaacttgactcaacaatggcatgttcagttttaggaggtgtttcttactgttattgcttggaaactgttatgggatgttattgcaagtgttttggagaatttggtttagtttggggaagttttgagtgattttcagggtttttacattttttgtaagagaaccggttaactggttttgtagaaccagttaaccgtttccccccaggcagggtctggataaccggttcaccggttggggaattcggtctatcagttggggcaggcccaaaacccaaattttcatgttatctcaaaatttagagcgtttcatgctgtttatcattagggctacctctgattttaactttaggttcccagaagggtttattcaagttgtttacccatttatgtgaatgtgacacagggcctccgttcaggttgagaattttctattcaagtcgacccggcacgcttgaatctggtaacgaggtaaaatttgcataaagtaagtatatgtatgtgtgtatgtgtattatatgcatgcaattatttaatccatacactatcaatactagtacagaggcggtactgagtgcatgtggtatagcttgtgttacataagagtaccaactagtattaccgacactagtacagttaggtgtgtagtgcatgcagtgtaatacttagtagtactcgggatacagttcataccctaccaacactagtacagtgacggcacgtagtgcatgtggtacagtggtcgtaccttagttaagaatattcttgatcatttgataaaacttgtatttaggcatatgagagcctaattatgagtcattattagcacatagtatattttatgcatatcttactgagtctgttgactcaccagtgtgttaccatgtgtaggtaaaggaagagctaaggcagaggagcagtgagtttggagctcggcagtgattgtacctatcgcggcaatacagcctggagggttctggtcttaaaacattttgggtcaaatttttgtagtcaccatatgacatataatagaatacgttatgtttgtgaaaatcatcttttgaaatcgggattccggctttgtaaaattatatatatgtttatatttagtttatatgattaaagtttaaatccaagtgatttctaaattgggggttacaataatgcaattacgtaccttgcacaatagttgagtgctaaagttaagtggttgaatgaacttactacaacagtttgtactgatgtatattctgagcgctggagaaaaatgaatataagtattcttaaggttaactgtgttgttgcaatctctttcattctgattcatctgattttattttagtttttttttgtcatcaaacgatttgggaatcaggcaactaattggttgatcatttttctgaatcactagtcgtgttttcaatgagggagatagaacaacctcaaccatatataaaatacaaaaatgaaggatttcttttattagatagaaaaattaagtatagaaactcaaatctttcaaataattctcattcatgggtaatacacattaagagtgcacccatatgtataagatgatgcacccatatgtataagatgaataaaaaagaaaaaaaaaaactaaatcaagtacaaatgatgttaaacaatcttgattaaacaattttatctctatagaatatgtctgtttaaattaatatttatccctttccattttaaattacaaatcacgttatacaaaaggaggaagtaattaacatttttctaaagtgacattaaaaatacccgagctagatctataagccatgccttaacactctttttgtgctaagtcgttgagttgtgtaagaacagttagttatgatagttaggagttaatataggtttagagtttgttacacttgtacagttatattatttctatttctagtttgttagctctctagagcttgtataaatattgtactcaattcattgattcaataacaagatttttctttctatcttgatctttcaaagtctttctctttctctatctttcttccctttctgttattcattgttcattagctatggtgagacatgggaatagttccaacattgtatcaaaactattttcgtaattaatggtgaatatggcaagcactggtgttggtaacaccatctacgtttccttcaactccaccaaaccttccttttgcgacagcaagaactagagctcgagaggcaaaggatcatccagtctattcaatcacactctatcgatcaagctcaatgatcataatttcctcctctggaaacaagagatcttggcagtaattcgaggcaattgactgtagaagtacattcaagatgtcactccactgccgaaatatcaaaatgatgcatatcaagttgctcgggtggttaatctagcttttcaggagtgggaggttcaggatcagttgttagtatcttggctttctatcctccatgtctgagagcttgctcactcggatggataagcttcagaatctcaggaaagacaccttgtccctcaacgtatatcttcttaaagtaaagcaacatgtcgatctgttggcttttgttggaaaggttctttctgcttgagatcacattgctacaatcttcaaaagattacaaagtgaatatgactttcatcatatcttccaagatttgaatagaagaatatccaattgctaaaattgaagcgcttcttctagcctcagaatcaagaattgaaaagactaataaggagattaatctcagtgtgaatcttgttgttgctaacaagattcaaatcttgaatctcagtgaccgcatgtagcaaacttagctcctttgcaatcacaataatttcaagaaagagcttctcgaggtgagtttccctttaatcatcataactatccttcatttaattcatctagttttcataccaatagaggatcttcatttaattctggtcaaggaggtcccaattttaagcatagtggaaggtttcctccaacataaaatagacctcagtgccaattctatcataaatttggtcacatggcttttgaatgtttctacagatttgacaagagtttcactagaatcttgtcagcctcttaggattccacttctatgcaacctcatgttgctcagactactcacagtggaaatggaaattggtatcctaattctagtgcaactaatcattatacacaatctaatgcacagttcgtattacaatggacaggattggctatatgttggtaatggatcaagtttgacaattcaacatactagatatatttttcttaattctaacagttcagataaacttttgattcttaatatacgatccatattctacaaaatctattttgacgcgtcttttttattgaaaaatgtttccattgatcccaacaccttaataagattcaaaacgaccaagaacacaaccccaatgcgtcgaattgggttgtcttctccaatcccagtgtaccgtctttaatggtgtcgaaaatggcacagttcgttacgcgcaccattttgttttgtttccttacattcccgagagtcccttaagatctaaaactacctttggtaaacccataaacgacttaaacacattcaaatttaagattgctcaagaatatctatgaacgtgcatgaaaatggtgaattttgttctcggtattcccaaactatttcaatgcactcaaatcctttcttagagcctaggaaacccaataaaaactctcaaaataacccataacattcccaaccctcacacactcggatctctcttgactttttttcaagaagcattattttttctttttttcttaaagtgccgcgacctttagcaaaaggtcgcggttcttaattttttctcaaactcgagcttttttgaatgattggagagttgtgattaagagatagcttcaactctttacgctgaaaattggaaaaactaatttttcgagatttacgagccgcaccaagccatgaaatctattcctaagattctttttccatgatttgattattttcatcgaaaagaaattcaaaaaagatcaattttcacctaaacgtgtaatttcttcttctatatcacctaaaattcaacaaaaaaaaaataaaaacaagttcaaacctaaacaataatacataaaaattactaaaaatacttttaaaattagactcttaaacaaataaaaatatacttataattttaattattattttctttgtttttagtctacatttaagttaataattagtaattatcaatttattttaattttttccctgaactttgacatgtattaaatcatactcgttgaactttttttgtcgttaaaaattcccccctcaactattaagattgttagatttaaggacttttatctaattttagtaataaaaattctaacatagatgaaagttcagggacatgatttagtacatatcaaagtttgaggtgaatgatttggtagatatcaaagtctagggagcatgatttagtacataaacaatcactgaaacagtaaaa

SEQ ID NO: 299414 - DNA, 4448 bp, Cannabis indica
aattatgtatggttgtaatatataaacacttaaaaaaaaaaaaaaaaaaaaaaaaatactcaccttaaaacaaattaatttttaaagtgtaattgatggcgaaacttttttatgttttcattttatacacataatttcttattttattttttggtgacaaaatttctttgattttttttttttataaatttgaggcgttggttaaatacaaccgttaaatatcaattgaatgactaatgtgtacacttgtctatatgtgaaagtaaaacttcgaagctaatacagtgataatatagttgttatttaatagtgatatcccattaatacttcaaatttacaaaaaataaaaaataaataaataaacatataagaggttttgccactaaataaataatgagattaagtgtaagaaatcaaaatataaagcggtttttctgtaaataactttttttaaaaaatataataaagtgtgtatctaataaaagcattgtcatagaacatcaaagtgcttagcaccagtatgagatgatattttataattaattaatattttttttataatttttattaaattaaaacaagtaagattttcattcaaaaaaaaaacaagtaaaatttgatattaaattatactaataataatattatattttacaaaaatattaaaagtattagacaaaatgaatatactttcacagcatttctcatctattaagatcaattgcttggcattatgcaattttcacctgcctagtggaagtggtaacttggagtcaattttgttgagtcattcattacatgaaaattttcctatattatacaataggattttttttgagaggtatgaaaaggttagttttatttatatagtagacaagatgcacaacactctctgtttggtttatgtcaaacagttgttatttcaactacaagcttaaatgtacaatggtcccccaaacaagatccttttttgttttcttagttatctctatcatcttcatccccaaacccaaacccaactccacatacataacatcacataatataataaccctatttctctaacaaaataattcctcaaaagaaaaaataaagtgaaaagtggaagtacactacacaacatagtgggaatcacacataaaaaaaaagacttaaaataacttcatcacaatctttacttgtttggacagctgtccttactccttattgaaccaaaaagtgattagggtgtatgcactattggttactctacacactataccattgctcttgatttttaaggcctttttttggtttgggaacttttgaatgatggacaactgtactcttcttttttttttttatgaaaaccaacttgaacttttgcttatttatgatttctcccctcaatacaaaaatactttattaaattgcattaccaagactttcctctttctactcttcaactctatgcaaaaagctctaatatataatgtattaaatttctcctttttcagaggctttttcatgcttcacatgataataccattaattcctcgacaaagtgcaaataataagaggcacaaagacattggtctccatacctagtgtgtgtgtgtgtgtgaccatacccatgtttttcttcttctttattcattattaattattctcttacaaatgttgtccatacttcatttctagtttcatgtgtgtttataatcattataaatgaaaaacaaaaccaacaaattggagctaaggtattcattgataaataacacttgagaacttaaccttatgggtgatctaatcaatatattctcaaaatgaactcttaccaatgttaccatgcaaatatgttatttatgtaaaatgtcaacggttgtaagttattaaagtattttaaatttgtgctaaacaaaatttgttaagcttgtaaatagtagaagtggttgaggttggaaatgtatatacacttttatgttgtcttttacttacatatttatacattaaaagaaaaacagagcattttacttttcatttacttgacattctttcaattaattgcttaaatactatatatggatatgaatggagtaagtgaagttacatattatttaaatttgtgaagggtaggtaaaagacaacgaaaacgtttggtaactaataacaaagagagtgttgattaaggtatgggggtgaagattataatatgataaagtaaagggcataatagcaaaaaaagctttattatattcctactcagaagccactgggagaaagtgaatagagagttttgcagaaccgagtagacgtattaaattttcacaacctcccaagccaacccccaaatattctttactttcttccaatgctatctctcttggtctcaactcaaaccctagaaaaatttcacctttagatgcaaatggggctctttcacaagttttagaaacaacccagttcaccaaagatctcagatttatctccagccccatttctagccatggcttcattatccatttcttggcattttaccactttctcactcctcgttctcttctttaaagcttcagcttttgactcaaattctttcttttctttcccacagtttggtaaagatccgaaattttactccaaaatctctctgtatggtgatgcaaaggtcattcatggagatgatgttgctgttcaactcactgatagagtgagttcaagtgctggccgagtcatttacaagaaacccatcaagcttgttgaagaaggtaagcctcagaaattggtgtccttttcgactaacttctcttttgcactttcccctggaactgggaatggtttggcctttgttatgctcccaactagttttagtgtgaaaactttctataatagctcatttgggcttccaataggatttgttgaaaagggtaaatctaagattgttgttgtcaagtttagtaccttgaaggatgctaagaatgatgatttggtgaaaattcatgctggaattgatgtgggtagttttgtgtcaaccaaagtaagaaatacttcaaccgttgatttgaccctacataatgggaacaagtcttatgcttggattgactatgaagctggttctaaaagattagaagttagattgagtcaacatggtgatgctaaaccatctgaccctctattctggtacccaattgacttatcaagaatgtggagaaatgaggaagctttggtgggtttcagctctgataataagaactcatctcaatcgtgtaatgtctattcttggagatttgaacaaagacatgttcctcaatggatgcattctgagccattggatcccaaggccatagctgagaattctagacctatgaaagttgagaagagaaaagattgcacagccaaagtacttgcatccatgactttgggggctgcttttggagcattagcaaccttcacagtattgtatttatggaccatgtttggtaagaaacgtcctgtggtgccagaagagttggctatgaagtcacagcctgtggatttcgagtacaagaaagtcaaagtatttgtagataacaccatcaaagatggtaggcagtagagatgaatgtgtttgataatgatgaagaacaagaagaagaagatctattgtatgcttttgtgttgtaaatcagtctctttttttctctcttttctttttggggtacttctggttttgttgtgttattattaacttgtgatatggcaattaactttgtcaaaatggtagcattagattttgttacatattatcccttatatggaagaagcacttggattccacttaggaaaatgaaattattgtagtacttaatcctctttttctctctctctgtgtgctggtttgaaaatacttgtgttgtgttgaatgtttattaactggggctacaaaccaaccaaattcatccttaattaaactcaatatttatgtaaggtcagaaatcatattgcaggatatggtaaatgaaatgggaggacatcacatgttactgacattcaaccttacaaatcttattcttaaggtgagtatgaattgtacttggattggagcccaagccagaaaaacaatacttggttcttggctttaccttttgcgtactcaaagtggcaagcatcatattatccaggggaaaaaatgggcatttaattaattaattaataatcatagagtactgaatagggcattgctgttccaacttccaactgcattttaatgtcattgctcaaaacaaaaatgaaagattgattggagcattatataattcttaatattcgtttaacctagtattctttaacattgcagtaagcaaggagagcacaaaatcaattccattagattatacataaaattataataatatacattttaactaggaattattacatagaaaatataaattgatattttatttacaaaaatacctccataaggtaaagac

SEQ ID NO: 299415 - DNA, 1999 bp, Cannabis indica
attcctccgacaacatttggtgctatctatgggaatgatttttataatatttttatgattttttggagaacaatcatgatacaatgaaccgagtatacacagaatcagcctctgtttaatcagacaaaatgtgagcaatctcagccccgacactcaaagatcaaccaaaatcaaaagatcatcaacaactctgttcagagcaacacaaaaaagaaatcccagaagaaaattcacatcaacaaagtcaaatgaacatctccgtttgagattatccataaatctacgcgaagagataaacaaccccaacctgagaaaagccccatattggcaaacagagagaatcaaagacatagaatatattctgcaatgaaggaatgacttttaccactatctcggacttcggagccgcccagatcttgaggatgctcagatactggggctgctcaagtccaaaagcttgtcgagtgctattcctccgctcttggagccacctgaaatctgagggcgctcagatcatgtgaaagaagcacaacgacgttggactcaaaaattccatatacgaccatagctgataatgaagaggctattctcaacaaaggatcgcaaccttggagaatctcaaaaatcaaagtgaagaagtccgcattcctccgagaatcttttagagaaacacagtcatcaattttgttgtttttctcatagtcggaggagaagataatcagagaatccaaagcgatactctatgtctcaaataaaaacggttcattaaagatgatgcagagaactgtaaatggtacctctagtgaaacgacagtaatagagatgacaaccgcttagcttttaaaaacaaatcaatttcatattaagggcagcaggggaaaaaatccaaagcgctgttgtcgctttcgtttctttcctatgaggaaaacaattatggtgatttattaatcgtatatgtaattgttagcgcttgaagataacacccatttgataagataaaccctatacaatttaattaggtctgaatataacaacaagcccaattctatttgtgggaagcccattagttatattgtgtatttggtcattcaagcataattaatggagaacagaccaacttttttccattcaaattagagatccaattctcggagtctagatgttcggcgtggccaaaagcaagtaatgaaatgatgtttggaattcaactcccaaatgcttccaggtttattttttctttattcatcaaattaagttagaaatattcttgcatatatttttacatatgaacataatgggtgaaacaacaatataatatattaacaaataatggcgaccctaaagtgtgctcattctcgcataattgcttaacaaattattattgcgcgtatacataatcgcaaaaggacgagtctaatatagtgctcatttttacattataatttagaaaacccactatggtacttctatttgcaaattggcgagccctacgtgtgctcattttttgcaaaattatttgacaatctcataattatgcttatgttctctcaaaagagacaagttcaaacacttattgtatactaaaatgccaagtatatggcaagctcgcgatagtgctaaattatttttactcattagcacatcgcagatatggccaatgcctcgattaggcaccacttcgattcaatcagatagcacaaacccaaaaggtttgctggcgtaacatctctaaaatatgaaagaattgaaccttactgaaaaggtttgggccatgaattaattaccgaaggtaaaagacttgtttgtctcattttagggcccgatagcccacttggtaaataccaccctctcatatatcggatatataaaagtaaagaggcacaacacattagaagaacgagaaggaatcaatctatacttggacgctatatgtgtgagtagcccaacgcctacagattaccaggtgcactttttcttttattttaatcaagtccaacac

SEQ ID NO: 299416 - DNA, 5095 bp, Cannabis indica
aatccatataattaaatcctaaaccgtagttgaaatacaataaaaggaataagatgctgtgattctcatccaactctaataacctagttttctttctttgtcggacaactagaaaaattgagagcctccttcatagtaatttcgaatcctcttctattgttcttcattaaatttgagcctttagtgataaaataccatgcccactcatatcaactcaagtactcaatcatagtgtagaagactgtagttaaccaaactgaaggacagaagatccaggtgtatattttgataatgttctgcaacagaaaggaatcaagtgccaaagatctgaacagaaggagtcattattatttcactgccatcaatgtaaggttttctaaactttatatgtgtttattttatcgtattaggatattcatatttaggttgttagattatagtttctaatcaaacatacatgttagtaatctagattgtagtaaaataatttccaacactaagggagcaggaccatacaacttttgcaaatggtaaaaccacccttcatggagctcaagtccagcaggacacaaacatacgtaatgcttggaaacaaatcaaagatctcaaattgaaattgagaaagcttgaggaccttcataaggtcgatcttcaatctatggccaacatgtctgtggagctcaaggaactccgtgaattttgagattcagccaaacaagatgctgaaaaatctgcaaaggaattcgctttggcttctgtcatgtgcaataattgtgtcaaaaattatgaagatggagtttttatgtgctagaggttcaaccagtttgagcctcgtcttaacttctcacttgatcctgaagttgtcttgactcgcttttgggagaaaaataagaggttggaggctaaactgggtaaaaaaattgggtcctcatcttcctccgcgagcttagggaacttcttttcttaagcaatattctttttactctttctttagaatttttgtcaattttttgaatttttgaacctctattttaatcagggagacattcttattggcttttccctaagggtcttttaatttatacttcttttatgaaagtgttctattttaagggtagagatttttatgcattttaattatatttatctactactccccaagtgattgaaatagcttgatctttttgagtcacttgtaaaacttgtcctcacaattgaaaaggaaatagcatacttaattttttggtcatttgacgcacaaaaggttcttttgacaaaaaactgaatatgaattaaaaaccaaacttataactactgataatatttttggagatgatcagcattccatgctctcggggtcaaagacccatccatgagcttgagtttgtaggtcccagagcctaattcatcttttattttgtaaggtctttcccaatttgggcctaacaccccaacttcgggttcttgagaggcaggaaaaactgttctcaaaaccaagtctctcgttgagaactttttgcttttgactattgaattaaaatgccttgccactttcctagggtatgctaccaaatatatttgtgacacctcctaaagttattctactagatcaagagcaggagtagtaatgataaatcctaaagggttaaggcttcagactgccttacggtttaaattcaggctccatccacaaacactttccaagtgggtgtaattacttctagtcaattgccatttgttttaaattcattccactccacgatgaagtcttacagggcctatcctttgatcaagacgcctgggacatactgaatgtcaaattggctcaactccatggcctatttgagcaatgtccctgaggattctggcatttgcaatacttactagagtggatgatttgtgaagaccttaattaaatgagattggaagtagggtcgtagattttgagatgttattagtagacacaaggtcaacttatctatcagacttctgttcctatcatcctcttactaatgtaataaacgggatgctagatttttacttcctcacagaccaggagccacgctgactacattctcagagacagccaaatataggtacaggtcctctccttgcactggtttggaaaaaactggaggcttagccatgtgttcctttagttttttaaatgcttccttgcattcctcagtccattcaaatttttgacttttcttcaaaatattaatgaacagtatatacttgttagtggacttagagatgaaatggctgaaggtagctatctttcccgtcaagctctgtacatccttatgcttcttaggagaaagattatccagcgaagcttgattcttttcaggattagcctctattcctcgttggttgactatgaattccaaaaacttacctgattttctccaaaagtacacttctttggattgatcttcatctcgtactttttcactacttcgaaacattctttgagatcattggaatggttcccagtagtcttggacttgacaagaatgttatccacataaagctctatatttcttctcagctggtttttgaacatctagttgaccaaccgttggtaagttgctcctgcattctttagcctaaaagacataatcaggtacaaatataatcatttgtctatccgaaagctagtacactcttggtcaaccacacgcatctttatctggttgtaactagaataagcatccatgaaagataacagctcataatcagatgtggcatctaccatttggtcaatttggggcaatgggaggcaatctttgggacacaccttgttcaagtccgtgaagtcaatggatattcaccaagtcccattaggttttggtactaggactaggttatccaacaatctgggtagtaaacatcacatatgaatatatttaacaacattttatccacttcttgttttaatacttttgattttacagggtcgagggggtgtctcttcttctacacagctggcatgtttttattaacatttaacatttaacacgtggcatatgacgtttgggcttatgccagtcatgtcctcgtgactccacgcaaagatatatgttgattcattgatggtgttcactatttcactcctttcgttgtgatcaatacccttcacaacattaattaccttggtcgaatcttgttcacaaatttgaatttcttctacctcctctacgagttccagcatagtcttagcccctattcagggatctaactcatctttcattcccattgggtttctttcctcgttcagctgaaccatcaagacaatttgtttggtggctaagttataacacttcctagcctctccttggtttccccgaacagttcccactctagcagcatgggttgcgaacttgaggcataaatgtcagatcaaggttatggctctaaaatctatcaaagctagacgtcccattattgcattataagttgttgggcaatccaccacaataaaggtgcagtattttaatgtgctctaaggggtgtcagagcatagagtcattgggaggcgtatttttcccataggtatcaggggatttccattgaatctagtgagatgagaaacactcgaagaaaaatcttggtctgtaaggccaatggcaaggaacacttatttgaacagaatgtttaccgaactcccattgtctaccaagatttgagcaactatcttgttggtaataggagtctcaatcactaacaagtcgtggtgtggagaatgcatcgtcagagcatcttcttcattgaaagttataggttggtccatgagatgaggtctttgtgtcggtaactgacttacttcccagaccccttcatcatgttcaaagggccctatcatagcattttaactcattgcgggttaatcccccccacatggggtcctctggaaatcatggctactctcccgttcggcctaggtggctctccaagtggtaccccttgatggttgggtggaagtactcccgaaggtggtgcttgaggtccggcttgcccctctctcatatgcggtaagaggtttcttatccattcatacaagtgtcctagctatctcaggctctcacttttatccttcaaattttttcattcattagttgtgtgtccaatatcattatggtactcacatcttttattgggatctctttgaaaactatctcagaacaagggaggtgtcctccaatagtgaacattttgtcacatggctagatacacatgttcctgagtatccaccaacataatatattgggtgtattgggaattgtatttggatgccttcttcatgtttttattctgctgtaggtgctcccttttgatgacattttacttcagaaggtcggtggggttattattgtggttgccgcgagtgaagcagattgattggagtactgtgagtaggttcctggagtagggttattattctgtaacccatagtccgattgggctggagccatagtgagattttgtgattatactggtggccccagaaactgcacattaggcatcccactagttggaggggtgacaggaagcaccccttagggaatttgcatcctagaagcatacccagggtcaccagttgaataataccctcaaaaagacattatttgggcttcttccagattgatgtatttctgggcacttttctaaaaatattgaaggctagtcacaccttcttgttggagttcattccagaagggagttcttgtctagataccagcttgtaacaaggctaattgttgtccatcatcaactttctttgttttggaagcctcatatgtgaacctcctgatgaattttttcagggtggtagatgtttaatgtttgtgagggcactaactttaaggtttatcttcctggctacaacaaactgccttctaaaattggtttgcaacttactccgacaatccacggaccctagttctagcttcttaaaccactcttccacgaatcctcccaaagttagtgggaagcaataccgtcatgactctattgaaccgagacaaattatcacctggatcaatgtcccctatgtacaaagtcatttcaggcattttgaagttttttggga

SEQ ID NO: 299417 - DNA, 3249 bp, Cannabis indica
cgttgtaatgactgtgaatttgtccattagttcatactcaatagtctaccaccactagtataatgagctcaaacatgctcattacctcttagggtgattaggcatataatgaaagttttgggaaatgtttaaatgcatgagattataaggtgataaaaagctaagagtttttagagagggttgttcaccattagttctctcttgctcttcaattctatgttcttgttttctcggataaatttgatgataaagaaaagatcaagatgacattagagaacaaaactaatttatgaagtttgttcattattagataaatgccttaaatagaatgtttgatcttgataatgtatgattaggatttggtattaattgttgttaataataacatgcttattctgttttaattttaacaaattatgttgctgaagagaattatgctatttaatataatttattttgtcattttccttcctactactaataacttgtactgttttaatcttctagattcaaaaaaaaaactcttttgtgaaacgattattttgtgtataattcttccaactttctaatttattcaccctaaaaatattattttatgtttatgtcaaacattagtgtaatgtgtaaatagtaaatattttagcactactttttttgtttggtagcactggttgaacattaatagaacaaaagaactactaaaacaaactcaatcccacctcataccaattaccaactcaagctttttgtacatatataagtctgcaccaattaaatctatctttcttcacacaatttttttccctaaaaaaacctttggtgaactctttattgtttgctaggatgagaaaaagtgaggtttattcacggattctgaatcttaccaattttcatcaaattactatatatattttattttcaagataatatgcattatacaaacttacaaagtataatatatgtatatttatatatttatagaagtagtattttctaaatgaagttgaagtttccgtacaaattttccatggataacaaaggccgccggttacagagcaatcaatattagtggtcctctattttgttggttattataagatatgctatggtgtttggatcacaacaaataatatagttcacgagacttatcgattacgtgtcaaagattaaacttctttttctctcctcaaatgtggatatatagatattgttatatatatataaatatatattcctctgtctagccagatggatttgtttttttctttctttctttcccctaaataaaatcctctcttaggcaagattttaagaagatttacaccttttctttttctttgtttcatgttttatatatacatacggactagaatcattcatgaatttacagtgtaaatatctacaaatcgtacaagattctcctcgaaccaaaataagttatcgtctaatcgaaaagtatattttgtgaaactataaactactaaaataatcaagaaaaaactacccaccttttatggtaagattgtggaagactggaattggcaaagcaaaagtttgatgttaaatttgcgtatgaataatcaatctatgagtgtacaaatttcagatttacatatgatatgatcttcacttcaataacctattaaataagagtcatataatgacgaagaatatgtgtatggagtagtattttttttaaaaaaaattagcgttcattaataaaaaagagatggttaaagtttttagtcattacaaataatacttcaaaactataccagttatattttgggcataaaattataaagctatacttcaaagctataaaaatacctcaaaactatacttaactataaaattataaagtgtaacaatcaaaataaaattacaactcaaaatataattagaaagtttattagaattcagaatataattattggaattaatataatataatggtgtatacaataatacaactcatcagggacaataatttgtactaatatattattttggtgtctttttataacaaatgagagcccaatcccagcaagtggtgtatcatccaacttaccatgatagcacctttttttttgggtcctaaaagataagtgatatataattatcaagtgaaagggtctaaaaattcagaatgcttttcaattgtacgatttgttgcaaaataaaagtactacataggcattagtgggcctgtttttttttcactagctactatattgactccacatttgttgatgaatattacatcttaacaatactcaaatgtactttctcaatcaaaaaaataaaaataaaaaatactcgaatgtatgaaagtgaaaccagaacgtcgagaaaacataataaatgaatattaatttataaataagtttttttatttaatataataataacaataaaagaaaaaaaaaatagtgaggggttccaatcacggagtaaattgcgcggattcaattcaagtgatgaaatgagagagagcaaagaatgtggagcccaatgatggaggtgggccccaaagagtagtcgtattgggtaacttcagttgggcccaatttgttgggggcccacaattgtccaaggcaaagacacgcgtgcgctgacatatgtggctctctatgtttgtcacgcgcttatcgagtggttgtggcgacagtgctgcagaaactttggggtagatgcaggtaaaggagggtacaccgttacagcttacagttatatggctcagtggttagttgtttaactacaagtacaaaccatttcctacagttacgccgccgcacgtgattttcacgctccagtcaataaggaattactaaagtgggagccctgagctaatgctatgcctaagtggtctttttttagatcgatacgcctactgtggttttttttttttgattatatatgcttactttggtcttgtgcggcgaatttgtttatttaatttagaaatttcctttttaatgtttgttaaaaggatctaacttaattacaattcacccttaaatattgaatatttatgttatttttaaatatttaattagattgaaatcgaatgttagatcagatctctaaaaattcaatacatctaatatttaatcgaactctaagcgggctctgaatttagtgggccataaaaaaataattattttgagtccttatttaaaaaaaaaattagtattttttaaaatcagtaaaaaaattatataattttcaaaggaaaatatttttttt

SEQ ID NO: 299418 - DNA, 3955 bp, Cannabis indica
agactgtttcaggtcgaaccaactcagccttctgttgagtaaaagcagcaactcatgctgcttttcattcaattgagaagtaagatcagttacactgctttcaacttacttctaatgcttctttcaacatgcaactcatcatggagtgattgcaaatttgatctcatattattaagctcgatttctagctttgcagattcctcattcttatccttcaagatcatcatctgaactttcctttcctctgatattgctgctatttcctgtttataccttccgacctcttcacttacactccgtaatgccattatttcttgagcaagatctttgttcttagaagtcagatgctgcagctcagcttccaaatcatcaaacgcagacagaagttctctgtgaaactgttcataattttcttcagcttcagagctaagcttcaatttgttagcaatggcctcaacttcggactgaagcttatgcatgaggataccagacacctccagttttcccattacactccgtgcatcatcttcaaattttcgtttcattacgacattatctgactctgctgcatttaaggacatctgagccacatctctctgacgcgctaaatcttgcttctcttcaatcagctggaatatcttctttctggcaatatgctgtatctcttccaatctcatcacagtacctttcaaatcattgggctctagtccctcacacacatattcactgaaaatgttcaacccattaaacttttcatcatagaatgccagcagattctgcagcttatcatgaagaaagtctagagtactctgcaaatcctcctttgcaaaggatagctcttcgaattcagtaacctcgtcttgcaaagaggaaattttacgtcgtaaatttgcattttctagtgcttccttttccaacaaattttccaactctaattttttgatggagcaagcttggaatttgctctcacaacttcccaaatctttcaacagtgtttcacattcagcaatcttttccgaaagaagaaaattctcttcaccgatctttgctgaagctagcttatcaagttcagttctgacagctttcatctcttccttcaacgacgaaatttcatctctaagattttcattctctagcacttcctttttcaacaaattttccaactctaacttatcaatagaggatgcttcaaaatttttcttgcaactttccaaatcactcgtcagtgtttcacattcggtgatctttgcagaaagaagaaagttttcttcaccgagctttgcagaagctagctcttcgaattcaatcttcacagctttcaactcatcttgcaaagacagaattttgtttttaagattttcattttctagcccttcctttttcaacaaattctccaactctaacttttcaatagagcttgcttggaatttgttctcataactttccaaatcttttagcagtctctcacattcagtaatcttttgggaaagaaaaacattttcttcagtaaccttttgaaaatttgtttctaaaatttggttctgcagagccatgtcattgcattttgcatcacaattattcttgtattcattcaaatgttgaacctcatccatgacactttgaagcctctgcctcagcatccccttagattcagttgaaacctccagctgctgtgtaagtttgtcagatttcattttgagcaatctgtaatcagcacttgcctcaagtaaagtttcttgtagagtctttgagaaaatgtccaagtatgcattcaccaaatgagcttcgccaacttcttcttcaactttccggtaaaggtccttctgcaaaagaagagatcttctcaagtctgatataatgtctccatctaaatctttcttcaccgcatcaaattgacgcggggactgagagagtttcgttgattgaagttcctttgagtccaaatttttactctctcttgatttgtgctcaataatgcttggtgttgaagaatctgaaaacgcttgcttaatgagggtatcattagtttcatacatggagagaacctggaaagagagcaattcaagatccttctgtaactggtttactgcaatagaataattcaagcgagccctcttcagtgatgcttctgcagtaacagcccttcttcgagatcttgttgagagtctccaattcacaccctcagtaaatcttgttattttcttatccatgtcttgctgtatactttccatctcagcttttgtagctgaaagcgtgtagaggcaagttgtatggtcatttctgacattctgcaactcacccatcatctgtctctgagtttcctcaagttcctgaacaagagcttcatagtagcactccatttgatccatttttcttgcaaggccttcgcgttcagctttcgattcacccaattctttgataagttcaaacatttttcccttgattgcactgtgagcatctgcagaatcagtttcttgagataccacggcaggtatgtccacacaatgaaacagaccttctggctggtaaaactcagcactaaacctgcttcctggtaatagttgttgacccttgtgcaaattcatttctctgatctcctttacattcaccaagttcatcgttgaaattgtctgtctagtaccttgtttaagatcctccacaacgcccagcaatgcatctatatctgaactgaaggaccccacttccctttcttggaatccaaaacatgccttgcttcgaacctcttttatcttatcctccagttccagaagccccttgacccacctgagtggcaactcttgaaaggaggcatcccggtctgtctttttagtttcttttgcagtaaatggaatgtataatttggaattttttaactgttcaagatcagccttgaaatttgaacactctgatctcagtacataaatttcttttgctaattgttctcctgaagccatttcagtagcaagcagctgagaaaatttttgggcttcggtgcctatatcatcagcatgactttgtaaggaactcacctccagcttaagctcaagaatagatgactcggctatttccaagcttcttcgaagtctactattctcctcatatgcatttgccaagtcattatctgcagaatagtcagcgccccagccatgagcccaatcattacttccaggaggcgcaaaccgaacattagagggatctcctttttctggctgtagaccttgactcggcccaactacgccaccaggggttgtacatttaaggctgtcaatttcattggtgctggaagtatcatgtttctcagcatataaactctctgaagtactcgaagaaccatcgaagccaacagctgagtctgcatactcttcactgaggcccacctcttcttcaaggagaggcaattcttctttgaatcgaacttttgaattgacctgtttacagtgacaataaatacatatcaagactaaacaacactagacgtttacatttgcataataaatttcgagcgcaaaagagctttatgatactgcatgatatttggtcttcttatataaaacagctgacgcaccaggtagacagacaataaatagtgttcagaatttacacactgatgtcaataattaaaagggcaaacacattacacagttaacagttatcccacatagaaaatgctttacatttaaatcagaataataatcccaaatcctgaattatgataaaggctgaggttttaggatagtacatagcagtttctaaggttgcgtttggttggaggtaatggaatggaatagaaatgaatcaattttcattccattattttgtttaattgtatttgaaaatattggaatgccattccaatgtaatgatttttccaccattttagtggaatgactattctactatcaaacagaaagaaacaccattccaatgcaagatgagaaatttttttaaaaaaaaa

SEQ ID NO: 299419 - DNA, 2797 bp, Cannabis indica
ggaggaggaggtggagatggtctaggtgcaagaggacctgtgctaccaaagggattagaggagtgtggtggagatgggccaggggcagaaggacctgggctaccaaagggatttgaggagggtgatggagatggtctagaggcagaaggacctgggctaccaaagggatttgaagagggtggtggtacatgtggtggagggtgatgagaactgggcttgctcgagggaggcttataagatgaacgtggttcaggagggaggggatctgccctgccagaaggaggcttcatagaaggcattcccatgggggtggtcactacccttccgggtggaggctttagaggaggatgtgcattagtattggcaggtacattaaatgttttgaactcagaagcgcctgacacagtattgttcaatggtgtatggacaaaattagaagccgtatgaatattgccaaccaaagaagagtccttcctgttctgacttgagttattaccagaagattgatgcacatgcgcctcttcttttattgaactttcatatgcataagacttggctggagatcctgaaaaattaactgaaatagtcacaggctatagatttatagatagcaataacaaggtacaagaacatgaatgcatacggcataccaatagagaattcgcttaagcttaggctgagtaggggtctctcatcatttcgtcttaatttggagccagttccacagtatccaccacagcataaaaatagcaatgctacaatggcaaatgtaactgatgcagttacagcaacagcaatcacaactgatcgattgcttttactcctcttaacgtcctgtgcatctaatccagaatttggaccagcagttgagtttttagcaggtgggcttctcaaatttggatcgttattaataggcggaaaaaatggcatttttggagaagtagggggatcagaactaggaagttgagaaggagacggtgcgggccctggacttggtaaaggtgattcaactgcaggagcaggagcaggagcaggtgcacctgcaacgctctggagtgattcaaaagccagaacccttctaggaacataatatctggaaaatatggactccagatatttgggataccaaatctttgagccaacttcttctccagagacacggaaaagaagattgtgcgtttgcagacaatataaaatctgtggattcaagaagttaatttctgaatgttttctttggcaagtaaccagctttctgcattaatttcatgaaaatggctaggagcttcatctgccaagcttaaatcgagcactttaacagtttccttcaaatgaaccaaatctaacttgcaatttaaccatatttcctcagcctgcaatccaataatccatcaaaatacgatgagtttcatgcatttgtgcacattttagtaacacgacatagatgcaagcatgaatccacaaataccggcacaacccacttgaaagtcttgaaaaaaacaagtgacacataagaatgtatgcagagaaagagcatgagaggcaatgaacaaaggcaatccataatattcaaaactgaacaaaagagttaagtgagttaatcttaagttattagtgctccttatccagcgtcagaaatcaaatccattggtggtttcgcctaacactgttttaaaaatggtttgttctccttcataaatgtgaagtgaaactatgccattaaacttcccaccaaagttaacaaatgaaaaagcaataccaatcaatataaagatttgcaagtcacgaaagccataccaattttcacatatgctaggtactacattgaaacggagaaaattgaaaaaagaaggttgtatggtatctcaccaaatcgccatttagctcgccagatgctggatcaattagcagccttagaagctttgcctcagtgctcttcttctcatctgaacttctcgatgcccaagcacataacaagatagccaatactatgaaacaactagtccttaagagacccatatgttattgaatctttattccagtcgcataatatgttgatcatttcatcaaagccaacaacctctcacaaacaatactcagaaaccccttcatcacccaaaaccatttgaacttcaagttttcgtcactgaccaattcaagtttttcaactgaagccctaatatataccaattccgggattcgatataacccaattcagaccgacccactagattgcttgtaataaagtctcaatctttgggataggaaagagtgaatgaactagaaggatgaaacttttcttgcttcaaagtgccaatacatgaaaaagacgatcagataatgagaacagtaaaagcaactcaaatacgagttccaaaactccaatcaaataactcaaagcgatggccccaatgaattacagcttgaaagttaacaaggagagaggaaagagcggcgagagctccttgtagggaagcttcaaaaaagggtcttggattctgaccagatccaccaaaagcagctggaaaatgattcagccgtgtaaggtttggtctggtatgtaagcattacaggtgttgaccactatacatgttcgaaaggttaaatgttttcgtgggaaagctgccaagaacggtgtttttttccttctttctttaattattattattaataatatttacttttatagagtagaacctctattcaagaatacacttgggaccaagaaaataatattctaattgagaggttataactaaatagagttacacttgaaaaaaaaatcaaaatatcaaaaaat

SEQ ID NO: 299420 - DNA, 2926 bp, Cannabis indica
atgtttttttagctatggattccttgagattttttcgtgtttgtattcttacttaagagagtttcagaaatttttatgacagtacaattgtctgatttttggttcttaggtgcttatgttttctttcatccgggaaagaatgatcgctttttgtttggtcttctatatttgggcctcagctctttgtgcttattaacaacagtagttatagctaagaggcagaattgatcttaatcctcatcttgttacagtttaaaataggcttagagttatactaaatgcatactttctcaacttgtttggcttgaatgagcaggtcgtacctaccaacctttctatttcaatacttgtgcattttgtgtgtgcatacacacatgctttttggttaactttagatcaaggaactacctgggctttgtggattagactcagtttgttctttacgagtaactttatattaccatactagatgatatttactttagtacttgagtatccttatattctcttgaatggtatgtgaataatctgactggtgtctatatgttcagcttagttagcaatatagtttttctaaagtgtttatacttgtttgtgcagttagctaacatcatgggtcgttatccctggttaacatgcccaaggaaggtaattttatttatttaaaattttaagtcttccaccgtttgaaagataaactatttcattgtggatacttgtgggcttgcaggatttatcaacgggctggcttcaatgtgatcctggtccgctgttcaaggcttccactgttaccttacctggatggattcctccatgggtgagcaacgtgacattctctttaacatgcatttgttggatattatattttatctgtgcttttaattgttctctgcttgaattcagatatgtttctattgggtaactcttaactgattcaacaaaaatgtttgtcattctcaaactttgtgtagaagttcttttataagtttatatttaagaaagataatatttgttctttcgtattgacattttatatttcatttcattcgggctaaattttaacctattacctaaatccaactattaccatttagtaaagcctgatttatctcatattactacgagaatgaaataaatatccctttctttcttctcactgactgcccccgtccaatccttgatgcttctgcttctattatatacttagaattacgaatttctagatgatgacattgatcattatgtggactgtccagccttgtagagtctatggtcgaatttcatccgtgacaagtaaagggccaagacttggcctgaagagtcctaaccaacccttgtcataatctaacaaagatatttaatgagaacaactttaatgagaatgttacactagtataatgcttaaaaataaaattgtagttttttgaataagataaaaagagttaatttttttggaaaaatattttaacaaaggattgattctaagacccaagctaggctccatgggcctccacttgttagcctggaccttctgacaagcctagactgaggctgcaggtaatataactgttgttctcaaagttgacatgtatggtagttttggttttaaatcttgggcataaatcaacctttgaacctgcttgttttaggttaaatttatctaattgtgtgtttttttattattattattaaataaatgtttggagtgttgtgtgttaaattcattactgagtttttattacatgtttttggtgtttatacagttcccatggagagagttctctgtgttgccagttcagtggcatgccgcatcctttggtttatttgcatcaataatagcacctttcggaggcttctttgcaagtggttttaaaagagcttttaaagtcaaggtttgcttttgacactaatgactattctactttcatagatatcaacattgtaagaatactatccctctcttttggtacaggattttggtgatagtattccagggcatggtggaattacagacagaatggattgtcaggtgagcttaacattagtttgaggctaaccatttcccactatgtgatgaaatcttctaaatacacctttggatttttcttctcatttcatttcaaatgatatgtatgaaatgaaatccttccttttcacctggttggtttgcgcattactctggctgtataaacttcgatactcttttgcagatggtgatggcagtatttgcatacatctatcatcagtcatttgtcgtgcctcaaagtgtatccgtggagatgatattggaccaggtatgattgtctatgcatgtaatgttcatcatgacgatcttcaaataccattactgattgtttttccttattgcttcttcagatattgatgaacctcactttcgaggagcaacaagctctattcataaaactcagagatacgttgcatgacagactaatcagacaatcgtaagtttggtatgtgtctctctctcttagaatggtgtgtatggatgtgaagagaggagagatgaagagggaatgtgatgtaatttgtatattgtggcttgtctttctatatttggataaagccttgtatagtcatgttttcgtagtttatctcagtcatgcaaaattggttggagactcccatagtagctatgagaaaatttacgttttagttctttcgtttattcttatttcacctgacaattactttattcatagacttaaggggttgtcaattcttcaaacttatgtgggtctgagagcattcagacccagaaaataaaataataactagttaacttttatgtgcttttttttttttcttgttttctttttatccatctttttcaaatttattttatgggtaactatgtatgaactattaacaaagcaactacttagcaaccaaaaaaaaaaaaaaaacc

SEQ ID NO: 299421 - DNA, 4079 bp, Cannabis indica
aaaaaaaaaaaaaggaaattttttctataaagaggtattaactaaaggtttttctatttgttcattttcttttggaagagtggaaactagatgagatatgtgattgtagaaattataacaaaaaaacataccaactcacatactcttacctaaatttttcgttgagtattataagcaaatgctaacttcaaacttgacttgtttaataattgtataacaaaaattggatgtttatgaatgaataacatgttacaataaagtataatatatttaatatatattataatcaaaatgtattcaatttagagtatatttgatctggtgcaatcaattttgtaatggaattaaagttactgctccattacagttttgtataattgtgtaaaaagtgttatggctgtttctaaggtttttatatgttctaagtaagatttagagagcagtaaaacgttctcatttttttagtctcatacttttatatctttatttatgagaaaagtatttcttttattaaaacctagagtgttcaactaaattttagttttcttataatgatctcttatattgttcatagaataggttgaatgaaagctttgaacaagtgtgagtcttcaggaagaagactttattaagtctcatttaaggaggaagtgagcatatgttttcgggagaagatctgtcaaagactcattttgtgagaaaatgaggatgcataagtagcttaagggagttcactgtttagtgtttcagagatcatattagtaaggtggaagggctcagacaaatcattagagggagtctaattttgtttaagtcaattgcctttgtaatctttgatactttattagttgattttattctctgagtgtgaccttgcagattagtagtgtttgaaaagacattaatactacatatagttctcttctgtaaagtttgtatattttgcactattatttttgttctattactacaaatctatattatgcagtaataagtttttaatctgttattgaagatctttacagtgacgattttctttactattatcaaagaaatttattggcatatgcaaaaatataatttccaacgatccttatcttttgacccttatttctatatgagaaatgctaaaaggcaccacgtgtcaatatcgttattggtgtaactaagcatcaagtcttatatatctaaataacttttagagagtatcgctagccaatcgaaaggtaacatgtctagaaaatattaagaccactagtgcctaataataatgctctttctctatatactattagtagcaggcaaagagtttttatgagtatgcttattgaattttttatgcgattaagatttttactttaattgtacattgcgagttggttatatttttcttcaattcattcaccaactcaccctattaatagttctaaatgagaattagtaatgattatgttgcatgcaaaatcaccaaatttcaataaattgattatcatacattagcttacaaataaataaaactttattaacaagataacaaccattagtatacatgactattaaatcaatttttaagataacatcattgcaaagcataatttaaacatgcagacaagcaaattaaaaaaaaaatcataaagttccatacaaattacaagtaaccaactaacaaacaacacaaattttacatttatcttacttttgctataattattcgtctaagaaatcaacaatttttattttgttttttttatagttgaattagcaaataaaaaacaacaaaatatgcatgttaaatgcaattaaaacatgttattcatcaaaataagtatatagttttgtacatttaaccattttaatatttcatatagaaagcggatatacctaaaacgtaaatttaaattatgttgagagctccaatcaacaacttatttaattatctgcaacattaaaacaataattttaatttttgtaagtatgaatcttattgcgtggacaacaatagcctttctaccattcatttttcagtaaaaatgactcgaagagagaataggccagctatcgatcaatcgtattttttgtaaaaaaaattagaaaaatatgaatagtatatatgtttaaatatcacataatcaaatatattttgattttttttttaaatttgtgaaattattttttgaaaatattgtaagtacttgcagacaagttgaaaactatagtaatggcagtcctagatttacttcaccgaccaacgaatgaatgagaccatgagaatgtgatcattaatgtctgtaagaagaaaagcttctttacatataataatgcatttaacataaatatataataataataataagtattgtaaattttatttttatttaataaattgtaggaaacttgtgatataattaagcaatgttatcatataggaggtgttacgataccatgcaaaaaaaattattaattaattactataaaatataggttttattatacaaaaaataaaatcaaccaatcaaaagtgagggtcaccatgcatatcttaattcatcgaatcttttttattattttttattcggtaataaatactattttgaatgatgtgttttgtaaaagttaccaattgaattttctatttgttaattaataaaatagatcattttttttaaaatagtataaaaatcttagtaggaatcgatttgcatgaatctatggctatctcaagatctatatgttagtgagaatttgtatttattaagttgtaggtacatatattcaatcctcttacatatatgttcaatctatattcattatttctaatttatagaattgttcatatatatactttagtttcatataaatctaacaagaatttcaaatggtgtaagtgttttttaatcatgatgaaataattagcccataaggttgacattggtgaatgttgaaatgtgtagttattaggtattagcaatgtaaaagggaagggtggaggaaaacaatgaaggtgaaaacaatcatcttctcccattttaaaagtggaaaattttacaagatggcttaagaatgtgtataaattaatttaatttaattttaattgtacgctaaatatttagccaataacaattgaattaggttatatgtttttttttagtatctaattggattaatttgtatttttatttagtttgaataaataattaaatttaatgttattatacttacaatatatatgtatagatgaaaattaagattaaattaattttttttaaaaaaaattgatggatctaatataatttaataatcgtatctcatataatttaaggtaattacttacgaatgattatcgatattctttaaaagttattatcttaagttatatgagactcgatacttaattacactaatagtgatatgacactgatgaggatattggtacctttaacattttttttaaaaaaaattgttaaaaagtactattagtatctagtatctttttcagtatcatactactattaatataattaagtatcagatctcatataatttaaaaaaataatttttaaaaaatattattaattaattgtagaatgttatattgctcaccacaaatacacaataacaatattcttcttaaaatataaaagatgatgacaaatcatacttattagtagtaggttggtgctgttatgtcacgcgcaggaaaagcgcttggaccaattttatttttgtaatttaactttaaataataataagaataataatattttatatatatttgagatttgagagtgattttggtaagtttttagaagagaagcaagcaaggagggagttggtggccgcagttggtaaagacggggattggtatttggctctgtgggccccactcctcctacccctaatacatttttttaattaattacatacttttttttttttgagatataattaagggaaattttatttacaccccaaaattttctaaaagcaccccattttaataatttttattttatataaaatttatatctttaattgtactaaatttttttaactttttttttccaattcatattcttaaa

SEQ ID NO: 299422 - DNA, 4881 bp, Cannabis indica
actttttttttcttggattgcatggatccagtctaatctagtacatattagacctaaaatattggatagatccaatccgatccaaaaatactagtctaaaatattgaataaattcaaattgaaccaataaatatatatgaaatgtatctaatggatagaaccaatccaatccaacatccaatggatgttgaatcgattggataactgaaatcaattagatcggatcggatggtaaaatctaacatccaatatataattggatcgaatctggatgggcttaaaaacattggatgtgatccaatgaatacccctagaagatgcttgagcattgctattaggcaccagtggtgcttagcaccttctcgacatgtcacgttgcgattggctaatgatactccctaaaagctattatattaaactatgtagaatccgatacttagttagaccaatagcgatacttatacataagagagtattaggcatcactgttgccttttagcatttttcaagatgcttgcgccactaccactataatttttaacatttctcatttaagattaataaagtactatagtcagtccgtcactccatatagacacattaattttttgttggcacagcatttatgactatacataggaaactcgcaatagtagttattagttggtagctgatcagttacttgtaccactcaactcattaataaattacttaaaatacaaacataatcattttgcaggtgaaaattcaaatcttattggatccaaaatatcatacattcatcatcaataaatctgcaagtgatattctcactttttgaaagagacaatacaatacaattatatttagctatttatatatttatatgtgtgatcttctgtatattcatatcatatcaatcaattattatatagcttaattattattattattattatatataattggctaatattgcgtctgaatgctgtttgaccaccttccaagccctaacaatgtgagattcctcagtcaaggttgacccaacagcaaaacgaagagcatacacgtcaccaaccatgcaatgactcatgtaaacccgacccgacccgtttatagactccaacaactctttgttcacgtcatttatgcatgcttcacgtaaatttacgttaccattaataacaccatactcatcaccgaagacgacgtcgtttttagtagttgttgttgttgttgttgtagtaataataattttgaatttacttatggccaatggtgaaatcctaaaacagaccaaagaaaagtttctcttaacgacaacctcaaacctgtcgtccgtacctaaaagagcttcgaactgtttagccatctttacatggcttcgtagaaacccttggagtctctcaacgccatagctacgaagaactaaccatagtttaagtgaacgaaatctcctgcttagtgttatttgccagtctttgtagtcaacgaccaactttgactcggtcgctttgttcttcaaaaactcagggcttgtcgataaagacttggtcaacgcaattggatcctttacccaaaggcaacaacagtcgagtgtagtgaaaaaccacttgtgcgcgttgaaactaaacgagttcacgcgctcaactccatcgatgaaatgtcggaattccggacaaatacacgcgcttccagcgtaagctgcgtccacgtggacccacatgtcgtgatcttttgccacgtcggatatcggacctagtggatcgaccgctgtggttcctgttgtccccaccgttgcgcaaacgaagaggggtaccaatcctgcttccacgtcagcaactatctttttctttaaaatttctgaggacatggataaaagcgtctttttattcgtctcgatgatccgacagttttccgggtggatcccaacgattctggatgccttttgaaaagcactgtgggtctgatccgacccgtaaacgacaagctttccgatgttttctcttccgatttcattaagctttcgatctctcgccgccacaagtgtgcaaattaccgcctcacacgtggtacccatcagaacgccgccgccggtaccggagaagaggaatgagttagggagtttgagcatttctccgagccagtccattactattgtttccagctcggtggctgcgggagatgagacccagttgagtccgacgacgtttaacccggcagctagggtttctccgaggaatccggcagtactcgcactggatgggaataatgcgaaatgggtcgggctttgccaatgggttaaacccggaattatgtgatcgttcacatctttgagaatggtttcgattggttctggaattttcggagcggatttgggtaaccgttttcggagataacccggttcgacccggcttagaaccgggtaggattcgatgttgttatagtaatctgctatgaaatcgattaccatatggccttgtcttctgaactcttcggattctaatgggttcatgatgggttattttgggaatgtgaaaatgtttttggagaatgggatattataatataataattcagaaaaagctttctactgatattattttctgcatacaattacaacaaatatttctagctatttatagattttgttcaactcaaatacacggctgagatctacggccacctaaattaagtggttgggattcattttacgtacacaaggattcaagtatagtgctcttaataaccaaaataatatcaccataatggtagtctattaataatttttcacataaacttatcaataatattcaacataatctcttttagtaaaaaaaaaataaataaatgttcagcatatcacaatatgctagttattgattcataaaatgtgccaacataatttaaaaccttcctagcaaaagatatgataaaaaaatatatattatatatattaaaataatttatctttctagaaaatatatatagtctcaaaatatttgaataaagtatttttatacaaaagagtaaaaaaatatattatatatatatatatattaaaataatttatctttttagaaaatatatataatcttaaaatatttaaataaagtatttttatacagatgggtagattaattattaaataaaaaattattttatgaattttaattcatgttttatttcgtgcttacgtgtcgtgtcgtgataagaaattcgtattttcgtgtcgtgctttcgtgttttcgtgcttgtcgtgtcgtgccctgctcaagttcatattttttgtggcgttcctgggcccatattaatttgtgtcatgttgggtccaagcttatatttttttcgtgtcgtatcgtacttctgtcacatgttctcttgccgattttgtatcgtatcaaaaagtccgacccgaatgtacaactttaggtaggcgtaacccgacctgtaggttcgatattttcttgccatggccgaacttgttccttatgttcaccttttttttattattattattattatttataattattaagctaattactaaattatatgtatctttcatagcttaaattatttttatataaattttcaaaaatattacagagaatcatattagaaaatcaatataattattaaaatttaattgtttacttacaaatattcaaatttttatgtcatgctctacaaataaattaatatatacctttagtttttaattatagaatttatatttaagtttaattaccattgtcttcttaatgtgtcgtgctttttaagtttatcgtgttttattatcttttggggttagtctattcgtacctacatattgtgtttatcggacttggtgtgttatgtcgtgctttaataaatattttctgcgtcgtattgtgtcaatttgtagtattgtattatattgtgttgtactcaaacttatatttttcaatatctgatcatactcgtaccacccaaacttatgccaatttcatattgtatcaaaaatatctaacccgtatttgtaacactattcaagtacaaagtcaattaattttaattattaattacgtttcttttctttttaaaactatatatgcataaaacattgtaagagtgatcaatatgatggtccccactcccctatacgtaccaacatagggagatagagaccagaataaaatatatgatctttcaaatttgtttggaaagcgaaatttgattttaaaaatatgaacttaaacctaagttgcttaatatttatagtataagtatatttcattgtatactctaagttacttttttcatttcaaaaaaatactcaaattttcttagcggttatctctttcccatcagctcgttctcttttcccctctttttggttctcactaaactccaccaccgaaaccaccgtcgaacattggtgaccaccacccatgacctgtagggaatattttaccaagatctagatttactaacaagtatgttgagttaacatcctaaatatgaatatctctaaaaaaaatgaacttaaacacataagagtttagaaaatcttacattgatttgcagcagaatataatgactccttctgctcagatctctaacccttgttcctttctatcacaaagtattatcaagatttgagcctagatctctttctctccttcgggttggttaccaccttcttctacactatgattgactacttgacttgctatgtgtgagcaagacactctatcactataggccgattatgaagaacaatgaaggagacttgaaaactgtatagaagttgtctcttatctactagttgtcagagaatgaaaactaggtttgatttggttgaaggcaataggtggatgagataagagcatatgttccttttatagtgtttcaactagg

SEQ ID NO: 299423 - DNA, 3595 bp, Cannabis indica
ctggacagacgacatcttaaaatgtaaacagaatagtactttggagggttttcccaccaaaatatgaggttgaatggttttttgcaagtaaattgatagttaagggggttttgccgcaaattactcactaatcattgtttgtttgtcagctcaggaatttattattattattattattatttattttattgttaataaataaataaataaaaggtctaggttattccgccatgctcaaaccatataaagaacaccataaattggtccccattctctgtcaagtttcaaactttcttcttcccattcatcacttttagctttctcatcactttaggtaaagatttgagtgtgttctgagttcttcttctctgtttgtttggttgtttggttacctagaaaattttgagagagttttacaacatcttctgtatcttgttggtttcattctcaatttttaaggtgaagattcaatctttacactcttgaaatctgtatccattttcaaactatttgctttttgatttttttaatgtttttatgatatgttgagatttgaaatatgtataatgagattagcagtattcataaagttttcatttttatttttttttctttatatttttacagattggaaagaaaataatgtatttgtcatatgaataatatcatatatatacctggaaagatacatgtaatgattttaattccagaaatattcttatattcttatatgatttatatagttttcctttttcattttgtatttgaaattttgttccttataatgattttaatcttcatttttcttattaggttcaaccccatctgatataattgctgtaaaatcataattgggttgcagcagtgactgtctaacgaagggtcaaatttcatcatcatcatcatcctctttcagaattcttttggtgtttcaaaattccagggaatgctgaaagatgtgctttgaggctgagaactattcctttaagattaatgagcttgtagctcctcctattgggttgccaattttctttatctatgatgagattgggcacttaaatctcaccccaaaccagttctgtgctcatatacaccacaataatgttgcaaggaatccaagggagcacatcttgtcaaagcatgatgtgtgtgaagatggttaaacaattgaccttttagtataggtaagtaataataaagcctctcactatcagcatcatattaactatatttaagtatatatatatatataattatatatatagtttgtgagtttagaaatggagaagaaggggagtattttgatgcagaggtatgaactagggaggatgttaggccaaggaacctttgctaaggtctattatggaaggaatttaaaaacaggaatgagtgttgctattaaggttgttgataaagaaaaggtgttgaaagttgggatgattgatcaaatcaagagagaaatttctgttatgaggctaattagacatcctaatgtggttgagctttatgaggttatggcaagtaagactaagatttactttgtgatggagtatgttaaaggtggtgagctttttaacaaggtttctaaaggaaagcttaaggaagatactgcgagaaagtattttcagcagctgatttttgctgttgattattgtcatagtagaggtgtttgtcaccgtgatcttaaacccgaaaaccttttgttggatgagaatggaaatcttaaggtttctgatttcgggttgagttcacttgctgagtctaagcatcaagatgggttgctccacacaacttgtggcacccctgcctatgtttcccctgaagttattaaccgaaaaggctatgatggtgctaaagctgatatttggtcatgtggggtgatcttgtttgttctgttggctggttatctcccattccatgacttgaatttaatggagatgtataggaagattggcaaaggtgaattcaagttcccgaactggtttgccccagaagtacgaaagttgatttcgaagatgttggatcctaatccaagaacaaggatttccatagaaaagataatggataactcttggtttcgaaaggggttagagaagaagcctgtgattgttgaaaaagatgatgagaatgaaccaccatcccctattgatactgatgcaattttcggatgcaatgaagatatgagctctgccacaactactactactgatttaaagccagatttagcaaagccttgtaacttgaatgcttttgatatcatatcatattcttcaggctttgacttgtctggtttatttgttgagaatgagagaaaaaaagagatgagattcacttcagacaagcctgcttttgccatcatttctaagctggaagacattgccaaacgtctgagattgaagataaagaagaaagatggagggttgttgaagcttgaagggtccaaggaaggaaggaaaggagtagtcgaaatcgatacagagatctttgaaatcactcctcactttcatttggttgaaatgaagaaatcaaatggtgatacattggagtatcagaagataatgaaacaggacataagaccaggtttgaaggacatcatttggacttggcaaggtgagcaaccaaagcaactcgagccaccgctacccccgccaccaccaccagcagctgagcagccttcagatccactcccagttcaaattgtcattccacaagaatcataaaaatgtgctatgtttttctttattattataacagaacttttgtatttaagcttggtgaataatttgtgtgaatgctgtaatagtgtgagctatgaaatattaccaactttatttttctagtaaaatgattccatccccacttttccctttgcatattattggacaatattcctcagtggccatgaaaaaggttccatctttgcctctaaaatttgttatgatacaattactttaacatgtggtgtgagttggtggatggagctatgagagttgggactgttttggtatgtggtcctcttgtgctctttacttctcttggtcctgttttatgcattgaattgatactttggcattaataagataaaagtaaagatttcaaaaattagagacaacatcactatctatacttgtatatatttgctccatttaaattgatggtgtaaagatgatactattgatatggtacaataattgaatgttaaatttaatatttaattgaattttgcaatttatattgtaatttttaatttatgttgccttcagaagtgatgtgttgttcaagctcactgccaacacatcgtctatgaaggcaaattcaaagagatagaaaacaagcttaatattttccccactacttttctgacatatacattttctatgcattcttgtccagctcacgcttcacttgtcatgtcaacggtagacaagtgaccataatggggataattctatatgcaaagcgaggttattttgcatttataattcacttgttgtaatattttgcatttatactactatttatgttattatatactaaatatacatagacttaatcattctttttctatatatttttatttagtgattatagtaat

SEQ ID NO: 299424 - DNA, 2628 bp, Cannabis indica
tacggtttttatcaaaaaaccgcatctaaatgtcaatgcagatattttcaccccctttagcttcccttttataaattgagttgaaaaaaggaaagctaaacgcttacattgtagtagtgtatactttcaatgtgtctggtcgtaatacatatgtatcccaatgtatttgtttgtagtacatattcccacaacatctaatcgtagtatatactctaccatacatctggtcgtgaaactaaacgcatagtcacactaagtttgactaagttcaaaatctactcatgaaaagctgcaaaaaattgaatttataaattttgtttcaagttcaactcaacaaaaatctaaatagagtgtagaaaaaatattctttttagattaattgattattagaataaattagtggtgtcgtggagtattattagataatatcttattgggttagttaggtccttttgtgtaaagcatttctctaatttattattataatattattatacaatgcctatatatacggctgattaataaaaaaaattatcctaaattcaaaatatcaaaacctacatggtataagaactaaccctaaattaattatatataaaaaaaaacatatatatgttcatgaagactgcttaagtcttggatttaataagagaaacctactaagatcttgaaaattcatctaaaatatttgagttaaaagacaattgttgcagtccaaacaaggttgtagagatgtaaccagctattataatgaaatggtagaactatggcaagagcttgacaaaggtaactatgatgaatgggaaaacaagaacaatcaagctcggcatcagtttcgggaggagaatgattgtgtgcatatgttcttagctggtgtcaatcgtgaacttgaggaggttaaaggaagagttcactacaaaaaatcttactttagtcacaataaaacttgcgactaaaagtaaaaaagttgtgactaattataaatcatcattcgtatgttgtgactaaaaggtctgtggctaaaggtattagtcacaaaaattataatttgttgtgacaaatggatttttagtcacaatacttgctgtgactaaaactaaattagtgacaacttgtatctaaatactatgttttagtcataagtaacatttgttgtgactaaaagtcacatttactcacaaaaaaattatgttatgactaaaaggttgtcactaaaggtaacagtttttttatagtggttctcggttagaaatcgttgccctctatccaagaaatgttttcgacggtccaattggaggagaattgaaggaactacaattgttaacaactctaattacgatacatctaatacatccaatgacacatcaactttgtttgtcaaattaggaagaggttcaataggagataacccaaagaagcctattactgcaaaaaaaatatgacacacaagagacacttgttggaagatccatggaaaaccaccaaaagcaagaaaaaggagacctgagaatgaccacgtatgacaaaagcttcaaaagagcaacaagcgaacttaggataaccacggttcaccaaagaacaaatagaccagctattgaaacttcttaagttcaaatctgatgcaccttcatgttcttatgcccagggtaaaactgctcttaattcttcctatctatgtttaaaaaagtatggtactttggtcattgatttaggtgcttatatgagagaaatagagcaagaaaactatgtctcgatttattacttaatgaatttttgaatacacatgagctaaatatataaacaatgaaaaaacaaagttggttagaaagagaagctaaccaacttaactaactgaaccagttactcctaacaactaattaacagactaattaatctaactaactctaagggcccccctcaagatgggatgtaaatattgatgacacccatcttggatacaatattgttgaactgagtggggagtacagccttggtgaagatatcagctaggttgttttgtgaggaaacatgcatcagttggagagaaccttgttggaccttttcttggatgaagtgacaatcgattttcacatgtttagtgtgttcatggtagacaggattctcacttatgtgaattgcagtagtgttgtcacaatatatcttggtgtgtgtggagatggaaacaccaaaatcttttagaaaggcaaggatccaagtgagttcagatgttgcgtttgacatagctcagtattcaacttcaacagaggattgagagataacttgtttttttatttccatgagatgagagatttaccaaggaatatgcagtatcctaaaacggatctccttatgtcttggaaactggcccaatcagcatcaacaaagaaggaaagatgaacattggctgatgacaggcttgtttctacataagcagtgatactagggacagtgtttgatgaaaagaaaatgcattggcctggagttttcttgagatattgtaagactctatcagcggcttgaagatggggaacccgtggacaagataggatgtgacaatcagtagtcccgtgatccgtaagggaaaacaccgggtaagttgtgcaatcccacaccgcctggggaaggtca

SEQ ID NO: 299425 - DNA, 2412 bp, Cannabis indica
attgtatattttaagcttttttcgatgttggttttagaacaaggcagtgattatttttcggtactctggtgcagatcactggggaggttgaagcagtaagaaaagctctgaaccttgtctctcttcagcttttggggattccctttcgtgatcatgaaattttccctacaaacctttcgggaccatcttctcatttatttggccaacctcgtcctagacctgaagcattaccatcatccattcgttctttttctgctcaaggagcaacctatactgacaggcctcgtgatgttgagtttcattctgctgctccctcattagtacctaaatttcatgatggttttcgtggtcgaatgaagccaccattagaaatactaactttccggatattatgccctactgaaagagtgggcgctgtaattggaaagggtggaaccgctatcaaggcaattcagcaagacactggttgtgaagttaaagtcatagaagaaggcatgtctgattctgaggatcgtgttattactgtatcgggtcatgtggtacgatttccaatgatttgactatctaatttttcatgcatactttgaatgaaaacatgtgacttaataaactgctgcagcatccagatgatcgggtatcagctgttcaagatgcagttcttcgtgtgcaaagtaaaatagctcgggcagcacctgacagtaaggaccagagtgttacagccaggcttcttatttcctctaatcagattggttgtcttcttgggaagggtggttccatcatagcggaaatgagaaagttatcacgagcacatattcgtatatggggaaaggatcaaattcccaagtgtgctttacaagatgaagaagtagttcaggtaatcaattatatgttgaatgttttagttttgtacctttagattaatcacttgttgtgatatctcctaacctgtactgtttactattcttttctttgtcttaacagataaatggagaattcgaagcggttcaagatgctcttatacagattagcactaggttgcagcataatttctttcgtgaagcttttccttcgatgaattatcccgcaaatcctccattttttgatcctccattccttccatacttgggaccaagagagctctcacctccaggaatgcattcaaactttggtccatctttacacaagtttgatttgcacccacacggtggtttccgacctcgtgatgatcgtgtccctttcatgaacaatttccataggtttggtggcccgacgctatctgaaagaagaccgtggggtcctcaggtaatagctcttattttttgtacttcactacatatacaatcttaattggctcagatttttactctgttcggggatgaatatcgttcggcccacaattgtccgatcaatgattagattgatcagatgattgtttgtcattggagacccaaatgcataaaattcaaagcttacatctaacatgacgaatttgatcggtgtatccaggcacttctcgaaggaggtggcccaggtctgccagactttgatagatttcccgaaaggtctgcattgttgttaggatatttgcataatgttttaatcgagtttcttatttaactattctcttatgtgtcggtgtagagtgggcccaccggctgtagtttctagcacgacggttgaagttgttgttcctcattcagttgttcccgcaatttatggagaagatggtgaatgtttgaaacaaattcgtcaggtattttgaagctactttatcgaatcactcttatttatagtcccttaacaaatattaaggcgttctttaacttttaagaaatcaaacacaaaactacattggcattcttttcagatttcggatgcaaatattactattatggagcctaaggccggagcggtggaaactgcaataattatatctggaataccggaacaaactcatgctgcacagagtctaattcaagcatttgtgattagcgagaccgaggctacttgaaaatcttcattcaggtaacactcgtaggctcgttcgtttgacctcgagccctatagataaggctttgtagcacaaaatgtggcgattccttctgttaatatgcactctttttgagtttcatgaaggaaaatagtgatattttgcttgcttattattggtaaattaaattatggtctctaatatgatatcagattactccattttctgtttctaccttcatttttgtgcacataaattctgattaatatcgtatctatacttgcagaattaaacattagacctttagaagaaagaaaaatataagattttcctttgtacttttgagtttaaaactctctgttcatgctattattaaacaagtttgatgtaacgcccttacttacgtaaaataagatgccata

SEQ ID NO: 299426 - DNA, 2286 bp, Cannabis indica
ggagagcacagtacgatgaaagttgtaagaaggtctaacgaccgctttgaatggagcttgctttccaaaaaagtcacggggcgatagattgacgaacaaggaagtcagaagataggtcgactcgaatctcattggcaaactcttatggttagttcttggagaggtctcttgaaccaaatcgttatgtccgaaggagaaaagttctcgaacaaaaatcctaattataaaattttcttaccttaaatttttgttattacctaatttacccctcaaataaaactacaactcaacttagggttattctcttcttcatcttcatccactcaaacctaaaccaacataactgtaacaacgctccggctccagctccagctccagctccggctccgacacacccagccagagttagctactcgtctcagtcggaaccactcttctcttctcttctaatccattgcaaaaggtactttcttttcagtcagaccaccatgtgtttgatataattgacatgcttatcatacattttagggtttaagccaagcagccatggatgaaagctcgtaactttcaatctgaaaatagaaaactcaatgctgaatttccaattaacattacgaatgttatagaaaaaatcacttctttttacaattatccgaatttttttgatgttgtccaatggtagtttccttctgccatctctggcaagaacatcatcacctcttttatcattctttgtcaaaattcctcttccattgatataccgccagaatcacagccattgccgatcatttgagagaattctagttgaaaacatttatcacaaacggttttcaatggggaaaagtaataggttttgtactatggcttccgctcctgtttcgaacagagcgacaaagaaggcgcggcgagaatcgcctgagggtttgcttaagcacaaatttgatatgtgttctaagcatggtgatgtagctgaagcacttaggctttatgatgaagctcgaattaatggtgtccaattgaatttgcatcattacaatgtgttactctatttgtgttcttctgttgaattgagtagtggagaaatggtttcatctgatttagttttgaaaaggggttttgaggtttttgagcaaatggttatggataaggttgcgccgaatgaggctacgattaccagtgcagctagacttgctgctgcagcagaagacccagaaagggcttttgagttggttaaacagatgaaaagttttggtattccacccaagttaagatcttatggaccagcattgttcgggttttgtaagaaaggagaggctgagagagcttatgatgttgattctcacatggctgaatctggggttgttcctgaagagagtgagctttctgctttgcttaagcttagttcagattcgaaaaagggagacaaagtttatgagatgttacataggttgaggactacaataaggcaggtttcggaatcaactgctgaagttattgaagattggtttgtgtctgaagaggctgggaaagtggggattgtggattgggatgtgaataatgtgaaggaaggagttaggagtggcggtggaggatggcacggtcaagggtggctcgggattgggaattggagagtggtgaggactcgaatgaatgaagatggtgtttgtcaatcttgtaatgaaaagcttgtttgtattgatattgatcccagagagactgaaaattttgcagcatcacttactagcttggcttgtggaagagaagttaaagccgattttctccggtttcaggttcgaacaccatccaaacatcctcagttaataaggtttttgtttattttgcatatgaaatgtactgacctgaatttatatatatataatgctgagctcgtttgagttactttgatagttgatattattgagaaagagtttcttttggagggtctcaactcaatctgatatgaattcagttgcatggcttgaatcccaattaaaaattgatgatttctcaacagaagtttcaatgatttgtttaataagaaagaaatgaaagaagagttattgttctcactggatcaatcaagaagcaaatactttacacacacacacacatatatatatattcttcaggccagtgataaataatatgttttccagaaacatcatgattgatttgaagttaactcattcaggagtggctcaagcgtcatggtccattcgatgctgttatagatgctgcaaacgttggtcttataaatcaacacactttcaattttttccaggtgag

SEQ ID NO: 299427 - DNA, 1643 bp, Cannabis indica
gtagcgtgccttagcattagggcgtttcactttataggactggtttttcagtcagcattctaaacgatctctggctcccagttgaaaatgatggctatatccactcatctcattcgactctttataaccagttcgtctcctctcttctcaaaccatatgccaaagactgggatctcgacattttgaatgatctttttgatgatcgtgacagagacatcatcattcagctccaactttcgccatttgctactaaagaccacttgtattggctcaaagatcaaactggtatttacacagttaaaactgtttaccacctgctgcaacagttaaaaggcaactggggtgatgatcctctgtccatattttggagttccttacggcaattacacctgccacctcaagtaaaagaccttctatggagagcttgcagcagttgtttacccaccaaagttcaacttcaatccagacatgttgctatcgacactacttgctcactttgtcattcatctcctgaaacttctctcaatctttttgttagttgttccttcgcccagaattgtttaaggaaagctctcggttctgcaagagatagtattgaacacacttttgttgcctagtttcatcacggtctctcccactggactgcctcaaaaattgaaacaatttccatgctttgttgggccctctggcgatgccgtaatgacctcatttggaataacatcgaaccttctgtcgacagagttatctcatctgcaaaactcactttagatcaatggaaaagcgctcaatcattatcaaagactctctctaatagtgctcctgctactgtagaaagtcttgagcattggactaaaccgacatacccaatgatcaaagttaatgttgatggggcaaccttcggtgatcaaaaaagtttttgttggggttttatagcacgagaccatgatggcagcttcttacaggcctttcaatcaagaaaacttggttcagttcgtgctgaaattgctgaggcggtagcaataaaagaaacgcttagttggataaaaggaaacaattggcagaatgttcaagtggaatcgaattgtcttaatgtcgttcatgctattaacagcaaagtccatgtattttctccatatggtagtattataaacgactccaaaaaaactactttctattctttttaatgtttctatcacttttgtcaaacgatctgcgaataatgtggtccatttccttgcaagggactcttattctaaaactggttgtactcttagtgggacttctattcctgctaatttatcgtccttattattgaaggaccttctttaataaagtttcttattcaaaaaaaaaaaaagttaccttaacaaccattttgtcaagtgatttacaagaaaaagaaaaattcttgtgtttgagcaatacattggccgatgtcaataataaagaaattagttcggatttagatgagttagaacttgacaatgaatctttggcagaatcttatatggtaatgtggtgagaattgttctttggttaaagttaataaagaattatttgttgggttttatgccctaaataaaactcatttcaatatattcagatttacttattaataaagatcagaaataacatttaatgtt

SEQ ID NO: 299428 - DNA, 1589 bp, Cannabis indica
tttttagttcgtaattgtgtaaattgatttaggtcttcacaaacatattttttaaggcttttattatattaatgaataatatttttaaaatttattgaaaaaatatgtatgtttattaattttttttatttatttggctcctaagatgagtgaatcttagatgcagatttaattcacttaaattttgaatcgaccctgtatttaaagaaatgattatatgataaaggttatcgatagtagttagcattataataaaatattatatcgctatttatataatttaatattatatactacatattttgatttaataaagttaatgtaaaaaattattaattaattaaaaggttttagttatgtatttttgtaatttttttaatataaacatatatttttttcatgtttgatatcaatccttccttcattaccaataaataaacaaataaataaaataagtccttccttttaaaatttaaaattaaagtgcaaccactttgaaagaaatcacttattgaatcctcattataattgagcagctttacaccaatattgatactatcattttacttgagcatttatgaacttttatttgtttatttatttatatataatgtgggactacatacattatattattaactttaattagaagttctataatttattacattgaagatatatatcattttaagactctagtagaaactattgatctaccatatatatactagtagtggggtcaattaaattaaattcatgcatatgatttatctttttacataggaaaccctaggtttggattggacatttattattcatagaccaacttcgtttgtgtagttgagttttgttttgtagttcaatggaatatgttagcatttcttttataggagaagttatttgctatttattttgttttatcaatttcattgttagaagtcaacactcattgttagattaatgagatgaaatatgagttgagtaataacagtttagtactccttgtgttgcgagtgataatgaggctacatctattttgagttttaatttttcatgaaaattataagaaattgactaaggcaagaactcaaatttgtagagagagactattacaaaattgactttttccatcaatttataattgtcatttatattgttttctaacggttcataaaactattggttatgtgagagtcataaaaatgcagagctttatgaatgtgtaaaataacttagtggaacactccttttatagggaatgatgcctattaaaatattaataaaatgatacaaaggggtctcgggaggtcaccccgagatgaaaattgacacccctttaggttgggtctcgggggtgtcaccctcaagtgttagcttatattcccgaaggtggtcaacaaccgtgttgtgacagtcagtagtcccgtgattcgtaagggaaaatatcgggtaagttgtgcaatcccacatcgcgtggggaaggtcaagtggaatgattctgagactgtgtaggtgtgggactacacagttgaagatggcttaaatggattgattggtactacctatatcaacaaggtgcatcttgtttt

SEQ ID NO: 299429 - DNA, 3075 bp, Cannabis indica
gtttacatgtatgctatcttagtttccaacttcacgtcagtggaattactttcgttatatgtagtacattttacaaatacatttctaactacacttactgatacattaacaaaaaaaaaaaaaaaatctgcgctttctcaagttagcagaaggccacaacacgcataataattgagaactagttaagaaaaggcagtagttttgtcaataaggatattaccttttttttttttgcaggaataaggctattacttaagtagtatataagtagaagttatgattgtccagcaagcaataatcatcacttgccttggttttgaatattattggaatccttgtattctaataataatctttgttatagaagatgcattgtttaagcatatatctaaggtcaataagcttcaaacctctcaaggagaagatgcaggggtagatagataaatcagataggagcttcaaagctacttatgtgtaaccacattatccatcatacataacagctcactgctcttggcctctgttacttttagctctaaagtcacctgccaaacatgttatgaaaatagacaaattaagcagatgatatacatagaaatagtcaaaatccaagtcatccaatttaaagtcccccggaaaatacgtaaaggtaaagctaaatatagatggcacaatttataatatacgagacgtgttgtggttggtgattaacagataatattatgctcacctcttggaagatttcactgtgggagatctcctcaaaaccctatacagagcatattagacttttgtcagctgaaattcttgctgtaaaaaatttgtgcatctaaaaaaaagccaacactaataatatgtagaaatacaaatttagggccacaagggataccaattttcggaacataataagggacggtgtattagagtctccaattttagctcgaaaggtgtggatccccaagttcttaattgcaaatgccatcatgattaaaactgattcctttccaatgcctttaccacggctatgctagcaaaagaaattgatgaaacataagatttaagtggaatacatatgaatccatcaagttgatataagagttaataactgagggtgggagaagaagggattgtatcacaactaatcatctagaaatgcaaggacactccgaagaagaatttggtgataactagactgatgtaagaaaaaataaaaatacacatttctgaaaatgattcgcatcaataactggcaattttccacaacaaatacttctctagctctctatgacaaagaaccaaaacaaaatgacacaagcaaagatgtgctagattttaattgcaatcaaaggagcacttagctatttttattgtcagaagaaagtagggaaaaataccatttggattcagcaatcattatttcaatctctgccatttgtggatcatccgggtcattcatatagatattcacatcacccaccatggctgacaaaagggaaagcgcacatcattcataacagttggtttcaggagagcaaaaagatcaagtacacgacagacaggacaacaggtgaacatagaatacaatttaggataggataacatttcatattgtaactcaatttaggataccgttcctatatttaaaagatacaaagatagactaactcatcaacataaatgaccaccattcatggttaaaaaatgactgcttttatagaaaaattatattgttacgtttcattcttaataatgaagtgatgagtgtgaagaaggtctcaacaaattgactgaggaaagctccatcttcattgcccatatcaactaagaacatatatatgtgttatgtacataaacaaatactcacaaaagtactcctaccgtgatataaaagtagataacataagaaaatccttccaaaaacaaattaaacaagaaaaagggtttgatcttttaaatgcaggtgatcaatattttccaacaaactctgactgttttcatgggccacaccaaagaaaacaatattagaactagaaaatttatttcacaaatttagaatgaaatttgtcttaaaacgaaacaaaagaaaagagtggcaaaccttcaacatgaggatctccatgaacaaactctccgacaaccgaatgcttctccaatacaatgaaagttctttctgacaaaataaaaaaaaaaatcaattaattaatcccagcaaattcattagagatccaatttttttctttttgatataatcaaacaactgtgctttttgctggaacataatcaaacaactgtcgttgtatatcaaaagtgagggtagcccaatattcaatcacggtcaggaaataataaaatccaaattaaagaacagaaattttagagtgggcagtaagtagagagagataactgtaggggtcttggttccatgagagctgcatctgatactcctggtggagagtgaggggctcggatccagtggcttgaagcatagctgggtcttgcatccattcgtggtatttcggcacgtgttctgccatgtatggaaccagaattaccttctctcccaatagactaactcccatttttcaggctttgatgaacttttggggttgaatcgatttccactccaaaaccaaaacgtaacgagcagagtgaaaagaaagtgccagagcgaacgaacgacatcaattcaattgtcaaaaatcataaacatactagttcagtcacgtgcacggatcctacttttttttctaaataaaaataataaaaaaaaaaatagtaaattgctgcataaatactgaggcctttggttgggaggaatgaaaatataagaaaaagaaagggaaagggaaaggggaatgggaataggaataggaataggaataggaatggaatggaataaaatttaaaatgtataaaaaaaattataaaaaaataattaaattttttttcttgttacattagaatggtcattcctttctttttatgtcacgtttactatacaataatcagaatcggaataaattaatggagaaatgtaacggaataaatgaaaaataatcggaatcaatatttgta

SEQ ID NO: 299430 - DNA, 4359 bp, Cannabis indica
aaggattcgactggcgtatgggtggattggcaagggagattgccttcggtcatggtggaatatttttctgaacttttttcatctactgccgtggttgatggggatgttttgcaatgtgttcctactgttgttactgccgatcaaaatagaaggctgcttgaaccagtttcggatgatgaagttaggcgtgctcttttccaaatgcatccagataaatctccgggacctgacggaatgacaccgggattctatcagaaatgttggagtacagttggtaatgatattacttctcttgttaagaatttctttttgcttggctcttttccaagagatttaaaccatactaatattgttcttattccaaaaaagaagcatccggagtctatggttgatctacgtcctatttccttgtgtaatgttctgtataagataatttctaaggttatggctaatagatttgaggaagtgttgccggttgtaatttctaataatcaaagtgcttttcttccggggcggttgatttctgataacataatggttgctttcgagattatgcactatttgaaaaggaaaagagtaggaaaggagggctacatggctatcaaacttgacatgagtaaagcgtatgatcgggttgaatggatttttattgaaaatatgttggaccgaatgggctttagtcaacactgggtgcaattgattatgttttgtgtgacttcagttacttataatgttactcatggtggacatttgatggggcctattactcctggcagaggattgagacaaggagacccactgtctccttacttgtttttagtttgtgctgaggggctctctttgttattacggcattatgaacgacaacattggttgactggttgtcgtgtggctcgtggtgctcctatggtgtctcatatgcttttcgcggatgatagctatgttttttgtaaagcaaatgagaatgaagctcaacatgtattacggttgttgcatagttatgaagttgcctcgggtcagcaagtaaactttgcaaagtcatctgtttttttcagtaagaatgttcatggggctatgcgtgaccgtgtgtgtgggcttatgaggttgaatgaggctgctgatgatagtttttatttgggtcttccttgcataatggggagaaacaaaaatgccattcttggttttctaaaagaaaaaatgcgaaagaaaatttttagttgggagactaagtttttatccaaggcgggaaaagaagtcttgattaaatcagtagctcaagccttgcctaattatgctatgagtgtgtttcttttgactaaagaaatttgttcgagtcttgaaggcatgatggctaagttctggtggaaatctcagtcaagttcttctagtaagggagtaagttgggttagttggaagcgactttgtcaacataagaattttggagggcttgattttcgtgatctgcgtgattacaatctcgctttcttggggaaacaaggttggaggttacttactatggaggatacgctagtggcgaagatttacaaagctagatattatccacatggttcgttccttaatgccgatttgggtcaaaatccaagctttatttggaggagtatttgggaggcgcaatctcttgttcgcagtggtgctcgacgatctattgctaatggttcatcggttagtatcttgcatgatccttggttgcctcacgatacaaatccttttgttcaaactgataattttggccttgttgataagtttgtttcgaacttgatggtgattggggaaagggcttgggatgttgagcttctaaatgatatgtttgaggaaagggatattaatttaattagaagcattcaacttagtcaaactcgagtgaatgatggttggtgttggaacatggagtcatcggggttctattcggtaaaaagtgcctataattttcttcaagcttcaaaaggaaattggctatttttgcaagatgatacttgctggaagaaattatggaagctttgtattccacccaaagttcatcatttcttgtggaaagcttgctcaggttgccttccaacaaaggtacaacttcaaactaaacatgttaatgttgatctcttgtgccctttttgtcatatgcaagttgagacaatatttcatgttttgttggactgctcattctcgcgttcctgctggacgttttctgctgcaacaattccaccggttgctggtgtggaaaccgatttctgcaactggttttttgatcttcttgatggaggccgtgaggatgtagtagctgaagctgctatggtgtgttggagcatttggaaatcccgaaacgaagtgttatggcaaagtaagtctcggcctgctttggaagtggtgaaatcggcaaagcatgtccttggccaatggaaaattactaagtttgagtcacctaatgctcttcttgctacaggtgacatctcaagtactagtagttggcgcaaaccagatgtttttacggtcaaggtaaatgtcgatggggctatttttgaagctcaacaaaagttcgggtttggttgtgttgcacgcaacagcagtggtatactccttgaagctttttctgcgagtagatggggctgcgtttcggctgaaattgcagaggtcattggcatcaaggaggctttgagttggattaagcgtaaggggtgggaaaaggtggttgttgagtcggatgctttggttgtggttcaagctataaatagttctatccaaatgccatcccaatttggtttacttgttgaggactgtcgtgttattttatctagtttgaataatgtccttgtgtctttttaatcgatctgcaaatagggctgcccattgtgttgctagggagtcttatttatcgtcaggttgtacgtacaatgagctgaatgctccttcgttcttgtgtgacattgttatggctgaggcctgttaatcttaatgagaacaatcttttattcaaaaaaaaaacatacattcattacaagagtccaccacaacgtgcttggaggactcaccagcagctgcctcgactggcaaatcaaactactttgcctcagttgctgcagctctttctcaaccttcatctgctcgcatctcagcggtaggacatcacaatcactcaaatccatataggaaaagttggcattggggtgggttgaccaaaattcataaaaaatatatgtggcaagatccgcaaatgagtcaagtttgactgagcaagccttattttcttcctccaatgctacctttgccgcagttgcacgatccttttctttggccactttgtcttttaaatctttaacatgctgctcgaggtctttaatctttttctcgtggttttgcattagtgtccggaggttggccatttcctcggtcagcttgttggccctttttgcttcagccttcaaatcttcatgcagtttctacgaggaaggtacctcaaataactctttttctaaggccttaacctttttcttggactcgtacagttgtttattgatgtcgcccaggaaagtttctttgcgttcaacctcgtcttgaactttctttagctacctaggtggctaaaactttagtatgagagtacacatacttgacctgaaaattcatctaaaaaacaaagcaagttaaagcaagtttttatgaaataatttgttctaatcacataatgtatcaaaaaacaccttagttatatatttgaggaggcctctagccagcatttctaaaggagcatactgagccctttagcacctcatttgcttcgactcaaaaacattctcggtagttctcgaccacttcctcgaccctctttgtctcaacagttattagagaggatattttctccttattttccttgctcgaagggaccaaaggtaaagtttggttcttctttagctaactcttaagcagcagctgttgaaggaggagcatcaataaccaagacctcatctttagaggccgaaagaggaggtggtggagcgaaaggttttggctgtgccaagaccttagagtccttcttcaaagtgcatgtcagccaagctttcttgcccggatgcccctctagacttcctcttcagggtagcatttagtttggaagattacggaaaaaataacttggttaatttttacaaaatatataacaaaaggcaagtgaaatccttaaaaaagtataccatggacctttcgagaagcatcctcctgaacaactattgaagggatgtcatcatcggaaaaatccacccttaactcctcttcaatgacctctatgcctttcctaacaatagcttgcacgatggtgttgggttttgtgccctaaataaaaccctttac

SEQ ID NO: 299431 - DNA, 4318 bp, Cannabis indica
ctatacgattttttattgcgatttaggttgcaacgctagttgcaataggggtttctatgtagaattccgtaaaaatacaaaaaaaaaaactgttttgaagtgtaaaaataaaaaatgctctaaaaattatctcatatacaataatacaaacattgctaaatatgtggtaattgtaaaggttatgggcatagtatggtggattgtaggaaaatagggccaaaggaatgggtcaagaagagtgagcataaggctgtaggtgttgaaactgataagccaaaccagacaaaggctccctcaaccacagcagagataactttgcatgaaggagtctttgatggggctgaggtcgatgctgaaaaggaaaattcacaatctgtcatcactccaaagcagggtaaaagtaatgaatgggaggttcctaggaaggttgggaattctaagattaaaggcaaagcggtgttaactgatcttaccaaggtgcataatggctttaatgtgctacaaaaacaagggaagggtgctataaatggggaagctttccaatccgtttctaatggatcgcaacaacatcattagctggaatgtcagagggttgaataaaagggacaagcaacatgatgtcctgagtctcttgaaagtgaataaagtgggagtgggagctttactggagaataaaatgaagacctctaaagttgatgacatgatggataaggtattcattggctgggattttcatatgagtaatgttactgaaaaatgtatagtggttatctggcttaaaaactttgttcagtgactgtgttacatgaacacaagcagtttgtgcactaccttgtgaaaatcctgagtgttcaacgctcgtttcttatatcatttgggtatggtctcaacaccataaaggagaggaaggagctttgggttgggctgtccaagttgcaaatgcctatcaaaccttagcttatagttggagactttaatgctatctacaactatgatgacaggttaagaggcaaggctgttaattcgcttgagattgatgatttcacagcttggattgcttaatcctaggtggctatgctcaagagtgttggctctaagttcacttggtgcaataaacaagatggtggtgatagggtctactctagtattgatcatgctttctctaatgaagattgggtggatgaagtttctaattcggttgctaaatttcattgggaggtggtttcagatcattgattttgcctcataaaacctcacaagaagtggaatatagggatcaagccttttagattttataacatgtggactgcccataagaattttaaggaaatggttaagaccaactggaacaagtcgctaggagcaaaggggttaaaaggcattatgttgaagttgcatcgcctcaagcatgctcttaaagtcttcaataggaaggaaataggggatgttgaaatgagctaccatcttgctaagaaggagtatcaacaagctattacttgtgctcaagctgatcctacgaatcaagatttgtaggtgaatgaaaaaatggcagcaagcaggttctctactcatgctgaaatgaggttctctactcatgttgaaatgtacaaaagctttcttgtgcaacgcaaaaaaatcatctagttgcaaaaaggtgatgacaataactcttatttccatgcttgtattaaaagacgaaggaggaaaattggattgtctcctaccagaatgatcaggggtagttgatggatgattataaagaggttgtaaaacacttcttagagcattttagaagctatttgggaagtcctagctctgcttcaactcagttcaattctcaatgcatagagaagggtctttgtttaagtattgagatgcagctgaatctaatcagagatttccataagtctgatgttaaaaaagctctctttagcattgctagctccaaaagccctaggacggatggttacggttctgaattttacaaagcaatgtggcttgacttgggagatgaaatatttgaacctatgcttgattttttcaaatctggtaggattcctaattctctaaatgaaattgttattgtcttggtgctcaaagttgaagttcctaacaaagcggttgattatagacctattgcttgttacaatactctttacaagtgtattttgaaaatgatttgcagcaggcttactgaagtactccctactttgataggccaaaatcaaggtgcctttgtgaaaggtcgatccttggctcataatattctcatttttcaggatcttatcaagaattacaatagaaagaacacttccccgagatgtgctctaaagatagacctgtgcaaagcttatgacactgtcgattgggacttcttggagcgccttcttaccaacttgcggtttcctacgaggttcattaactggattatggtatgtcttcgaggcacttcgtatatgcttatgatgaatggtagtttgcaagggacttttaaaaggagtgaagggtttgcgtcaaggagaccctatctcccctttgctttttatcctaatcatggaatatcttactcgcttgcttcagtttgggactcagaataacgaatttagattccatcccatgtgcaaaagcctcaagatcatcaatttatgttttgttgatgaattgattatctttcgcaaggctaaccgagcttctgttgcttatattaaagggatttttgacatcttctataactgtacaggtttaaaagctaatattagcaaatcccaggtctattttggtggtgttcctaaagaagaaaaaagggccttgctccatattttacagtttgaagaaggtttacttccgttgaagtatctcggggtccctatgagaccaacgaattggaaagaggaggattgtggggccataatcaagaagatcaaacttagactccattcttgggctaatagacatctttcttatgcggggagatgtcaactcataaatttggttctcttggggcttcgaaactattggatgaacatcttcttgcttcctaaaagcattattgaagaggttgacaagctttgcttatgattcttatggggaaacaatggatctagaagcaattttcaccttacggcttggtccaaagtttgcttaccgaaaatctttggtggattgggttttggagatggaacaaattggaacaaagctatgcttggtgagtacatttgggctattcgtcatcaacaagatacgctgtgggttaaatgaatcaattcggtctatttaaaaggctaaaatttctggagctaccaacttaatcttgattcaagttggtattggcccaaattgtgccatttcgagagcatttctctcagcaggtcattgacactgctggtcatggttggaagtttaaaattggtcggttttactctaatcaaattgagctttagaaggtcaaaaattataattttgtttggaacaattttagtgtgccaaagcattgtttcgttgtttggctggctgtctgtagcaagcttctcagaagggataacttgggattggtgattcctagtgtggaaggcgactgccctgtttgtgaggagatggctaagaaccattgccatttatttttaaggtgtgagttctccctcaaagttgtgaagctggttcaagactggttaggctgatcttggcctcgcgattatgaaccttggaagctttggattgaaagcttggacaaaggttattttgtaaaagttgttgccgctagctgctctgtcatcatctaccatatttggcttaataggaatgcttgttttttttaacagctactcttatactgtatatgagattgtaaataggataaaaaaaggacgtgatatatagagttaatagctactcttatttgaattagaaagataaggataggaagtttttctatatgttagagtcctgtagctagcgtttttgcttgctgatgtcctttgtagctgtattgtagctctttgtggtttgtgattaatagatttccttctttttgataaaagaaaaatattgctaaaaaaagacataattaaaactatcataaacaacacagcacaacaacatcatataatatgaagatgaacacacagtaaaaagtgtttaaaaaaatcataacaaaaatgaataattattttctaaaaaataatttattgatttcgtatgagcatcataagtaactaaggggctgattggtttgtgattcaaaaattgtgttttttaaaaatgtgtttcgaaaacaaaatttaaattttataagtaaaaaattgtttctaaatatgtgatt

SEQ ID NO: 299432 - DNA, 2090 bp, Cannabis indica
taataattaatgtatgagctaattatgtatactattaataaataagttacaattatattttttagaataaattaaaacaaaaaattatgtaccaattagtgtaaatttataatccaacatctaagttaatgtgcactaatttagtatgatttattgtatatgtttaaagtataatagtgtgaagattatacaaatgggcatcttgcaattattatatgtaaacgtattatatatataaaaaatttgttttacaagttaccactagcaagccttttcacttaattttattgtttttctttatttaatttttctactattgcttattcaagcattaatctacagggtatatgaaattaaatttctcttaattaataatttattaaataaaaatttaatttaattcccttaaaaagcataaaaccttttctaccttttatcaacccgaccttctttaactttatatatagtctcttttggagtaagtagatactttatatttttcttatatttaatcatattattcatccaaaaatattattatgatgattcaagtagagtataataatcgtaattaataatttaatacatagattaattaaattatgctttgcttaatatatcaattattacccaattaagtaatcttgtttaagcatatatatatttttaaattttccttatattttcattaaaatttaaaaaagtcgatttaaattttacttgaaaaataacatgatgtacgtatgtgatttttaattttttttaaattgaaacgtttgataaatatatttttaaactatacaagttaggattcgattccaaatcctatacatgcaccctaatattaagtggtgatgatcacttgagttaatcttaagtaattatatcatctttagcaagctagaaaggtttaaatttaactaacaattgtgataaggtttaaatttaacaaacaattgtgatttatcatatataatcttacattacaccaaattaattagttagtggattttctagagaatctcatatgattaataaaaagaaaatatatttatgttatgagcagtcatttcgaacctccgaaaaacgaaaaagtgaactgaggatcaattgcattatatgatcccaattccatgcatttgtcattcaaatgaaagcaagcttcactcgatcatttttgctttatatataaaagtacttggaaattaaattaatcttagtgccatattacagtttcgttgacaaaatatatatagaaggccacacgttcccataatatacaaaattgtcatatatatatataaatataatttatatatagtacgctaacatataaacatatcccaccccgacatgtgggaggccattctcattatttcattacattactgccccttgatgagacctctcctcccatactctatcatcatatataataatgctatatataattatataatatatcctcagactactacaactaccttttaagatcgaataaatatattccgacatgctcatcgaagtataaatatttacatatgtacactcatagtcacacaactatatatataagattttttttaaggtggggaataatttactttaatctctatgttaagaaattatttttaaggatttttctatttttatacttcaaaatatatatattttttttatacttttacgaaattttacacaaaattttttatagtaatttacgaggcaatttaaatcgtaaccaaaattcacattgcaatccacataaaaattaccggagcaactaaaaccataaactaaaaaaaaaataaaaaaaataatatatgaaataattctctttatttttatatattttattagatagatgtagaataattttatagtattgaacttattgaattatttttattttttcacatttaaatttctctacttggctttttaggatcaatcaatgatttgttaaaaaatctgcttctaatatagaatgatttctcaagtaatctgatttgtagctatatatatagcttcaaggttgttattgattggccaatcattttaaaaaaaattgatattgaagctatggtaac

SEQ ID NO: 299433 - DNA, 1199 bp, Cannabis indica
actcttatgtgtttatttcattgttttagaattcatattaggatgttaattaaacatacttagtagtaaatctagatcctggtaaaatatttccaacaggaacgtcctgctcttggaaagggtatatggatcttccttctactaggatgcaccagttcggggtacgtctatgactcgcgaaagttcagctcgcgcatgctaggctaccggcccactgatcgagatttttcatgtacaatgtcggaggttgtttgtcacgcctcgctgccatgcagagcatgcgtgtccttgtgtactgtgctaagaaatccaaaggctagtgatgagggaaatttaaataagaacgaccctggagtgacacacgtcgaaagccctgccggtacatccagtacaatctgacatcggtaaagatcacatggaaaatataccacctaccaacccaacggtgggcattcatccctatgaagatccatccaaggtagcccatgcaatggagccgacctataaatactccaaagaaagcacaggaggggagattttttctgacccatccttcggaccttcaccttgagattgaagacccattcttcatcaagaaaacacatctctgtaaccccgccattaactctagaatattcctactaagtttcctcttcttcaagaggaacacagtgaaagggagtagaggtccattattttgtatttgtataagcaatcatcggccaaagagcctaataaaatagattcgtgaactaaggatagttaacgtctgaaccacgtaaaatttttttgtgtgttattgtattatttataccttcattacttaagctctataattatcggttgccaaaaaatttggtaaacaaaagcatatataatcatgtatgaaatgaacatatatgaaatatgaagaatgtattgaaatacctccaaacattgattgtctgagctttgatttcgcatgagttttgaatctataaaagaaaaagcaaactaagttaattagtgtgggtattcagacttccaaactctcttagatggatttagtatttttacaaaatgagtaatgagcttgaagatcgcggtacctatattatttataggtgagataactctatatttttcaggatattttgacaatctatatatatatatatatgaaggagaaatatgaggcggtgatgtggcactctataatc

SEQ ID NO: 299434 - DNA, 5850 bp, Cannabis indica
cattttgaaaaaggtacctttataatttgaatccctaaaggtctaattgcctgttcagtccttaactttttatttcttgaagttttgaggactatttcagcttgtgaggttttgggacctgattatacaaaaaagttttaattagtaggccaaactacatcattttcttccagtttttttttttcagtttttcagtctcttagatagaacagcttaccatactttttggttccccactttttggctaatctgtcttataattgaaaattatttgggattgatattattaattttgaagtcctatttgggttcggcccaaatgatagctggtagttttcaaagtccattcaagtgcccaaatatgtatataactactgattaaagtgtccttaagcatataattgagtgcccccactttagtatatatggtttgataaatagtgtcatatctgtgttttgactcaataaacattaccccacataggttcatcttgaattttcattaaaaaaatgtctacaaaataataaaaataaactctaaaactgagtcataaatattgttgttgttcctaataagatcaaattttattttaacataagaatggaattggttttttttttttcttcttttgtttgtgttatattagtcaaatgagaaataaaagagggaattcattgcttttggaatgattagtgttaaataatggcatttgaaaggcaatttccaccaaccacttcttccattgctgtgtcactctgtgtctgtggtgtcatccaaacaatttttaaggcaagaaattcacacataaattaagttcccaaataattaagaattggagcttgccaattattctttgtcggtagtacaagtactaaaaatgaagaaacatctaaaaatcaactgacacacatctatgaaggtcctttgggttcttcaaagattgaaagggaataactttctttctatgcatttcttgaactgattaagtgaatgacattccaatcaatcaaaaataagattattctttgtgtctttgtacttaaaagaaataataaagaagaagtaaaataatttcttttatatttatatatatatacatgtacatgtaaagcctagtatgtaatcaaattgttcagttacatgtttagactgacataaaagacaagaccataaaaagttgtatatatattcacacatttacaatagagtcagtcagtcaatttttttatttatttttctcttttcttcttaataataaggtgtgttaacaaacatgtagtacctctctaaatccaactctgaaactattactatgtaatactttatccaaatcagcattgtctttctgcatcatggctacaaactcattgtaatctattcgaccatcctgaaacacaaaaaaaccaacaacaacataagtacttataatgtaacaaccaacaatatatacttacatgtatataggatagttttatgaggaaaaaaatgtacttacattatcctgatctatttcttgaatcatttcttccaaatggaaatcttcaatgccaaactcctcgaaggctcgttgaagagcgtcttgagtgatgtagccgctgccttctcggtcaaaatatgagaaagctgcaagtaaatgatcttccttgtcaattttattgaaatggaaagttgctgctatgaactccccatagtctattgtaccactgttatcaaaatctgcctgcagttcagatgaaaagtaacaatgtatgattagcattgaaggagttgtaaaatacagtttatgtatgaactaagattagatttataaatcagttgtacataaaacacagactaggtgaggattcctctaaccgattaagtggatcgagtatacgacttaaattagaatttccaagtttgatttgtgtaagataaaaactgagccaatgatgatcctgatacttactgactgcataagatgatgaatttctgactcttttagattagcaccaaagcttttcagttcttcaaaagtaatttgaccactattgtcagtgtctatcattctaaacatttcctttagaccagcaatttcttcatcagagaggttctcaacaatgatctgcaagaagttaatcttagttagtcaagagaaaatgcacactgtccatgacaaaagctcaaaaaacaaaaacaaatcatgattgtttatcgaattgacttactctaagtgccattttctttagtttgttcattgcagaaaactgatgcatccgacttaaaactgctgaatctagaggcttgtctaacgccattccatcagcccgaacccaagggtggcctgcatgaaatcaaacaaactattatcaaatccgaaatgctcatagtgtaatatagatcattatccacacagtttgtagccaaacttacaaagaacttcatgagcagttatccgctttttagggtctctaactaacatcctcttaaccaagtctttcgcactttcagaaatactaggccagggatctgatgagaagtcaagatcaccatgtaaaacctcctcaaatatctcatgctcagtttctaataagagaaagaaagaacaggaaacatgtcaaaactggtatatatatagcaataagaaaacatgtaatcaaacttttagacatcagaaaaaccttaccaccccaaaatggaggcaccccacataagagtatgtagacaatcacgccaacactccaaatatctgcttctggaccataatgcctttgcagaatttcaggtgccagataaaatgggctaccaaccacatcgctgaatgtttcccctgtcattttgagtgtgtcagtaacaaaatagaaatgtttgaaaatgggaaggaaaaacattaatggaatgagtcctcaactaaaccattgacaaataatcacattagtcaccatggccacatttttgtctatgagaaaagtcaccaataacaactttatagtaatagtaagaattattctaaaaagcatgattgagaaagttatccctacctggcttgaagaatacagacaacccgaaatcgatggctttaagaggagaatcctcatgatcattgacaaaaagaaaattctcaggcttaagatctctatgcataacccccaaagagtggcaggcttctacaacaccaactatagtctttgttagctgagctgcctttctctcagtgtaatgtcctctcttgacaatcctatcaaagagttcacccccagaacataactccatcacaacatgaacagcaacagcatcttcataggcccctttgattgaaacaacattagaactccctgccaagtggtgcattatctgaatttccctcttcacatcatccacatcatcttctgtgagcaactttcttttggctaaggatttgcaagcatactcttttcccgttgttttctccacacaaaggaaagttgttccaaattgaccatttccaagcttgtgtcccaaattgtagtactccttcaaatgtcccgttttcgtctgcaaaaccgagtctgcttgaagccctgcacttactgctctcttaacattatgagccttctttggctttgtttgcatattggtcttttcttggggattaacagtagctggttcagtctcttccttggggttttcaggcttttctggttgagtattatcttgctttggctcaaattgatgttcattcaccatttttaatggtttcggggcaatgttttgagcgagtttaccaggctctgagtcatgattcttgttcaaagtagaacctttacaagtagtgatgtgtttactggtatggaaaaccaaacaatctgaggtactaggccaccaaattgaattggaaatcgattgaaagagtccctctttgaaaacccttgagttgacacaattatttcccatctggggcttaaagtctacaaagttatccttaatgaacatctaatgaaacacaacaaaactctcatacatacaaacccccaaaaaaaaccctgcttttttctttcctctgaaagaaaattgccaaaggaaacacttaaaacgaccaagaacaagagtgttacattaaaatttatgaagaactcaatgtctaaaacctttagaacgaaaacgaaaaagtcatcaaagataaattaaaataagcatcctaaaatcttctcaaaaacgccattgttgaaccatttcaaataccaaacataaatagggaaagaaaagaaacccaaaagagaaaaaactcaaaaaaaaaaaaaatgaaatctacccttatgatccaaaatggaaactttgacaaaacccaccaataaaatccaaatatattgacaatatcccgccaactgattgaattttcctctgttctagttttttttattcaatgaagaaaaattcagagcatggaaatggttagaaaatgacagaacaaaataccaactaagaaagaagaagcggtcgtcgtcgacagtgtttgaaattctatctttttgtttcccatttatataatgaaaacaataactgaaggtataactatatgattattgaaaacatggaaacgcggaaaagagaagaaagaagaagagaatggttgcaacaatacaggtttttccgttttaaatgtttcaaaatatagatttgcagttgcagaggagggcgacgcgtaaaactaaaacctttattctcatatgtcaccacaccactttaacacccttgccactcgtgttgtataatatatatatactaatgttgacctcaaatatttatacaatatagtatgattgtgatggctatacttaattgttacaagatcttctcaatataaatataattaatgtgacaatatcatattagttctatagacaaaaaaatatttttttatacattggattataatattaatatggtatggtattaactggatcctagtgtcaatgattttttttatatttttatttttttaaataattgtgacttagatatatatattttagtaattttacaatttataagtttaacttctcttgtaaatatataattaagtttaatttttaacagtaataatatttaaattatatttttagaattccataaataattgaccgttaaatatcaactcatttttcacgtgttattttttttattaatatatttaaactaacttttttaaaaaaaaataaaaaattaatgaccgtcagtcaagttcctacacaaattttaaaattataattaaaattaaatatttatttataactgaaaattaaatttaaatatttatacaataaattacttttttttttctttgtcttgggatgatttgagtcatttgaccgccatagtaaagttcgtcgggcttttatactgccggcgtaagcctttttgtattttggtatgatgttcgaaaggaacaaattcttcaccaaaaaaggttgtatcatttggaccaataaaagtgtgtccaaactattattgcttttactcaaaatgtcaaatctatgctgttctcaatccaatggttgacatttattttatgagtattgctattaggcataagtggtgtctagtactttctcgacatattgcgttacgattgactagcgatacttcctaaaagctattatattaaattatatgagacccgatatttagttggacataggaaactactaggcaccactagtgccctttagcaattctcttattttataccattattcatgggaatttaacacataagggcaactccaataaactcaaatttagtgttaaatcaacatcaaaaggatactatttcaacacttaatttttttttttaattccaattacaatactaaaaaatatattctttatta

SEQ ID NO: 299435 - DNA, 5485 bp, Cannabis indica
tttttttttttttttttttatattacaagaaaaccttgtatcttatctttagtggtctggttcttgatagtttatggtgttgtaatgtgtaaataacttgtattgagaaaatttgcttcatgcatgttttagttcttggctatgttagttgtgtagtgacaaatctatttggtagcaaggtttacaaaaatatattgggattacagttgatttcctcagttaagtcgaatgtatgttttgaattggatggggggtgaaagtggtgcaatattcaaatgggattaaaataaatcattaaattaatgtatatgtgtaattacaagttaaaacataatatttatttaggtgacggttggtaacactttttatttttaattttttaatcacaaaaatgtaaattaaaaattttttgtttttaaaattttgttttttagaaaaactaaaaaatgtgttctgtaaaatttgaaacaaaaaaaactaagaaacaaaaatgcgttacattaaaagtagaattctatgcgttcataaaaagtcacatgagaaggatgaccaagttcaaaaaactgcatagaaatttgaaaaacataaaaatttaggggctgattggttggtgattgagaagttgtgttttccaaaggagtaaatttgaaacaaaaatttgaattttgtatgtgaaaaattagttttaaaagcctgattggcagtaatgatgccatgagtttttaaaaaaaaatgaattggtgattggttggtaatctcaaaacagaaaagtaaaggaatttttgaagggtttttggaatcaatgatttgaaaactcaaaaatcataaaaattatgttttcatttttaagcctaaaacttaaaaacttatttggatttgcttttaaaaaaccctagactcccacatttaaatttacaaaatgataatttttttttttcaaattctatttcaaaatgacagaaatagtgcagaatagaagttacattttatttctgtgttttttattttattttgttatattgttatttgcttttcgttttccaagatctaattgtaataaaaacgtaagcatttaaagaaagaaacaaaataattctcaaggtaaatgttaaacaactaaagcaaagttccccaattcaaacccatgtcaagtatgtttcaaaatctaacaaatcgaatgcttcaataattcgatcaatcaaggtgtagatgttgaacaattctgcaattttgattttagttttttcctgcaccgcagctcaactaaatgggtttgaaaatgcaagtgtgaaatcgttttttttttaatcggcagttatttttgttgcttcattcttcccttcctcacagtattctattacaattagaattttcctgggatctatgtgtgaggagtaacatcttaaatttgcaggcaaaagaaaagcaaatacagcgtgttcgaagtatattccatcgtcaattgtctgtccctcatttagatatgaggtcaacacttcttgcttacaagacctgggaggtggagcagggaagtatggctgatgtccaatctggtgacttggatggggtgccttctcatgttgcctcagcataccagaaggcattggatatgtataatgctcgtgttaatcttgaagaaaagatttctacgctggataaagctgacacagaaagattccaagagtacatggtacattgatttagaattattatatataaaaattcagattttgcttttacttttctttaaggttgataattatggttattatgttatttttatagaaaagatatgtttgatactcttgcatggaaaataaaataaaataaagcaactactttgactatatcgctcatggatgtataaatgattggatttaacatttatgattttacctacattttttaggttactaaattgcatttgtgttcattagaaatggtagtcttgctaccacttggtgctcatgtggtttggtgtgagtgtgtggggaaggggggaaggggttcttgtataaataaacaaataaataaaaaaggaaatggcagtcttgttttggaagaagtttttctctcctcctgcaaggaaaaaataaagccactagtttgcttatttctttggtttcattatttattttttattttttatctgattctttgttttaaggaatattcattcatcctgcagaattacttgaaatttgagcaatctcttggagatccagcacgtgttcaagttctttacgaacgtgctattacagactttcctgtatcgagtgatctatggcttgactatactcgctatttggataagaccttcaaggtttttctcttgtacacataccatattatttgtttatttaatcatttttttatggctgtaatgcgattgtagttgcaaacttttatatctcttttgtttaggttggcaatgccataagcaaagtttattcaagggccgtaagaaattgtccctgggttggacaactttgggttcgatatttgctctacatggaacgcagccgtgcctctgaaaaggaaattgctgctgtatgtgttggatcttgtactagtacacctttacttgatgatatttctctttgaaatgaagtaaactgttcaaattttcattttcctgtttgatgtctttatcaatgaaataaattactagctggtctgtgcttatttatttaatattgattatttttgggtggggggtggggagagaagggagggattgtaaagccagcttttagttttccatacatttgcttgctagaaaatctgctctaagaattgtagtgtacaaatttcattgcactctctacgaaaaattcctgtgtttcaccttttatcttcttaagtgggtggtttttcttattcaattttaggtatttgagaaggccttgcaatgcactttttccactcttgacgaggtacaaatttaccatgctttgtaatttaccgttggctgttccttattcttaaatgcttctggatgtgagtgcttcatttttggtacctgttattgtcagtacctggatttattcctcactcgagtagatggcttgcggcgaagaatcttgctcagtagtgaagttgaggatgttttggattattctttagtaagggaaacatttcaggtttgttttatatcttatttgtgcatcgcttctatttgtttagacttagtggagttaaggataaagcttttgttgttagcttgttgtattccgagttagttattcattgtttttttaatttagtcaatgttatcttcttatttcatggttttgagtaccattattcccttgattgtctaaatcataattctataatattttaaagtgggggcatacttgatttcttgaagagtttatctatagacttagatcaacatgtggaaacttccaatcttgaagttaccatttgatatacctaagagtatctccaataagtgatagaaagctaaattatagctcacttagcaaaaaatgtgctctaatggtgtgccaaaatgtgatgcaaatttggcacatagcaaatcttgtgccgaatttggcataacatttgctgtgatggaaaatttgtttcacaataaatgcactattttatttacatttatgccagttgtattattttattagtttattttactatattattaaatttagtattcatatttttttttattgttctacacaataaaataattataaaattaatggtaaaattattattagaagttgctacatatttctacaatagtaattactctagaatgttctaggcatttgtagaaaaaattctctaagaactttagtgatttctagatgatagtctttactcttaccggtactactttaattaatgatgcatcacttgatcaatttaaagaacctgtgaattcttggcaatgtatattgatccataatggtttcaaaatatgcaactttagaaatcatgaggatattctagccctatataaccaagcttaaatcccctaaatcgtacttggttagacaaaccaaaaaaatggaagtgatcctctcaaattatcaacctactgaaaatttgaagggggaaaaagaccacttacttaaggcctttgagcaaggtggaaaaccctattaattaggatggataatgtgactgttgagatgccataggaaagctgaaatgggaggttgcaattgtgcattttcattggccttcacaatatgcaattgaaatactacaaggaacccttctggaatgtagatactcattggccataatagaattaacaaagcccaggaacagatatggcctttctgggagtgcagtgaatgctataatgggctatggttattgtaaatagtattgtatttctatggttctgctgaagtaattatactgagtttgttgtaattcagaacaattcatgactttcagcttgcatcagattacctctctccacacctgaagaacacagacgcttttcttcgactacatacttattgggcacgattagagctaaccctaggaaaagatttggttgcagctcgtggagtatgggagacttttcttaagatctggtttgatcaattaattctcatttacacaattttgtttgctcgctaaataaaccttgttcctattttttaaaatccggtacaatactttccatttactttcagtggttcaatgctggaagcctggggaggttacatagcaatggaaatagagtcgggtcatatcaaggaagctcggtccatatataagagatgctacagtaaaagatttcctgggaccggttcagaggtagtgctttttatttttatttgttatttatttcattttgaaatttgatagctagttactatttaagaaaagaaatatacacctattagataggttaggcataaagctggggaatgctacctttttgctttggttgttgtgggttgggatttaaatcggggttggtttctagctggggagtaggccgtggttgtctaatagaaatttaaaggctttataattaatgtccaatacggctttaaaaagtgttgatatttgcttaatcatatagaagggttgcttaatcatatagaaagggagtaggccgtggttgatctttgcttaatcatatagaaagggttggtttaagttctggcgatgattgttgaacccaaaatattgacaaggaataagcctttcatttgaatattaagtattttaaattagatgataccttcccttcctaaaaacagaatcattcaggacatctgccatgcttggttacgctttgaaagggagtttggcacactggaggatttggatcacgcaacacaaaaggtatgtgaagtctttctatttaaggttatgctttggaactctttctattaaaggcaaatgaatctttcagatgactatttagaataaaaagtgtggagaaatgggatacaatttccattcggacatgtatttttttttttttttt

SEQ ID NO: 299436 - DNA, 1683 bp, Cannabis indica
gtaaaatatttccaacagaggtagcggtgtatttgggaagatcaagacgcaatttgaggaatataaatagattgacaaggaaaatgcaagcccttttggtgaattttggaaggtcggacctctcacatttttgtcagtgtttttcaccaagtaatgctacataaaataaaggttgatgttgagaaggcaggagaaatacggttttacattggccggaacaaggtcagatttagagtagttgagtctccactcattacaggcttgaacttaacattggggccaacagaagaggagaagggttcctgctcggggtcagaccggttgatcaacaaatatttcaactggtatgaaagtgtgaagaaggaagtactttaggagaggttctttcttacactgcgagaatctggaagacgtgtacaagttaggtttgtgctcatttgtggaggtagtgttactgggccgtgagggtaacacttacatttcttctagcatacttgttaaagatctcaatttccttttccagattccttggggaagtactcatttgctagaaattatgttcacccttcaaaatggcatgtgaaacaaaaagtaaattatgacaagaagttgagtttagatgttcaacacgagtgcaaatacacaacgtatggcttcgcacctgcagtacagtattaggcgtacgagtccattttagaggttaggaagaagtgcggtacgaatcaagggattcagtttctaaggatgcttagttggatcaacaagggtgagactgggaagaaggagctcagtgcattatttttgaaatgggtatgatattttcttttatgtttagagcaattattcaagagaaatgtttggaataaatgctaactcatttttcttttatcttttttaaatcttagtcagtaacttgcagtaatgaatggactatttcctcacccggatgaggaggagtattccaggaccatcacttatgatgatgtggagatctttattgaatttggtttggatggcacacagactgaggatgacacccaagaccctgttattttcaaaaagccaagcaaaaaaaaaagcagcggaacatgtcaaaaatgctcttatccccgatccagaccctcaacccattacatcatagccttaatacactgcatcatcttcgggccttggtggtgctaagtacaatgatttggtggagaggttggacaagattgaggttgagcaaaagggtcttacacttgtcaagtcgaatagaagtaggcatgttagactagtcatgtagagctgaatggtggccaaaatctcattatggagcatcgtagatccatcttgaatgtgttgtagagtaggctagtggcagatccaacactaaagccatcaacagatgcaggacccccaccacctcccatggaggaagatggattcatctttcccaacgagtatgatccctatgatgaggcaccaagagctcccattgatgcacctattagctccataggtgatagccagtcacagggtgatgtgttggccttatagggacaacataaaggggttctatatgaccgtatgttatggattagtaaagacaattagtattaattattaatattttatgattatgcatgattttatttattatgggtcctatttttagaaaataggcattagagttataatttc

SEQ ID NO: 299437 - DNA, 5866 bp, Cannabis indica
gcaaaaatactaaatatatgtatatatatttattgttacctaaatttaacataaaatatcatatttaaatttgacatatatttacattaatcttatttatcaaaagtgttgtaaataaatagctagtaacacaccactttaatagcactccaatcaaaattcttaagtattattttatctagtgttggatatttttaacagcgtttcaatttctatttttattataaatataaaatatgagaaatgttaaaaaacagtaataacatttttttgacatgtcttattattattagtgtatttaattttataatttaataaaaaattttgtatagagtgtcaaaaaaccaataaaacaccacattttaatggtagacaccgttagtgattggtgtattgaattgactaaaatgtgcacgcataaatttatatgtaaggagagaaccaataatagggaaaagaaaagaagaaatatcttcaaccgaaatattagttattagtcggctgtattggaatttaatggtacaataaatgttcttagatgatgaattggacaagttagtggcatttatttgtattgaataatataatctctcccataccatggagtgtttacagcttcaaatgttataaaaatggtggattgtaactgtgtaacatgagtgatatatttttttttttatttttgaacaataacatgtgtgataatttgagattataagttttactatttttattaattgatttgtttaaaaaaattacaaaacaaaatttattgtctattcgatatggataatatgtctatctggcaactaccctactattgtgagcatattaatagatcttccatctttcaaatacaacataatatcttgtttaattgaatgtcttattttcatgtctttcaaaataaatatataaataaaataaaataatgaaaagaaatttacaaaatttaagctactagttgacttaattttaaaaaaaaatattaacagcaaacctactttaattatacattttattacacttaactctacaaattaatatttttaggaaaaactctctaaattgctattctgttttgctctttacttctccgcttattttttttaaaaaaattaaatgctaaaataaattgctgaagtatacacaaatatacacgtgacataaatgataaaataatttttataaaatttaaaataaaacttttttttttccaatttttcttttcctttttcatttgaacaatctcttaaatttcttcttgtccaaaaactgaaaatttgaacaccaattacttactcaagggagacattatccccaataatcctaagtgctccagtgaaaagatctaaacttaaaccaccaaatatatatagataaatatatattttgagtttttctgttatccgtgtttctagtaagaaatacgtgaacataagacaattacttaaagtccatcagtgggccctaagcgataaaaattggaccaagtccaatatcaacctagcctttcgagaagacacacttgcattactcaatcaggcgggtctccgtgccaagtgtagcctttatatgacatctattatttcataataatcgctgccatataagagctgatccgggcttagacaggttcttatgatgtcagttaactgtttcataataacttagcgatttttggaacgacaacgattgtaaatttctccaaaaccatctctaaaaggccgaaaaaaccgtctctaaaaacctttttatagtagttaaattttgaatttaggcaaagctgctgttttcttcttcttcttcaaaatagtaatgaaaattagatgcattaagaatagtatatatatgatgtaggaaatccatatataccctatcatatgagaaacgaagaagttagttattcatacatagataggatgtataggaaattaattacactatacatttacattgctagctcacacctttattatttttaattaattgtatttactaaaaagtgctacaaccacgcctgcaccttttctttttattatctaattttaattacagtaatgttgtcacgatgtaattaataaaattttgcattttttctaattattctgtactgtgttttctatttatatgttgagtactttgttttttctttctcttaagattaatttgtggtgttagtaccaataacgtgtttaattagaaatcgatctaacagaaattgttggactaataaggcctaatcatcaaagcatgcatgtatggttaatagtatatgtacaaggactaatcaatggtttatttagtaatgtatttaattatgagtccaagtctgacttcgacacatatataaatataattgggaatttgacgtaagtagttgtaataattaattgtacatatgggaagtagttaggccaattcttacaactagaaagaaacaaactaattagcattgctattgctattgctattgctatttaatgtatcaacttcacatacctaatattatattatatgatattataccagtacaatgctttattgttaggaaaaggttgataaaatatttaatttctaggagaggtttgataaaatatatgtgtattaggggagatatagcattgctgggaatggtcttaattaataaatgagggtggtgatgatgagtgatcagccacggaattaggaaagaaaagtgttctagttaaaatagtatttatgaattattatgattgcaaaacgactataaattacattgtgtgatcataaatagttattatgatcgtaaaatcataaatttacattgtgtgaccatcatagttttggatagaataaattattaagtaaaattgttttataaattttgtatttgacattgttagttagacaaatttcatctagagcagaagaaatgctaaacaaataatattttttatttaagtttgttttatattctccttaacaatatacagctatcatagtatcatttaacatctccccccaaaaaatatcatttcatttataataaaataagaaaatgttggtagtgatagtatcagacaagctctcaggaaataatatcattcttatttggaaaaaattgtagtataagttttaaaaacttatagttgatgcaaataagtcattgttatagtacggattttttacttaaaaatacgattacagtctcgtataaaattcacgtgaattcagtttccaatgaaaaggatgacgtgttaatatgtagctcctatagaggttaccttacttgatgagaactcgcgagataatgcgatcgagacaaagtctattgaaatttgaacctgtaataaaaaagatgtattataagtccttaccaatataccaaaagattattttaatttgtataaattagcttttataattttatttaaatataagaagtgatataaatggaaattgatattgcacattttattgtagtagaattaacaaatacattctaaacattaattttaatacttaacataagaattttattaatttattttaagtaaaacaactaaataaaacagaaacagtttaataaaaaaagtgcattataaagaatttagtatacaaaatagtatttttaagacaaaatgattggacaaaataaatagaaataaattaggaaacttaattacgttcataaatcaagagaaatgaaaacggaaactagttaggttttctcttttctccgtgtaaatctattcacaaaatttaggggtatgatcgagatttacatgcttgaatatttagaaaaaatatccttaaagatattctagtctcatttactctgatcggttcatgcgagctgctgattgcaaaatgaatgttagtcgtatggtgtaacatatcttgtccggatattccaacttcatcaaaccaattgaaatcaatcactctagaaggtacaccatgaaaggaattactcgtttagattaggaaatcctccccatgtgtcacccaaattaatatcacgtcactcaatctaaaaattgggaatacattgtaaccaataatgtaaccaacttaactattatcaccacaaattactcttataaatgttacacttccacaccgagacttgagtagtgacaagccagcccatacatttttgctgctcttatttcattttcactcacatattatttcatcactttctcatttttttgagttcgaataatcttattaatcggacaaaagtaggaggaaaagcaacttgagaaagagagaaagtaatgaaattacctattatataataataactctatgtatatacgaataataatcatcacaaataattaacaaaaataatcacttgtgagttatcaattataactaaaaattataaatcaaatagcatagatagaattaacttcagtctcagaatccgagtgatgatgatgacaatggtgtgatcctccaacccttttctccttcttcctcactttacgaaaacgcttagacttaacaacataataagtcatggtgccaagcacacccaccatcgtcacagtacccccaagaatcgcagcgcacctattgcatcgaccaaccactatatacgccgaagaaataaaggcaggccaaccacatcaacttgtttatcacttcaatcactcttctctcggccttggtctcccctctaaccaccgtgatttgtactaacacaacagccaatgacgtgaacaatgcaattgcattgaatatgaagaatatcttaaacgacgtggtgttcaccatcaccgccattccagagtcgtcgtcgcctctaggaacggtgaagatagcggcaaaagccgctgttgcaaagaggacaaccacaactgtgactgagtggcgttgttgattcctgccctgtgcagtttgcgaagctctttggcgcgtttttgttggtttttcgggtttgttctagctggatgtgtacgtcctttttgatctgtgtcactgtttttcttagctcgtctcgcggttggttgagctcgttggcttttacgccgccatatcgagctagagtttcctttactagtgatgtttcttcgcatagtgtaaggccttcggctatgtcgaaggcagttttgtgctctcttgttaaggcgtttacgtttgtatctggcagggataacaactcactcactatctgcaaacccattatatataatcattattaattaattaggtgatgtaaatatcagaattaatatttatattcttagaaactatttagaaatgtgatatattggaatatattattttacatagattaaatgtaaaaagtaaaagtactcaacaatatataacaacatggcatacactctcatcaccaattagttttgagatgaaatcctaacatggtatcagagccagctaacggattttcaatccacacctatccatatgattagccaaccgcacgagattcagatggtgcaaagacgcttaaaatccgaacaaaaataagctagcaaatagcataacttgtgataaggtgatttaagattggtgagtaaaattagccaccatcttaaggggatattagagaatattgtcccacatagactaataatttaaaattaaaaatattaagccatatataagaacatcaattaattacacatacttatatcaaaaactattttaatggaaagtcataacctacctcaacaatttctgccaaaagagaaagaacacattattaataaactcatttaattttgactagtcatggcaaaaagatccatttgtttagatcgggtcagtgatccgatccgacagatcattactgattcgaagcatttggatacttattggatcttggatcagctccgctccgccccgc

SEQ ID NO: 299438 - DNA, 1348 bp, Cannabis indica
agtaacagatttagtgctcagttagtgagtagttcagttaatgcaatttgtactgttaatactgttagttggtttattggcctttagctttagttagttcagttaaattagatagacttagtttgtctaactttaattatattcattattggttcttgattagttagattactctagttagctcaagtctgttagtatacatgtaattgtcttgtgccaattctgtatacaacttctttattttctgcaatgaaagttttttccttccttcattcttctcttaattcattccgcaatatagtatcagagcgaaaaagataagcttttccttaaagcacctgttcttcttcttccttccttgttgtgtcttcttctatgacaaaggtggtgttctcaatttgtgttcttctttgttcttcttctcatcctggtgtttctaggttccttggagtcttcgtctctagctcagctcaataatgttgaatgatgatcaatttgtccattctaaagttcgatccacaaatccgcaagttccttctgctcaagacaactagaatcttcaagccatcaatccaagaaatcctcttgaagatccaactaatccatattacctttatcatggtgacagtctagggaatactctagtatcttaacttctaattggtcaagacaattatgtgtcttagagtagagcaatgcagcttacaatctcgatcaaggaacaagattgggttcattgatggttctatccctaaacttttaccaaatgcttttcttctatataatgcatgggttagaaataacaatattgttatttcttggattctaaattctatttccaaaaaaaaaaattcttttagcatttttttatgatgacagtgttgtagcaatttggatcgatcttaaggtgagaattcaccaagaaatggccctcgcatctacaatttgggaaatggtctaataaatctgaggcaagaagctcaaaccgtaagcatgtatttcactaaactgaaaatggtttgagaagaattgtccaattatagaccttcatgtacctcctgtacctatctcatacacacataattgattatccctcacatatacctttcaccactggtaccaaaagttaggattgcgcataaaatatagaaaattgaaaaaactattcaaacagacttgccgaacaccgttggaaccgaaaactgaaaaaatcgctaatggttaaaatcgccattgaactgttggttttttttcggtaataaaccaaccgaaaaaactgaaaccgaccgttataaatatatatatatacattaatttattaagttttttttacttttattgtattgta

SEQ ID NO: 299439 - DNA, 5491 bp, Cannabis indica
ggtagaatctgtttacctgtttgtgccacatttttattacagtgtgatgtgttattcagtttggtcgtatttggactggtttgttttcaatataatctctagattgtggctgtgattgttgctgaatttgctacacctttttccaagtgtttttcaactagtgtttattgataatcttttctgtgaaactgcatacaatactgtgttccatggcaactttgccaggtcatcaaattaattttgattacctcttttccctgttgcctatattatttcggccaatgcatggactgcttttgggtcatttcttttggataaatccatgtaccttgtttgagccacatttttatatatattttgttcagtctggctatggagtatttctttgcccttagtgaaaaactcgaactcattttttgttctgcacaatctctacatgatgaaactattaccggctacggatttagtccaatgaagctattttttgtcatagttacactgatagagcattaccttaatttttgtagtcttgataaaattttctttcaagcatcttctaaagaggcatagtacatttccttcttctcttccttcctatcctttcacacgtgtcacagaggaagtggttttatttgtgttttattcccaatgatgattatttatcaaaagccatggaccatcgtccaagtgatgcttattgtcatagttactctgattggggtatgttctgtctcacttgacagacttttttttcaatgtattttttttttgtagtagtcattatttcatgtgtttaatttgtcttggagggagtacgtctgttttcccacctttgtttttacacatttctcctttttatttttcggttcctgcattttaaatgtttaagattctttttccacaacatatattttcttttctgtattattgttaagagtattgccattttctaatttatcttcagatttttatagtattgtttattttccccttcagaacaaggatgtaacagaagcaatccagaaggttgctgctgcttacgactgcaaaattgttgaaggtgttcttagccaccagctgaagcagtttgtaatagatggaaacaaggttgtattgagtgtatctagccctgatacgagagttgatgatgccgaatttgaggagaatgaggtctatgcaatcgatattgtcaccagcacgggtgatggcaaggtaattggtgggacttgtatgtagttatgaagatgaaccggtttattatacttccgcaatgtttttatctctatgtttgttccatcataatttttatccttaaacttgcagcctaagttattggatgaaaagcaaaccactatctataagagagcagtcgacaagagctatcacttgaagatgaaagcttctaggtttattttcagtgaaattaaccagaagtttcccattatgcctttcactgccaggtcagtcgggatgttaagactgttaaatttattcaatatgtattatattctcgtttcttctactgatgttatcttcttaataaatgttgaaaattttcttcaacagggccttggaagagaaacgtgcacgattgggtttagtggagtgtgttaaccacgaccttttgcagccgtaccctgttctccacgagaagcctggtaagagttgattaagagaaggtgttggtacacagaatgtgcctgatatttagttctctcaattctaactgttgttttcttggacaggtgattttgttgctcacatcaagttcacagttttgctaatgccgaacggatcagaccgaatcacatcccattctcttcaggagttgcagccaaccaagactgtagaggatcctgaaatcaaagcctggttggctttggccactaagtcgaagaagaagggtggtggcaaaaagaagaagggtaagctatttgaatgtgctaatcttgtttcatcttataagaacaaaattcaaaatctttatagtgatatcccttaaacctgaccattttcaccattgcaggcaagaagggggagaaagctgatgagtctgcagcagaagctacacctatggatgctacaaatggtgctgagtctcaaggatgagtcatcatttttttttcctttcatatactttgtttgagcccttcttttctttttttgtcaattttggcacttgcttcttctccccattgtatctggttggatatgagttagtttaatacaagaattcagacataaatccgaaccggatgttcccgagttggcttcctgtgactcttacgttgcttcttctagaatttatcattttattacaaacgtgaaaatcatagcctaagctcaagttttttcttttcttttaactttaattagaagctgttttattaggttaagtgaagattaatcaagtacatatcgtgaaaatcatatacccaaaacacttttttttccattaaaccccaactacaagggtctgcccagtaatcaccataaacatttaacatcagaaaactcataaggaggtactgaagacagttttaggaccattgactccctgaaaatcttggaaatcaaccaagaaatgccaagcacagatcgagacctcaactttggactctgactggcttctgtgaacaatggatataattggtttaaaaaaatttgccatatgtgtgtaacacttatattacacgttggagcacaccgaacacctccgcctgtctaaattttcaaatgttggcaataatgaatcatgaagctctctttaagaagattttctttcacctaactaggaaagtcaagtctccaccttaatacacatgcatcttggtacatcattgtctttgcataggccgtgtgtgtatgagcattggattaggccccgtgtgtgtgtgtggatgcctctatttttgagagtgaaggcaagcatgtatgagtatcagagtatggtattgtggtctgagatcatcatggacagttgttggaagctaaagagctgccgcattgtgggaaaggtcacactagagctggcagaggcagtggggtcaatataactgagacggattgtcaaaattcaaaaattagtcatttttctattgttgttgttaagcgatttgctaacaagataacttattatgtagttcgagtctcttgtttaacctcaaattgtatttatagagcgagtgatattttttctgttttgttacctaatctccataattctttcgctaataatatataaaatagtttcaatattacctggtatataaaagtttttttttctttttcaatttaagccttattaaattttaaaattataattacacacagggcgggaaattggcggggagtgctccctcgactccatcctcacttattctccatcgaaaacagagcgcgttgggattcccctaatggggaaagggcatggaatcccctaatgtaaaaataaagttattttaaaaatttaaatgtataaaaatattaaatcaaaaataaaatattacacattattcattattcaatatattaattattatacaaaacataacttaaaatattataaaaatgacactaatataccaaaaaaaaaaatacaaacacatattataaaatataaaatattaataaaaagataactaatatattaagcggattcccatcaaggtggagagtgtaattctcatccccgccccgtttaacattcggggacaagaaatgatccccgtcccagccccatttagatggacatccccacccattagggatggatccccgggaggttaatcttcatggtaagaatgtgcagccttaatttaaatataatcatgttaaataattctgcatgatcaatacccgtaatgtggatggtaaatacctctctatagatcaacaataacaaattcaattaaaaacatacatggatgagatcaaatattcatttgtattagtacatataaaagatatatactagtataacatacatattataattaatgaattaattagtagtacaagcttcaactttatagccacactcataagcatagtcaacaagttcttcaaactctttatcatcgttgatattaacatagccattgtgttcgttgtgtgaacgaaacatagctatgttagctctataaaacccagaagaagagccaagttccttaaacactttctttatatcattcttggacaatttcccatctccattcatgtcatgccttttgaacttactcattagttgttctttgctacattgggtttgaaccttttgacgttggactaccactgttttagtagcaaagtggacttgtataaccattttaattaatttcttatatatataaacacaagagaaattaataatcaagtaggaagaagaaacaaaccaagtactaataacttaagtacttgtgtgttacaatattagtggttatgataggaaccccagctctcttgggttatatagtagcaaaaattaaatattttttgtattgattattaaaaaaagtttatgtatgtatagatgctttcccacattgttcatgctttgttattaggcacaagtatattaaaaaaatttaaacaaagatttaataattaaaaagttagagtgacttaattattattaatttagtaattggaaagggaaacacttgcctcgtttgagtcctttggtttggaatcttagatagttctttcattctatatatacatataaagttaggcaaaattactaattaattaatatctacatagaaatattataatggcttttcatttattttcatggaatgcatgtgtttcattttaatcatggagtaaaactttagcttaacaaaacaaatcccatgatcggtacagagaaaagaaacaatacttttgttttgtatgtataatatactattattgataattgagtgtggaatcttaaatattttaatttgataattatcataaatatcactacattcattgcaccacactcaaacataatgcataacagacagtacgagataccaaaaagcaatgaataatggtcttcttttaaagtcatcgtatttaatgtgatggctaaattttagcttatttattgatgataaactagcattttacgagacacccataatatctaatacatgtatttctatagattgacgattttttataatatttattaaagtaaaataagtgcgattcaatattttttttttttgagtgcagcgtaatggtattttataatcatatattgaggggtgctaaggagactttcttttacactctctctataaattagtgacaaatgtcatcctttgagattagtgtatttatacttaataattagacataatattattgtattattacatttatgtcattataataaaattaacctgctaattttttacttagagcaacttcaatgccaaaacttaaatttagtattaaatcaaaactaaaataatactattttagtactattttt

SEQ ID NO: 299440 - DNA, 4865 bp, Cannabis indica
ttacttatttatttattttgttaggaatttcatataatatagaggtaattttttttgttttgtattgaaatttcagatctgaaatatacatttcttattgatgatttgaaatagtgtggtggtggcggatccaaaactgttttggaacctatggaaaaaattgaagaagtaagaatttgtgatcaagacccaactaaagttattcgcataggaaaatgtgtgggtcccaacgaaagaaatgaaatcataagcaccatcaaagaaccatctgatatatttgcatagtgtcatggagacatgaatggaattagcccggatgtaatcactcatgtcctaaatattaataaggatatgcctccactacaacaaaaaaggcgtcctctcgatcttgtaatgtcagaagccttggagcaggaggtggataaaatgctatgtatcaacatatttagttatcggtaagtaaaatcagagtatggtcagcaggattacgtcagtcttaaaagactcataaataaaaatgagaggacataactacgaattttgtagtggaattaccaaagactacagagttatataactccatcagacttgtaattaaagaatagaatgaagtaataacttttatttcttgttgatttgatcagtacaatttgtgaccttcatataggtataatacacaatatttataatatataataaagaataaaatcccacaaatcaagagataataaatttactgctttcactcatatctttgacattatttgctagctatcaacaatcctcctcaagcttgactatagatgttaataagtccaagcttgtttacgagaaattagaacacttgctctgattttcccttagtcagtatatttgctagttgttgattcgtaggcacatattgaatgttgataatccctccatcaacttttcctttgataaagcggtgatcaatttctacatgcttagttctatcatgatgaacatgattatgtgctatactaatggaattgttgtcgcataatagttttatatgtgcttcatgatttatctttacttcttcaaacatccattttatccatatcacttcacataccttgtgggccataactccaagctctgcttcttcactacttcttgcaacaatagtttgcttttttacttatccaaataactagattttccaatagtagggtacaataacttaatgtggatttcctatcatatttatcctacccagtcagtatttgtaaaaactattttcatttgtttacttgaagaatagtcattttctggagtttgtttaaggtatctcaatattctatacactatgttgagatgaccttgataaggattttccatgtaccgacttactatacactatgtctggtctagtgtgagatagataaatgagcttccctactagttgttggtatcttcctttatccacaagatctccttgacaaatttatgtcttacctccaagttcaattggagttttactcaatttgcaactaagaattccagtttcttctagaagataaagagtatattttcgttgagatacaaaaatgcctttgttgcgtatagcaatttctatccctagaaaatacttcaatattttgagatctttgacttaaaactcctttgttatcatttctttcacctgtctcatttcctcagtattacttcctatgacaataatatcatcgacatacactataagaattgtagtatttccttcccttgaatgtttaatgaatagtgcacgattggtttaaccttgtgtataaccaatactttttacttatttagagaatcaattgaaccaagctcaaggggattattttaaaccatataataacttaagaagccttcatacatttttttcaatatggatttcttcaaatcctggtagttggctcatcaaaacctcttctataagtttcccatatagaaaataatttttcacatctagttggtgtaactcccaatcgaggtttgctgcaagagaaatgaaaaccctaatagtattgagtttggccacagaagcaaaggattaattgtagtcaactcacaagtctgtgtgaatccttttgctaccaactgcgctttgtaccgttcaatagagccattagcattgtacttgattgtgaacacccatttgaacctgaccaactagaagtgaaagcattaactgaagatgataatttcgaaagagataagaattcaaaaataggatgttgagtacaaattctagttctttttcttaatgttattgaacatctatatcagaattagtatccaatttatgattgtctgacttatttggagatgaatattctatcaccgattcgggttcttggttttgttttagattcatgatacaatttctcttcttttttctcaagtacacacacaatactggttgtttaatttgaggattacttgtttcttcttcttttataatatgatcaagattatgagtagaagataggctaatagatgaattgttttagagtatggagacaatagtaggttgaattatgggtaactctaaccccatgaccactcagcttcattttcttgatgaacattattctccactgaagtgaagtggaggatagtgtttgttcaaagaaagtgacatcacgagaaaaaaaatatttttttagttacttgagttagagaatatctaagaaagacagttttgatagccttaggatcaagcttattgcggccttgggcatgaatatggacaaaggaagtccaactaaaagtttttacaggaatagtatttgtgaaaatttgaggatataactttgaaggatggaataaggagttttgaactgtagtggccgactagggagactattaataagatagttagcaatgagaacgacatcttctcaaagatatttaggaacattcatggtgaacatgagtgtactggctacctctaaaaggtggtgatttttccctcagcaactccgttctgttgggttgtatttaggagtgttcataaaaaccgataaaccgaaaccgaccagaccgtaaccgaatttttggttccacgttatcatcgaatttggcggtcggttttggtttttttgacatagcggtccgtttcaattttttaaaaaaatggttaaaccaaaagtctatcaaaactgccaaaaaccgcaataaaccgtccaaaactgcccaaaattgtcgaaaaccgtccaaaaccgccaaactaagaaaccactaaaaactgtcaaaaaccatacggtcagttttatatggttataatttttaaacgatcggttataaaattgtaaaaactgaccataaccgacagattttcacccataaaacacaagagctttggtgaataataccattttgacaaagtaagagcctaaagtggtattaaagtattttatttcattatctgttcttaggacacaaatagatgtttataattgggtttaaatcatttagtaaaaattcttaaatatttgatgtgtatcatatttatgttgaaaaagataaacctaagtgattcttgtatgatcatcaataaaggtcataaaccaatattttccttaagtggtagtatttttgaaggccctaaaatatcactatgaatgagggagaacggacttgagggtgtacaagtcttttgtagaaatgagtttcttgtgtgttttgcaagttggcatatattacaatgaagcaaaccatgatttttattaataaataaagctagagacaaatacttttaataagaaaacttagattttcaaatatgtagtgccatgacataatttttactaaaattataagaaatagaaaataagccagatgtacttagatggtgttttatttgaagcctagattgaagaaaataaagatcatcatgaagcttagcactactaatcatcctccctaatgatatagctcctgaatttgacataaatttagaaatacagtggttattagcaaggaatttgctaacagagattaaattgtatgataaagagggcatataaaggacaaatttgagaataagatttttagacagtcaaatggtaccaataccagcaatacaagataatgttccattagtaagttttacactggacttattagaacaaggaagataggattcaaataaataatgtaaacttgtcatatggtctgaaacacctaaatcaataatccaaggtattgaagaattttttagagaaataaatctgaatatgaattaccagaatgtgtcatagagcatgttgccttattatattcagatgtggaagaaggaggatccttagaagactattttagaagtcaaaatagttgttcaatgtgttccttaatgaatgaagatggatgattaggtgatggagtgtctgagttacccatgatctgagtttggtacacctttcaatcattctagtggcgaggattccaattcgctggtttcccatggatctcccaacaagtagagcgagtgtgtccatgacattgataatggtcacaccatgccattcacccttttgatttggttgtggatctgaattagacttgatgtttgatggctgattgtatcagtttgagagcaaagtagagctttttggtgtttgggaattctaaaattcaacatcagtaagcataacatgataatatgcttcctcacgacgaacttctgagaaagttgataaccatatagtatagagtaatttttattggcgttaaacttgatttaccataaaaagagtaatgaaagtgtgttgtttattaattttgattatttttcatcttaattttctgtttagtatgctagcttttgagtcttgtgaaattgttatcttttagtt

SEQ ID NO: 299441 - DNA, 1842 bp, Cannabis indica
ttaacgaagctggacagacgacatcttaaaaatgtaaacggaacagtacttttgaaggttttcccaccaaaatatgaggttagatagttttttgcaagtaaattgatagttggggaattttgctgcaaactactcttgtggaaaatattattgctctatctatataatgattaataattatattttattattatactaatattttcttattattctatcatttttgtaattttatatgtttttcttcgtaatataaattaaatgatatatcatttgtaaattgtaagtattattttttaataagagtcaagtatggtattcaaccacttaaattatggatgttatatatacatctaacaatatgagttatatatacatatatttaaataaaataaatatacaaaatgatcccactataataagtttgaatgatttcaaatgtacatgtcaatgtatatagagaatatttctcttaaattttcagttagacaaatttagaccaaccacacatgcatcagtatctttatcatggtcaaatcaattagtggggcttcatgcttatatagttaggccttaatcattgttcaaaacgcacacgagcacctatatatatacttaaatcattttttgtgggaacaagaatgaatgtaacatgaatccatgattgatcctttaatcacgtctaaaatttaccatacataaaatgtatttaaaaaatgagaaaaacgaggtttaccaatgcaccttaaaaatgatcagcttgcattggtcatctcaatacttcacagaattaattcattttcttactgtaattattgtcctatatataaatttaaatttatatatatatatagtaaaagaaattattcaatatttcagaagagttaactacatataattcaatcgttgtgattgaatacttaattacatataaagatatagtcatttaagtgatcacatgaagataatatattgtagcaaaatttcatatttttcttctaaatatgaaaaatattaattctttggttaacttcggttctatattcgatcgtttattattttaagtggatgttttttggtcgaatgaaaaacacatctcaagatttttttcactgatattaaaatatttttatgatcaattgcaatattaattttacgttctaggaattaatttatcatgtccttaaaatagacattgaattattttaaattaacggaataaatttctttactttggtattacttttctgacattgtatgtttactcataacaaaaataaataaattaattaattattttaaaaaaaaataatagtaataataataaataaatagacaataaataattgtagcaatgaatttagagaatatatttcacagtcgtaattcaatttgaaatgatcatactctaaatttcttttcaagtcaacgatgtgtcttaattaaattaacttcttaagagaattacaaggtcaaacaataataaataaatagacaataaataattgtagcaatgaatttagagaatatatatatatatatctcagtcgtaattcaatttgaaatcatactctaaatttctttacaagtcaacgatgtgtcttaattaaattaacttctaaagagaattacaaggtcaaacaataataaatacatgatgaccaagtcatgacacaagtatttgttcatccatgtatcattattgggcaagagcccactcttctatatttattagagagagttttggttaagttgtgataataaattaagggctcgtttggaacgccgtactaggtcgtattgtatcgtattttatattgaattgtattttatgcaatattt

SEQ ID NO: 299442 - DNA, 4074 bp, Cannabis indica
aaatcgttcaaataattatactattttaattattaattcaaataaaaaattaaaatattaaataaaactaacactacgtagcttgacacgtaacaatcacctagtatatatatatatatttactttacataagtaaaagtttggattataaatatttgttttcgttaaaattgttaaaacagatggaacattaaagggaggagtgaacaaagttgggatcaagtattacaatgatcttattaaccaagtcatctccaaaggttaattattaatttgaattaattaattaaattcttttactcttatttctcaaattactatatattgaattaatcatcattacttaatcaaaataaagtttaataaaattcaggattgcaaccatttgtgactttattccattgggaccttccccaaggactagaagatgcatatggaggttttttgagccataaaattgtgtaagctttctcaacaaaatcatatcataaaatattgaaaaaaatatatatagaagtattttcaagaattaattatattattaattttaaatattatgttatcataatttttgaataaagatgtaacgattaaaatttatgtacagcgatgattttaaagactattcagacctatgttttaaagagtttggcgatagagtgaagaattggattacactaaacgagccattttctttcacaactcacgggtatgattctgggacttttgcaccgggaagatgttcgtcgttgtacgttgctaacaactgcagcggtggcgactcgagcaccgagccttacttggttgcccacaatcaacttcttgctcatgcaactgcagttaacctttatcgaaccaaatacaaagtacaaatatttattaagaaataattcaaataattatttatttattatcaaataatatattttattaattaattttataattttatagtctcaaaagggtaaaattggaatttcacttaatggtgcatggatggtgcccattaacaattctttagcaaataaagaagctgctgaacgtgctctttccttcacctttggttggtaagtaattcttttaattaaaacatgtttttgtgatttatatataaataagcacttttaaaatagacatataaataaataacaattatatatatgtatattgatgttattatatgtaggtttatggagccactaaaatcaggaaattacccaagtgtaatggtaaaatatgtgaaagaaagacttccaaaattcacaaaagaagaatcttcaatggtgaaaggatcttatgatttcattggattgaactattatagtgccaagtatgctcaaaatgctacttgctctcctaatcaattgggtctcagattttctactgattcttgtgttgatcttacttgtaagtttcctcgaataataataatttgcatataaatttagcgcactgcatacacttacttaatcatttttatttaagataggtctcacttatcaaaagtaactttatcacttaagtacgtatatatcagattttttctttattattattattgtttgataattcttacttacaaaaagtaattggctcatttcagttgtgagaaataacattccaattggtccaatggtaataattttgacttatttattatatttattattattgtttgctaaaataattatttaattatgttttaataaagtgtttgaatgattttgcaggctgcctcaccttggctatattcatatccaaaaggaatggagaacattgtaatgtacacagtgaagaaactcaacaaccctgttatttatataacagaaaacggtaaataataaataataataataatgtttttttttttcattattgggagtagctaaaataattttgaagaagtattattattattattaaataatgtgatttattatattgtaggatattcagaacttaacactggaaaattttccaagcatgacaacaacagaatcaaatattttgtggatcatctttcatcccttcaaagggccataaagtgagtaatatttatccactcaataagtgcagttttatcaactaagcattactaataatatataaaaaaaatcactataagagaattgctaaaggagattattgtgatgcctaatactattaaaatgcgtcatattgatattgatgtaaataaatatcgctaaccacactacctttttagtggtgttagacacagttggcacataatcacaatggcctttcacttagttacgatccccgatcaccaggcttcgaaacctatttttaattgaaagaccgaaacaaaaaagttttaaaagtgtagctgatgaattgaatgacattattgtgtttgtaatgtatgtataggagaggagctaatgtgaaggggtattttgcatggtcattgttggacaactttgaatgggctgatggctacaccattcgatttggcattgtctatgtcgactacaaccatggtttgactagacgccttaaagactctgctacctggttcaaacaacttcttcactaatgggtagagaaatttttgattaaaagggtaaaaaatctttcgatttagcctaatcaatccaatccgatcgactgtcttagttaccaagttacaagagcatgtttgttcgtgtcatattttattcaaaatcgaatatagatagtgttgctccagctcaaaccacgattatgaattttgttgtgtcgaaccaagattattagtcttgatgatcggactcttgtgcatttacaaatcatgtcgtgtcgtgtctcaacccggattgtgacatccatgttagctcataaaggcttgtctaattttttaacatctaaaaaaaataacattatgaccatatttcaaaaagaagaaaaaaagataataacattatcaccaataaccacaacaatcatttacaccaatagaggggaaaataattatgttacaaagggatcgaaaacctgcttttcttttacatttttcggtcttcatagatggaaaacataattaatggtttgatagaactcatgagaaggaacaaacggaacaaaataaaaagcaagttgtgaatcgaaaaaatcaaaaccggtttattcatttgatgattcccggtctattagctctaactttagacctagtgtggtgtaccttctttggtacatctgttgttaatgcatacatctttacagcaaacagctcctcgggtaaccccttctgatcctgatcaatcaacataaaaataaaaaggcgagaaataggatggtataaaaataaaattgaaccggcgaaaatgtagacaaataaaattgaaacagattcagtagtttaggaaggcatatgtaacctttaatttgtaaagatgcagcccacattgatgaaagagctccttaaagtatgaatcagacctagtaatacttcgatcatcgttgtccaagacaaatcctacaaaccgaaaaaaaaaagtatttaagataaaaggaagagtaatggcaccagtgtgaatgcactcttctgttataccctcacgtattctacaaggctagcaaaattattattgttcgaagcacatgcctcgacactagcattgaaagtcgagtacagattgcagaaatagcttacattgttgggaaatattgtaagcttttagtgcatgaaaaatagtcacattagatacaagtaacgaactattgttaagatatcaaaagaagaattaagaatgaaacaacattttatgtggtaacttctttagattgaatcaaaaccattcaaaacataagtagcgaacatttgaattcgaattatagagccatcgataatgatgggggaagacccgtttccaaataaagatttgatcaaggaggaacctcattcatggttgtgttatgaataaagaggcttttacaataattcagaggaaactgaaaagttcataaaaaccgatgaaccaaaacctaccagaccgtaaccgaatttttggttccacgtcatcaccgaatttgggagtcggtttcggttttggtttttttgacatggcggttggt

SEQ ID NO: 299443 - DNA, 8778 bp, Cannabis indica
atttttattttctaaaaacaaaaaaaaaaaactattaccaaacacattttatttttcaaaagtcaaaatacaaaaatgaaaatatatttcaatttctatctttaaaaaaaatacaacgctacattagtttattactttttttttttctggtaacagctgctttttttttttttttctgggaacgatttttgttgttattagtattattaaaaagttaatttgaactcagatcctcaacactgagaaagagaacaaccaacacaatctacactctacattttagtaaatttagtttagattttaaaaaaattcagctagtaacattcactaattcagctgctgatcccatgactgctgtcccacctctttcaagaagagataaagccagctcgcattcatgccaacctctcaggccactagccaatgttctcaaggtttttgggttcactccctgaatccaagccggagcgaacttcaccagtaaacccactaagcaagaaacataggctttccaagtcgacggatgacatcccagtgatatgttcccatccaatacgccagccagaaagtccatgtggatctcaacaatgcgtgcccttcttgtaaataaccaatttggttgttgcacttgtacaccccacatgatggaccctgaaagaatcaagagatatgccatggcatatccctccaccacgcaggaaacggcactcacttccccatgttttgattctgcttcactcgatgagagtaaccaggttgggatagtttcggtgtacagttcctggaccagctgaaacccaccagcaatacataacagacttgcaccaagagtagcaatctcctttgcctttgtagtggccaggcaaagagatgcttgactagacttcaagcgacggcattccttacgttcccatctgacagataatttctgagcatactctgcaacaagccctacaattacaccattcacatattgaacattttgtatcgtccgacaagaacgaaggtaaagaaatcctggggctacaaaaggatgaatgctacaagctgagatagtaaatcctaatagaccattcacattgctttgattggacagtgatgtggttgcagcaagctgcgatccaagaaatgcagtgaaacaacttctgaggagttgtgcaacagcttctttgttttgtctgaaaacagagcgagagcatgaaacaacgatgaagtcatgccaacgacggatcttttgggcccaaagacagcctattacgggaatgctaggccaagggcaacttgagctacaattctccaaggctggcccagacacagcatgaatatactcgagacttttgtcaagcttaaaagtaatggttaaactcacaagagcagccatgggcagtggaagcactatctgtgaagcctctgcaatgttatagaaggaccagccaggaaatttagataattctttgagcatgcatgtaaatgcaaattttattaattcaaatattaagtgtatagagtaatttgaatttaaactaatttgattcgcatgtaaaattgcataaggatttatgttagatattttgaccattacttcagtaactatctaaactgaaaagttgaagtatttaaccttaatgagtaaaaaacgtgtgtgagattgactgtgtgtttactttcaattgcagaaagctagtatgcttgcatttcacgtcatttaccaattcatttatgatcagtaaattctaacagtgggtagcacagcatctaagtagagggttagacactgaatacctaaaaaaatttaacagatctgtatcttatagaaaggaatcttctatagaaatgttaagactgatattattttagaagtttcacatattgttcgacatccataatatagaaagctgcatccgtaggcttggaaatgtctacgaacgaaaataataaacaaatacattgaaaaagttcaagagttagtccacattttatcttatgcgtctattcataatgctgaaatcacaacttgagatggagacatgaagctttaaaggttggctacataagtttcattttaattaaaatgtattggaattattcttgtgcaaggctttgtttggaacaagaattttttgaaggaaaaagattacgaaacataatattttcctaaaattttatttgtaagcttttatcttttctaatctatttgtaaaagatatcattactgtaaattacattaaattaaactcactcttcctaaaccaacaagatatctatttgtctcatttcttttttcatttgaatccaaacaagagaaagttgaataacttggattttatttaatttttctctttcaaatcaaagttctaaatagaggctgaattcctcctattttggtttctataataaaacggtgctgttggagcagtgacgctaatgcaaaacatagagacaataatattataaatactcgtaagaaataagtaccgtatgaacatcttggaatgttgacaccaacagcagcaagtatttcttttatttcactctcaactgttagtaggattgcctgtggacttggccaatctattccattcattggaactgatttccatataccacgagtaatttctgcagagaagtaactgataatagtggcaagagatgcaggcagaaagtcaacaaggtccctcagacctgcagacattcatgaagtcatgaattaatatattgaatcattgataaggaacagaaacaccagtaaagcaggcatccaactaacctattgtcaagttacgagaagaaagccttccatgggcacaagcagttaaaattgcctcaagaacataaggaatggcctctaatacctcccaagcaggaagcatgggcctctgcaatgtatcttctccagtacttgcaggggagccactgctagatgatccagttatagtcattttggaatataccatgtttaagatcttattagaaacttcatgaacagggctttcactagaaaggcccgaaagtgttgaagctacacatgatttgttttgacaataccaagatcgtaatttgggataggaatcaatgtaaattgccttatcagagatgcatccaatatgttccggatcgctgtttgtttcatactggaaagatgtactgcggctattacgcaataacaaaagatactccagagtaagctcacctctaaatgctcttgcatgctctgttatacactgctcaatagggggtttatagaatttccacaaacgtagaagaaagagaaatgctagagaaaatatcatataaacattgggctcatcgcccttgcttgacttgtttcttgatgtaggttcgagtgatccaaaaacctcacagagtggtactaaagaagcagcaatttcagggacctgtagggtacaaaaaaaatgaatccattagaatgcccaagagttcaatccttgacatgctaatttaaaagcacaatttaatatgatttgtatcacaaatgctcacaggcatagcctagtcatactatacttcttctcacaaaaaggagttcccacgtttgaatccccctttcccaagtgtcaacagtatgatttatatcatacatggccttaatgaagaacttgagttccagaaacatacgcaccaaaagatagaaagccacagtgcggatttaaaaagcagagactaatggacctaattgtagacttattctccacaggaaaacaaaatattttgggggccaacataatgaccaagattacatttcttaccacaccatgcaaagaaagtatgtgaacagtatcgatcaaggaagcctctttaaggattccatatagcatcgacatatgatcaaccaggtgacttcttggcccactattaagaggtgttggaggagaaaggagcttgacaacaaagcgcacaacatgttcctgccaaaaagtgacaatcttttttgtttagaaaaacctcaatttgcttattacagctttttaaagaggggttggaaaagttggaattcttttccaacatacatagcatcaaccatgatggctttcataaaactatcagctgctgaataaagaacgtgcaacatccaaaaatagcgacttcagcattgagtaatacacatactacagctagtgatgcattctattagacaaatattcaggtagaaaatattatttcaagagttgactatggttttggaccatgaaatataagtgtgaacataccaataatgtgcacaactaagaaattcttatgacaatttctgcagtgccaacgatatttgcattgggaaatgatgaaaaatcggatttcaagaatctataggaaggaccaaatgatttgtacttacgacaatttatgaagaaatgtaattttaagtccagtagtatatccttgaaaaaaaaaacaatattactgtttgtttgctacatataaaattaaaatgagtttaactagggagctaaaaatggtaaagcacaacaaaacaaggtctaaattgaaagtacattcgacagagatcagaaagagaaaatttgtccattcaatattttctacattagcgataactgattttgaatcacatgagagcttctatcttgcaacaaaagttattaaggtattaattcttctactgcaaccacaaccatcaaaactcaaatccaacattatataactaatttaatcaagctatataaaaatcgagcggctgacacatgctctgagagcactagactaccatgtgcataagtacaaaaacaagaattttatgatattactgttttattataccattactacctgaatgttccatccaattcttagagatgcgccacatagaatcttagaagctgctgacttctcctcctttgacccatttactgcaatatgatataacttctctatctcttgtaaacttgaaaataggtagcaagaagaaaacaaaatgagcattaagttgcttgtttacaactacattgacaattaattatattataccttgaagcaggagtagtgacaagggaactgatcaaggaactacttaatgacgctccttccataaatgttgaccaaggagagttttgattgggtgatgtatcagatggtgtgattgctgatgcaacaacataacatggccaaaaatatgctgatgcatcaattaaatttcttgcaatgcaagcctcaacaattaggtgtctcatgtttccacctgagaagcattaggatttattgaacattaatactcaaaatctcattggtgtgtagcaagatttgaagctaatcatacattttaaaacagacctgctttcataaggccctgaccatgattgccataaccaggtccagaacctttttcattttttgaattatgaacatgggtagcggctttggcagctgcaatgttagctgcattaacaactgaagcaggagggcataagagcccagaaaactgtccaagaacctgaagcgaggaaatcaatccatacttccttaaagcatgagccttctcatatgctgacatagaatttccaagagcagagggtgaatacacttgatcctcatcctccaaaaccttagcaattgccagagggacaatggacaaaaggacacaaagacgggcctcaaggtggggaactggaccttctagaggatcgcgttcctgaaattaatgaatggagcaaaagcaagtattagcttaatcttatctcttcactttccaagaaaagacaaattaagaaaaattagtctcaactcgttggacaagtcgaagggctgaaagccagagcgcaagaaaagtttcttgccatgatgcctggttaagtatttggagggttataactacttctgcgaagacacatcgaaattatatgatagtaaataggatgttcttctatctttcaaaatagtacgttatacattataatgcagtgaagcagcgaaaaaataaactcttcacaattaaagttaatacctgcaatcacatcaatagcagatttgacaagctgtttcccatccattacattttccatgtaaatatctaaaggaacccaacaagcagaaaaggcagattcaaaattaagctgagaaactggtctacatggtggtccattatcgacaagcattccaatgagctggcgcttgtctaagtggtgaacaaaatccacaactctctcaatgttagcagaaaatcttgccaacaattgcttagcagggtttaaatctgaagatgccaaatgatgggctttaaaaagctgtagactacacaggaggccattgaattttttaggcctataaaaagaaatgaaacaagggtagcaagatgtaaattaattttccagatgagcatcagaagtcattttctgcattctaactataaaactcatgactgagcagtctcactctgattagcatttcattatgattttccaactgaattcaggtagtacactagctagcttcaatcactactatactactatataatgctagctaaagacaactaagttagactatataactaaacctttacactttgtaagctgtgatgatcaattttcaattatataattttcattatgcttcgcgaattgtccttaacaatttatatagacgcagcgtgttatactgttgtttgatggaaactaccagaatatactatagcagtcggtgagaagatgaaaatacacacattctatctcttaagttcattagatatcggaattatattactatgttcttatcaatgtccctaattctgtgcacggtatgacaaagaatttctgtttaaaatttttatatcacaattagacaacggaaatagccaatgttaactgtcgtatgaaatcatgttgaaaacagcaaaagaaacttacacaaagttgaatcttaaattacaaaataaacaagaaaaaaaaaaaaagaaaaatcatcttttcaacgaaaggcgtgcttacatattcaaatgaataagtcgaagcagaagcaaggattttttgctttctgttaattttccaagtacctccaatgccatgaaagaattcttggttctcaactcttcatgatgttcttttcttgctaaattgttactctgtttggaatctatgtccatatctttgctattagtgtttccaaatgctaaacttggtctttcaagagaactctgtagtaatccccaatcatccaatacactatcaatcaaaccaatgatgatactgaaaaagaataacacaaacacatgtccaagctccaagacacgaatatcatatatctcagagagcttaagagcacgatcaacagaatttataatcctgttaaaaagcaaagaagaaaacgtctcatgaaaatcatgcaaaatagaagaagagctaaataggaaaactgaacaaacaaaaatgggatgaaattcatgcacaaaagaaaaagaaaactttataagagagaggaatcccatcaaatttgatactaacgtttgtctggagacatctgatacgactggattgaaagaaagagcgtatcggtttaaaagttgaagataaagactataagcctccggttgagaacgtcggtgaggaattatactgcataacaaacaagtaaccatctggatcattacgaataaagcaaaacaaagccatttcatcaattgtcaacactttaactcacaatagaatgagaacaacggtaacatgatcttaaaatggaattatggaaagagaaacctggcagagagaagagagagaacttggacaggaaagaggaggccggaggacatggctccttcaagaaacttccagagagaaggagtgttgttctgaaaacaaagatgagagaccaaaacttgacctaagtccgggctgggcacctgggtcgcccacttccccatctcaatcgaccaaaccagagggctttcgttccgttcttggcaccatttgaccgtgtcaaccactcggcgctcgtactcgctccattcaattccctccattaatatttttattctaaaaataaaaattaaaaaagaagaagaagaagaaaagcagtgaaccaagctacccaagcgaaagctcaggccattaacgaaggagcaatagtagtcgtagcttgctcaacttatttcgcagttaaagaaaacatgagtagggactggggaatggtttttgtcgttctctatttttaaaactaacatctaaaatttttgtgttaaatttggaaaacattttccccattctttcaattatgttttaatgtatcggatataaaataattaattatattaatgatattttatattttattgaaattatatacaaatttattattttttattatatggtttgataaagagacgatgagctattcaaattgtttaaggatatctacatcataatttagactaaatttagcacaacaatatatggtgccaaatttagtactatttttaatttgtgtcaaatttattatatttttttagaatattattggagtatagttttttttaagagtatttccaacggagatacaaataagtagtagtaacctaaaatattactcatttaacaaaaattgtgctctaataatgtaccaaaaacttatataaatttagcacatagtaaattttgtgctaaattttacacaatattttctatgatataaaatttatgtcacaataaatacattactttttatttacatttatattatttgtattgttatatttaattatagcattaaaataaatatgaaatacttatatagggcttttttttatttttacacttc

SEQ ID NO: 299444 - DNA, 4771 bp, Cannabis indica
gaaaccaatcgatgattctgttggactggaccagtccatggcctggagttgtcagatgcttgatcaaattcaaaagcttgttgaattgaacggttctaaagatattgccaccatagtaaatgatctgccattgagatggatttctaagcaaagtagaacacatgttggtaagccatcgcccatgccagcccatccatcttgttctgatagtccaaagaatgttccagcaaggaagaacaagaagcgaagaagattgtccagtttaagataataaatcatcctgcacatgcaaagtgtgttcgcacttttgtttttgaaattgttcactaattgaccacacatctaatttgatcggtacagatttacccgttccttgagcctgaactaactgtctgactaacaaggattaggacctgccattgaacttctgtgttgttgaatgaggattctgggagctacagagttttctcagatgctagttaatttgtgcaaccttgcttgggaacagtttgaggcttactgtgcaagagaaggtacttagatgaaatgcttctgatatatgaaggcattccaagacttttgtctattatgatatcttcacattttgtattcatctttacatgtgttcgtttagagagaaatttagtaggaaattatattaacaatgatagtttgtgatatttattcacctgagaaaatgtaaataaacttttgaagtttatataataactaataatgtcaaaactagacgtgattttgcactgcaagtttgagaccaagtgaggaaattaattgttggtttattttgcatggctcactgaaatagcttcaaacgtcaagcttcttgactgcatttttagatgtaaaattcatgaaatgtggctgatttgaattggtttgatactttgcccgataaattccacatatattttgttccgaatattgttattggatattaatggtgcatattactttctagacttattttcttacgattggttagtaatactccctaaaaattattatattaaattatataggatttgatacttaattacatcaataataatacgatattgaggaggatcctagacactaatgatatcttttattattctcttttgttctcgaccccaagagtatctcttgtatatgattcgttccatgcaaacttttgggtcggtgacttgtaaaatcctcttcgattactcaactatttttcaccttaaattttagtaggcacatccttggacgaaattttatttcatttacttatattgtgtttatataatattggacactttcaatattatcttcatatcttgtgtgacaaaattattttcgcgaagtaaggttttcatacctacaaactacaaagtacaaattttggagactttgaagttgaagtccattggcagagaaatatagagcacacatttaaagttccaaagtgggtccaaaatgtgagcatgagagaaatatttgccaataggagtgaggaaatctcaccttatccacactcccaccacaatcttttattacactgataatcactatcacgctcccttatcaaaaatccagaaccatttctttgctaaactaataacccttttctttcttcgcctttgagaaacaagagttgattattctcatcaaagttaacaaacaatcagcaatggcagccatgaactcaagcgttttggcttgtaactatgtcatctcagggcctggaatatctgagctcacccaaggccgttacagttgcatcaccagttgtggctggacagaaaatgcctgtgatcagggctcagcaagccaaggtttccgagccaaaaaggagtgatggtcgccgggctgcaatgctctacttagcagccaccctcttcaccacagctgctgctgcctcaaactcttctgccaatgctggagtcattgaggaataccttgagaagagcaaggccaacaaggtatgtttgcttttgactcagattgccattgttatctgggatttcttaggactaatttgcttcttttttgggtgtaggaattgaatgacaagaagagattggcaacaagtggtgcaaactttgcaagagcatacactgttcaatttggcacatgcaaattcccagagaacttcactggctgccaagatcttgccaagcaaaaggtataacatttctttacacaaaattttcactttttcttttagctattattgtcgatttgattagatgcaatttgatttggttttggtgggatggatgcagaaagtgccatttatctctgatgatttggctttggagtgcgaaggtaaggataaatacaagtgtggttctaatgtgttctggaaatggtgaaagaccacaactctttccttctcccctacaaatttattctcctcctcgtgtatttaaatttcctatgaaaagaactttatatcttcttcttgtaatcttcttttcctttttccaacttttagattttattgtttaatgcacaaacaaaaaagttagtcctccttcctaatttggtcaccatacagcaaattagttgaggtttatgtttgaaatttagattttggtgaaggaaagaaaaatgtatgaaattatagggagaaaaaaggtaaataaaaaaaaaattaaatctcatatttggaattgtaaaaaacttgaatgtaacactagcttccatagcaaacatgaaagtttctttcattctgcacaattttttttccattcctcactaaaatccagtgagtaatcatccacctgaatctagataaaccataaattttcaagacatcttgtacaaaaatgatgtctggaaccaaaatatttgcttgaaaataaattaataaaataaatggtaatttgtattcaatgttgtaatcacttttctgaaagcctctatacgtgatcaatcctctcttttgggaagggtatcagcaaaataaaaactcaaaacagttaaacccgacgatgaaaacttggaacacaagatacatctgtacaaaccatattccaagtgtccttgtgaaatttccatcttcatccacaaaacttgatggttctctaggtacacgccccattcaatctttaaccatatttacactgcttcacatttgaaccagctcggagcaaagccaaccaccccagtacataactgtgcgagaaagccctccatattcgaaacaaaaatagcattctgaattcattcataagcacaatgctatgaacacaacaaggaagaggcattgttttgtaactccggacaaggagctggaaacacctcattagcataacctgacacgaactcacaatgccatgctgtagacttcgccaaaccaagcattgtgaagttcttaaagcaaatttcttcaaatgatgccccctcaataccctttaattgaggagcttttgttgaatttagactaatcacattattgaaataaataccctttactttgggaacagcactaggatcccatccttcatcagggtggtcgttagaacctctgctgaaccttattggtatcttcactctctccatttttatattgcttatactaatatttgctatgtaaccccctctgccctgatccgattttatacgtacccctgctgctgaatcccagatgtgcaggtcttcaatagtcacatttgaaatcccaccagacatttcactacctattccgactccagaacaggtgggagttgtacctgagactcttctcactatgatgtttgagctcggacgagccataatgattccatattggtcccatccactcttcactgctacaagatcatccccactctcaatgtaacagtcttcaatgcatacattagtgcttgaatctaaaacagtcatgtaaaaagagattttagtttgaaaaaaggaaaggtttattattattattattatcaagaatgacgttgactgtgagtgttgggatgtgaaacagcatttacctgggtctataccatcagtatttggggcatttaaaggggccaaaatagtcatattcttgataacaacgttattgcagtaaacagggtgaatggtccaaaagggagaattgaggagtgttaggttagagatgagaacattgtgagagttcataagctcaagaagatgacccctggtgtacttcaatgttctattccaccacaattcccaccacattttcccttgaccatcaattgttccgttctctcctgcaaacggccacaacatcatcatctgacgtgttaactctctattggacacagcaaacacacagcattcataatttaaaattaccaactggtatggtattgtacagcacacatcaccaaaccaaattaatgtatacaaattgtatgagtactctggttgtctgtaaaagttcttaataaatattttacaactttcgtctaaccaatatttatatgttacaacaacaccttctgccaagttatttcttcatttatatcacagtacatcaaatgtttgaaccaacaaatgtgagaggaggtgaagctatttctttattcatatacttacatacacaagttggttttggatatatctattttaggccacataggttttctgttttagaaaacaacaaggacatatttatgaataatatgttaattgttattattattgaaagggagatactatgtcaattagttatgaatacattgaacacaattttgaataaatttcttttcaactaatataaatatttaataatgttgtttctttcttagatttttatacg

SEQ ID NO: 299445 - DNA, 1410 bp, Cannabis indica
cacagcacttacaaagatgctcaaaaacagaaaacgattgtacacaataactaactaattaaaagaaattaataactaattagttaggtaatcggatcattaataaggttgttaacagacaattacatcaagatttatgatttacatttgatgtttgagattgaaatagtacattttagcgcaatttgcacatttgaggttgcatgtttgagttgatagtgcatataattgagagtaataatgaaatttatattacctatctattggcggactcaagatttcaattaagtgtgtgcagaattctatatatatacctattttattctacataattaatttctaatttaatttttttgtatacgttatgaaaaaaaaaatgatcataataagtaaaagtgttccaccttattctccattaggtccgccactgtactcatctatctgatcattaattttgtttgagaaggtatcagaaagatatgcatgtaattcaaaaggttgaataatcaaatatatatagtaaataataagaaacttaaaagaatatgcatgatctccgctttctacctatattgctcttcttaattatagaatatgtgaatttataagtaagtataatccctagctaggctagctacatatatattgctttctaaaatggtgaattcaaaaaagacctattagtagggcatttaatataataaagacccacatgatcaattggttatgaataaaagtgcacatctaatttagtagatttaatcatagatgattattagcaattcacacttcttattatttgtgttctaacctaacaacaaaaagacactttgatcaagattttcttcacaataatactctttaatgtgggtttacttaataaaatcccacaccactgcaatacgacgaatattggatattaagaatcaaggatttttttttgggtctttgatctgagtttctttaacaaaccccattcttcacaatttttaagaaaacttcactagataatttcttaagaaagaaaaaaaaaagaaaaaacttaaacacaactcatatgcagacaaaagtctttttttattgatgaatcagattaattatataatgcacaaataaactaattataattacaaatactaaaaaattcattataataataggtcttcttattcatcttctcggcatttaaaaaactagcctattactagtatttttcataactttttgaacttttcctttttaacctctaacttctggttttccaaatggtatcattcctgttataatgataacgtacaataatttgcatcccttcgacaagcctagtgtttgcacctgatctaattcatgatgccaccttaattaaatttgttggatcaatgacctatttattactagggaaagctccca

SEQ ID NO: 299446 - DNA, 3264 bp, Cannabis indica
tcgtaagggctgattggtcgcgttcacacttttcttaaggggtattagggcatttttggtctgaagctcgcccaccttctgctttcttttgtcctttgtaggagttggggttccaacatttgtgggattcactatgttctctttgtcattgggttcctccaaagcattttcattagagtcttcgtccaggtcgccaagattagtccggagacaagccatcattttctccattctttgagataagttttcctattgtgcttgctttttttgagcttcaagtaactcactggacactcaaagcaggtatgggtcctgttcatattagtatccatctttgtattagtcgtctttgatttctcctcatattcttcttccttttccttgtcgtgagggttctcgttgataaactgttccttacgtttgctgggctcatctattcctccaccagtttcagatgcttccccattcttcacatggcttggctgggcatgccctagagggagtggattaacatcgctcatggaaacattaggatttacgcgaggatttttgtctaccactattttacgtgtagccaccattgttgcaaacgtactgttgctttacacttcttccaattctcaatgaaaacaccaaaatatttatcgagatttttgaaaaataattaaataagagctttaggaaattaaataaagattaagtaaataagatgaagaattttaacgtggttaggcgttaattatccttagtccacgagtcattgtattagccttttaagctttgaagcatgttacaaatgagctttacaatatggagccttaacccttgctctaagatagtttctctaggtatttcttgtagaagaagagagcttataataaaaccaatccctttgcatgaagagacagtgaggtttatataaactggagttcgagtctgggaatacccgtgactcatccacgttttttgtaaaagtcgacccactattagggcaaaatacacaatatacatgactatgaaacccactaagaatgttaggctcatgggacgatggttctgtactgatgaggagaccgtttggtataaggcacgtgttgcacggaggtcacacctggcaaaataaggtgtcagtggagctgtcggacaaaaatgggtattagtggtgcacgcactaccatggtctgacgcaagggataatatctgatcttatgtcagagacgtggacacatcgttctaaggtagacatttgacgttcacctcccgatagtatccaatactcttcctacgatagacatccagctcccgatctgtggtaggcttccaagtgtcatcctttgcgccctgcatccagatatgtctttatctttattaagaggccttcaatcctttcgtgtcctgaaaggctaggcgtcttcagggcctcaaaagaaggttatgtatttgaggcagagcccttaatccttgggggatttgggcccattccaagtttgacttggcctttcccacacgagaaggtttaagcctagttttaaatggtgattatcttctgattacgccacgtgtctatctaccagaaatatggacaacacctagctatattaaatgtgtctatataacaaaaagtatatttttttcaaaactttacaattcaaatttaaactcactacacatatccctcttatcttttattttatattaaatatgtctatataatataaagttttttttttaatattataattcaaatttaaattcgtttcacatatttaaaaaaatatttttctattattatttttttactaaaaaatatattattatttaataaaataaaaaagtaaaaatgatattttaaaaataataaaaaatattacggtaattaaactaaaatcataaaaataattttatttattaaacaacataaaaaaaaaatacaactaataaatatacttcatcagaaacaaagtttttactaatcatcactttttcatatagtaaagtcacaaaatttgtaacggtaaacacaatagcaaccttgataaacgtaacaaaatttagttctacttacttaggtagttaaactcagtgacaaatttgaggtttgaaccaattattattgttgaaaattgaaaagaaaaagtaagtcattgaatcttgaaaaacgaaattaagaaaataaaataaaacccaatcgaaagtcgaaaaccacattactagtactaccaccaccaattgcttaaggccacaaggtgaggtggtgaggtgagccgtgagagaaggaaaaagtggaaaattagagaagtgaaagttgtccaggttagacaaaacaagtggggtcaattgggtagggcttataaccaaaaagggcagaatgagagtgaccccatgttgataatggcaccctctgccgacccaaaaacacaaggaataaagcgaaaacattcacatgactatggagagaaataaagagagagagagagaaataactaaatagataaataaaaagatgttacatcacatctatgtgagtttgtaagaacggctatcatcatcttgtcgatcacaacactctattttgtttgactatgattgagatagaatatgagcttatatatttacatataataattagtagttgtattgtatataatataatatatatattgttcttcttgttggtaaaatgaagtaaaggtaaaaatgagcaatgtcttcaaggccatagggaaatgttattagataggattaaacaagcattgattttcttagtacacaatatttaatggtgtttttaataacttcaaatcaaacaaggaagtactttgagtaacttttaccaaatgtccttttttttgaaaaatgcgtttataaataaaattgaagttatacttcatggtcattacaaaagatattaagaggtatagtagatatctctaccatgcccgtaacgttgttggcaaacgcccatttggccacattatgggccgcgtagttacagtttctagctatataagaaaaattacaattagtcataaaagtagagaggagcttgcaatgacgcacatagttctcaatcctccaaaagagtcatccccttttaggtttttgataacaatctttgaatcactctccactaaaataaaaggatgatgcaatgagactgccgtctccatggctaaaagacaggccgcagcttctcccgtgagtgggtcagagaagtgtaaccttttcgccgccacccacaaaactgattcgttatggtctctc

SEQ ID NO: 299447 - DNA, 1382 bp, Cannabis indica
agaatcattgaagaaaaaaacgacagtttaagttagtgaaagataatatatggaggcaaagaacaaaccttagacgatttactggcacttttagagagcttcaagctgtgagaagaagttgctggagtggcgggcctggaggagctgacggcccagttggccggcgaaagtagagccgcgtcggacaatctatcggaggtgtcaagggaaggaggggagtcctctaatgttcttggaacatataaacagagattcattcccagagccaactttgctttcctccatttgcttcccattcttttgttttgtttatcaaaaacccaacagaagaaccaaaacccagaagccaaaacaatgctttcttcaataaaatcacaagaaaaaaggcaaaaattcacaaagcccagatctcaaattgcttaaatttagctgctttttgcttgggttttttcccccactttgtctagctgagagagttattggaatgagagagagagagagagagagagaaaagatgggacgactttaataaagtttagtggagcacgaaaaccaagagggagagggagagaggtttaatggagaagagttatgggagagagaaagagtcgaacagttgataaaaacgacaaaagggactaagtcataaatgagggttgagaattatattcaacatcttcttcatgtcgttcttgttttggttgttgttgttgttgttaatggtcttcttggccgccatggaaattagagagagcttggactagtgtacagagggaaagaaagagagagttatttgctgtgttgctgagtatttgaggattttgaccttttgttgttttggatttcgggtaagctttgttttctgataaattggttaaaaaaaatggacattaatataaaaagcacgttttggttgaaattgaatgcaatgatggaaaagttagctgttttctttacttttcatccctctctcatgtttatcttccatttttacccttggacttttaataaattttcactaaaaagagactgttgttgttgtttgccttgtatcattatttatcttatttgattttatcacttctcattgatttttgggattaaacttaaaacagcatcctattttgtcttttacagatttttatgtaaataataattaacagtaacaagtaagaagttattaagtaaaataatataatatataaaaaaagagcattgttataaggcaccaatgcttagcatcttctaaatatgtcgcgttgcgattagttagcgatactacctaaaagctattatattaaattatataagatccaatatttagttagaccaataacgatattgacatataggagggtactaggcactactggtgcccttta

SEQ ID NO: 299448 - DNA, 3761 bp, Cannabis indica
atatatatatatgtattttattaatgtgcagattgtgttggacaacggcatagtgcaaataacgactgtcaaaaccggaaggatcaatcaccggaataaaatataacggcgtcgataacttgcttgatgtagtcaacgatgaaatcaacagagggtacataagaattcttataatatatgcattttcttatttgaaaaataaattaagagcatgtttatgtatggctgacaaaatttagtttggatcaatagtaatattgtagaatatttttaatactagtacgtatataataatttaatttatattttattgatgaagaatgattaattacctttttcttttctacacatctttatatataataggtactgggaccttgtttggattgggaatggaagtacagggaaaaagggctctcttgataggtatatatattgatgatcaccagttttttcttttattttttcctttttacaaataaatagatcgatataaatatatatttccaattcaaagaaaagaaaataccattgattaaaatactcagcaaaagctagctaattgaaaccagtttttctaaattgaataaaaaaaaaaaatgttaccagatcattgaaaatagatttgattcaaaaattataaatatggaaactttagtacacgtacgttaaatgtgattaatcccaacttggtgctagacatacgattatatatatacatatatactactaatagaacttctttatgggttgtaattatatatatgcaggctccaagcaacagattataagataatactccaaaatgaggagcaaatagagatttcattcaccagaacatggaatttctcacaagagggcaaggccgtcccattaaactttgacaaaaggttttagttattattcatatttatttttattattattattagaattttgatttattacatttaattatatatgggattattaattatatatagatacataatacttcggggttcgtctggcttctatacatatgggacatacgaacacttgaatggatggcctgatttccaactcaccaacactcgagttgctcttaagctaaacagagacaagtaataatataatattttcaattatatatttttgtcagttcctctggatcgtaattaatatttaataagaatttgtacatatatattatatataggttcaagtatatggctatagatgatgataggcaaagatatatgccgattcaattagataggtcaccagaaagaggccaagccttggcttaccctgaggccgtcaaacttgtcaaccctgtcgagccacaattcaaaggagaagtacgtctatatatatatatataatgagtttttcattaatgatcgacactgttattaatatgtattattgtgataaaatgatgaattaatgaattagatgttttgacaggtggacgacaagtatcaatattctatggaaaacaaagacaatcgggtacatgggtggatatccacagacccacctatgggtttttggcaaattactcccactgatgagttccgctccgctgggcccctcaaacagtgtctcgcttctcatcgtcggccccacacactcgccgtaagtatctaataattattatatttttgccatcatttaattattttttataaaacagtaaacttaaataatttacaatgttagaaaacaaaatttgaaaattcgaatatgtgaatcttgttttttatactaaattttaatgtttactatatcgtctaaaaataaagatgtccctatatgtagtagattttttctataaaataatatatttatggcatgcatgtgaatcagatttttcacagtacccattactcaggagcggatttgataatggaatttaataaaaatgagtcatggaagaagatgtacggtcccgttttcattcatcttaataccttatcaaaacaaggtgacccacttcatcaactctggcaggacgctaaaaaacaggtactaataaattccatttttttttatattaattacttgtcatatatttggtaaatatatatatattgatgatcttgttatagatggaagttgaagttcaaaactggccatataatttcccacaatcaaaggaatatccaaaatcacaccaacgtggcagcttaagtggcaaattactactcttcgacaagtattaatattaatttattattagactctcgtatataaatttttattggaaattttaattaagctcattgtattatttactaaaaaagctttattaattttattggcgtgagcgtaggtatgtgagtaattttcctataagtgcaagtggtgcgtttgtggggttggctgccccaggagatgccggatcttggcaaagagaagctaaggtacattataatgttatattattttatggctaattaggatttttgtcctttaaattttaacatgtaccaaatcatgcccttgaatttttctgaccgttaaaaattttccctgaactattgcgattatcgaatttaacgatttttgtctaatttcattcaattttactaatttagtgactgtttatgtactaaatcacactcatcggattttaatatctatcaaatcacgtctctcatactttgacatgtgtcaaattatgtaccttgaatttaattggacaaaagtctttaaattcaaccaaccatcttaatagtttaggaaaaattttaacgaccaaaaaagtttaaagggcatgattttttacatgtcaaattcgggagacaaaaatcttaattagtcttattttattagacaaaaaaaaaaaaacattagttacatgcatgaagaaacacaacatatttagtatttaactattaattggcagggatatcaattttggaccgaaacagacaaggatgggaattttcgtatcaataatataagagtgggaaactacaatatttatggatgggtgcctggttttattggtgattaccgtgatggtaatgttgttacaattactccaggtatatatgatcttattaatataattaatatatatatgtatagatttgttttaattaattgactttgtagtgttcttacaacaattaatagtaataataatgttgtaggtgcacataaagagatgggagtacttgtgtataaacccccaagaaatgggccaacattgtgggaaattggcactcctgaccgctctgctgcagagttctttattcctgatcctaatcctgattatgtcaacaaactctatctcaataacactcaaaagtacgtatattcaattttgaatagtgtattataaatggttctatatatatacaattttcaagatttttaattaattagctaaattttgattagttttttgcaatgaatttacaggtataggcagtacggactttgggatagatacaccgatttatatccaaataacgacttgatttacactgttggtctcaacgattaccgtaaagattggttttttgctcaagtcgccaggttaataataattaaatccaattaattagtagtttctaatgggaaatttgaatttctatccttacattaaggaataattttttccctaaacttaaaatagggaatattggtaaaatgggataacattttcttaattcccacaataccccccatttgaaaccatcagccctctctctctttcgcctctctttctttctttctctctttctctcggtgccgcacccacacac

SEQ ID NO: 299449 - DNA, 5638 bp, Cannabis indica
aagaactaaaaaaaaaaaaaaaaaaaaaaaaaaaggggggggaactttctttacccccgagaaaaagaggaaaaaatgggtaaaaaagttggggagaggaacatggtcatatccccgaaagaaatagggtcacctcaccggttagtgtccgttcccagccctttatacaccgtcttctaatctcactcactccatccgtacaaactgtctccctccaatttcacttggaaacaccttctccttgatttcaaattgaataggcccctgcgattttagggttttagctctccctgtttcccctctccaatggcttcttccatttcaccactttactaaccctagccaacaaatattcctaatctttatatttatttactattttcagtttcaattttccgattttgggtcaaatggatggagctactggtggtggcgaggcgccctcgtcggctggcggaggttctcagccggctgttcctgctccggccccggccccggcccctattccaaatgcgaacgcaccaccaccgttcttgagcaagacttatgacatggtggacgactcggcgaccgacgagatcgtgtcgtggagccctaccaacaatagcttcgtggtgtggaacccgcctgagttcgccagggatcttttgcccaagtacttcaagcatagcaatttctcaagcttcgttagacagttgaacacctatgtatgttttgttactcatctacttttggtttttggttgtgtggtaccaatgccggttagtgattgctcaagaattatatggcttatttgttttccaattatggtagaaagccttgagtattatacttccatcagaaatataatacatagatagataggttagatagtagtgatattgagtggaactgtaaatcatagaatggattgagaaaattgacaaggttctaaggtacaattacaaagtactatcgttgaagttctttaatattttgaacggccaaaaaaaaaaagaaacaagttctttcttgtttgtgtttctggaacttatttgtctttacttttgtttgttaatattcgaattgtttgattactttcatttaagtagttgcaattgggtttagtgataggattttttttttcccacaaaattttgaaaatgtgatgcttcttcttcgtcttatactttctcagcagccaaatgcagctgaagaagaaaaaagggaaaagaagtatgatcacctgatttcaaggtcgaggatgatttctcattttaccaatttcgctgttttttttgtcatactcatataataggacaattaaccataaattgttgtctttgaaacaataggatagtttattcttaatattatgtaaaacaaaataaaacctgaagtttgccagtagagatgagcagtggttagagttttatggaatttaggaataaataactaattcaatccaatcatgagcagttctcaaagattatgtctaataccgtataaaccaatcattgcctgaacttcagttcagttaggatttgggcatagattgatatgtattttgcattaaatgtccaattcacttaacatgtgcaaatcaattcatctttgagataaataatttgtctaaggataatcattttgaaagccaatagaagattacctgtggtttatgtaagttacacattgaccaggattagcttggaattcttggatgattgtatctgtgctatccatttaacaactgaaacccatcaatccaaaatacttttctgttttagaaatcttatcaattcaatataagatagatgtatagcctatgtgaattgcattggatttgtgggttatctacttacattcaacattttgttcactctacttaggtgtgcttaaacttaatgtggcatgcatcttttgacttctgctattgtaatttctgttatttcattcctggaagcttgtattcctttttctagactctgcattctatgaaaatgcctttgggtgaccatattactacattaaaaatttaccagtccaatccaatctacttaagttagatgggaagttcagtttaaattggattggttcaattcaatctaattcaaactatatgagaactgattatagttatttcactggaaaagtaatgtgtaattgatgttgctataaatgcttagtttccattccaatagacatgtattcttgttctcctgttataccctacaatctttttggcgcaggaaactttagtaaaatgctagatctcaggaatcaatcttagacttatgagcaaacaatgggcttggctactcaggcataacccttttgtgtgttgtggaatcatattggatttattttagctcttcttattccttttctttgtatatgtatatttatatgtttactctgaacatatgattgattggattgatgtttaaaattttaatcatttaaggtcaccaacatcaaattagattagtactttgtatgggattggatttagtttctagattctaactatgattgaatgatattggttattgctgaaagagattggattttaaatatttgtcgtgatagctgctatggtgaccaatttaatttctatgactattatgctgtgaattcgactgcccttattcattctacattgcatttaggttgcttaactgtcgtggttttctatttagggcattgggttgaacctgaaaattagttggtcccatgtgtttttcactttttaattcgtttggaccttttaaatcttgattaaatttcacttaaagtaaacaaaaccatagaggactagaacataaagacagatcttcctcaggagttgcacgatatgttgatgtttcttcaagagattacaatagtaataataatgataatgagaatgaggacttcttagacctttgagctaagaaaattgtttttgcattctattcttggttctactcctatgctaacaactcaagttgatggttccgaacttttgatggcttcattaggtagttttatgaatccagttatttgttttttccatgaactaaattataactatttttattcttattgccttttacttttttccctttttgtttccatcagtaaataatttttaggtgtttggttattatggctgaggttttgtgccttgatctgccttgctgagataaagtcataaaggaacatgtgctttgttttttaattaaatttttaaaaccttgctggctagatataaagtgtattatatcacgtagaggatcttaaaagcactatatgactaatgatgattttgtgataacattaggcataaactatctgtttatttatttatttttttaactgcagagatttggtagctattttgtttttctttctttgcagaaatgtttgtatgacccttccatttagaaattttttataatatatgctgtttgtcaatagggttttagaaaggttgatcctgatcggtgggaatttgctaatgagggatttttaaggggtcaaaaacatcttcttaagagtattaatcggcggaaacctgcccatggacacagtcagcaacagccacagccatcacatggacagaatacggtgggggcatgcgtagaggttgggaagtttggtcttgaggaggagattgagaggcttaaaagggataagaatgttcttatgcaggaacttgttcggctgaggcagcagcagcaatctactgataaccagctgcaaaccatggtacagcgtctgcaaggaatggagcagcggcagcagcaaatgatgtcatttctggctaaagctgtgcagagccctggtttcttggctcagtttgttcaacaacaaaatgagagtagtagacgaatatcagaagcaaacaaaaaacggagactaagacaggaagtagttgctgagagtaatctttctgctgcttctgatggacagattgttaagtatcagcctcctatgaatgaatctgcaaaggcaatgctcaggcagatggtgaaagtagagccttcttctgggatggacactttcaataacagtacagattgtttcttgattagtgatcgttcatcatcatcatcatcatctgctgcagtggacagtagaagctcatcttgtcgtgtatctggagttacgcttcgagaggtcttaccaacctcagggcagacatcttctgttccagtgtcttcaggagtaactgcacctgctgtttccgaatcttccccacaatctttgacttcggaaaaagttacaacagctcaatttccagatataagtatgctggttggatcacaaaatgcaccttcacttcctatttcgcaaggagatgttgtaatgcctgagctttctcaaatgcctgaaatggttcctgaagacaatttcttgagtaatgagacaggtggatttttagacccagagtcattgggactggatgggtcaatgtcaataaatcttgatgatattgcccctgatcctgacattgatgcactgcttgaaagcactacattctgggatgatcttcttctgcaaagtccaatggcagaggagttatctcctgagggaactaccaaagatattgatgaagtacagccaaaagagaatggatggaacaaaactcagaatatggataatcttacggagaaaatggggcttcttacatcagatggcaaggaggtttgatctttgattaataaatgtacattacttaccgaggtaaaccccacaaatattcaatacaatcatctttagtctttttgtcggtctcattatgggaaatggtagaaggagctagtgcattttccatcagtgcaagcgcacttttgcttgcacccatgttggacaaagtcttatatttatggtcttttgtctcacttgatttaaaatgtccacaattttcattttatgatatttcttttcagttggtcaatttcttgatagacaaatttcattcttaagaaaagactactggttggaattttttgtgccttttcttgagttttcacattttcatcatgcactctgaagggtttggatgtattacatttgccatcttgttttattgatgtttctcccaaagcatttttcagaggccaaaagaagaataaaaatcagtatttggctaggttatcttagtggggaattgcacctattagttagttaaaattttactaagctggtcgtaaatgtaggtatattgtctatccatatatttgtatctttattcatacttgtctgaaaactactcatgattaatgtgcagcttatctacgagggatcttattactaagataatccaaggtccacagccccacagcatgtacatgcagactgcataagcaattgtagttccacatatgtacattgtaatttggggaaaattctaatctcgggtgagaaatattggactacaaagttagatagagctgtaaagttatacaccaaaacaatctttcaactaatatattaatatcctgacttatatttgaatgtagtagtttaatgttcaagcagaaaataagtgcccagcagttactaacattttgttgtgaaagctatattttgtaacagttatgtcaggttaggattacatgtaggatgtcttaagatatacagacatatatatatatatatttatataaaaact

SEQ ID NO: 299450 - DNA, 2492 bp, Cannabis indica
catgattaacttatttttgtgtgatatttttcaggaagcaattaaaacagttcaaccctctactagaagagaaggtttttctgccattcctaatgtaaaatgggaagatgtaggcgggctagatcttataaggaaggaacttgatcgatacatagttaggcgaatcaaatatcacgagaaatataaggtaacatctatcatagccattttattgagtcattatactgttatcaaaagttacaaccgaggttaagtctcgtgagttagcttagctttgttttagctcatgctatacattttctaagtttaattttataaattcttatgcgttaagctcttgttcgttttgtttatacttaaatctcagattctgcatttgacatctgtactctttgtttgtttcatctagattgcaaccttggcttgaattgcctaacattgtagactttatttataaatctaatgaaaggtcatttataatcttttagactttgtacatggtgtctttaatttgtctcttctttgagtaatagggtgtaaagaattgaagctagcacattataactaggatattgctttcataaatgcattgtttaattagttcttatttagatctgaacaattttttggtggggttttgaatgatggcttattgtgaatctgatatgatttttcctttctttcttaatttttcttacagaggtttggagtgaatttagatacaggaattttgctttacggacctccaggatgtggcaagaccttgatagcccaagctgtagctaaggaagcaggagctaattttattcacatcaaggttagtccagcttttccttttccatattcatgttctcgtgtaaaaacgaaattttttcacattatcttcatataagtatgtattttctattgacttgttagggtcctgaacttctgaacaaatatgttggagaaagtgaatcggcggtacgtacgttatttagccgtgcaaggacatgttcaccgtgcatacttttctttgatgaggttggtggtttgattgtaaatataaattatatcctaatttatgatggccttaaaattttcttttgtggggtttcacttggaacagcatacatctaattgtgttttcataacaacaaaaatccccttaaaattcctttgcttttttttttttttggttgttgaaggcttagattacaactattatttagagcaataaatatttctttttgtggtttcaccatgataggtggatgccttgacaaaagagcgtggaaaagaaggctcatgggtgactgagcggctactgaaccaggttagacaatgtgcaaagatactcttgatttttctcaactccattcctttactttctgtcatcaattgtaaacgaatccatttcctgtcatcgatctcagttgctcatcgagttagacggtgttgataagcgccagggtgtctttgtaatcggtgccacaaataggtaaaagaaaaacaaaccattcaatcttcatttagtaaaaaaatgatccacttcttactggctgttattgttgttacagaccggatgtgatggacaaagcttctttgcgtccgggtaggtttgggaagcatctctacgtgtcattaccaactcccgatgaacgtggtttgatcttgaaagccctgacgagggataagcctatcgatgaaagcgtcgatttcaatgttattggacggatgaagggctgtgatcactttagcggggctgatcttcatgcattggtttgttatctatactagaaaaacaaattatttcattgcaagttccggaattagcaacattttaatttattgcaggttaatgaagctgctttggctgctcttgaagatgaagatgaagatactattaaaacaacacattttgagcaagcacttgctaaaatttcttcatctgtgccacctgaggtttgtgcttttctttttatttcagttaagaatatttaagtagtttttatttttgttttaagtaatttgtggcgtaaatacttaaatttaattctcgatagtaaataaatattaagtttaatttttcacggtaataatactgaagttatatttctagaacttttgtaggtacctgttaagtgttaaatttttattttttatttaaaaatatatttaaatatactaataagaaaatgacacgtgaatattgactggtacttactgaagttttagaaatataacttaagtattatcgtcaaaaattaaacttaagtatttatctgcaataagagttaaacataagtatttatgtcgcaaattacttttttgtttttagtttttaatatttattgaatgtttgaattgagaaacagcaaagacagtactaccaagtattatcaaagcacttcacagcaacaatggagtaaaacttaaaagctgcatgtgctattagaagcttctctctctcaagtcaggaatttatttgtaaattttttatttttattttt

SEQ ID NO: 299451 - DNA, 3417 bp, Cannabis indica
ttggtgcggccgaggtttgattcttctaatatcattaaatgatctttacaatgtatggctaatatttaagtcagatgcaaactgagtattttttttttttcctcttttgttttcttgcagcttgagattgatggtgatttcttatattttctggcagattgtgctgttacagcggtagatttctactcttgtattttttttatttacaaacttcacagttaccaacaatttgacctttggttctgtagtttcagtatggtaatccagatcaattatgctcccctcttgttcaagcaaagaagaatggagaggatttggtggtatgcttatattttctagttatttatttgagttattgtttacaggttaatgtgaatgtgcttagtttgctatgatttaccacaaagcttctagcaatttttctttacttggaggtttaggaaaaatgatttgcgaaaagattttatgtgatctttgactgtgtttatagtataaacaacctttagacagttaaattcgtatctgtataatttatctaactaggcaggttctttagcacattcagaagttcattgagcttattaatgtatgtgacggacaagtagccatagctctcggttttagaatgaatcactagaagtattatgtgttaataatagaggacaaggggggatttaattctaaaaaactattttaccaaaaggaaaacataatgatgtaaaaaatgtcaagagttgaagatacaagcagtgcaattttatgcaaaatgttgtaagtttatataatggcaataagaatagaatgcccttctgtgtaggatgcatatgccaagtatgtcaaacagtattactcgagtgatgtcaaaatatacgatcaggagtacttgaaaattaccaccattaccgaagacacttctgcgcgactgtggtggttccaagtttgcactgaagtggcatattttcaagtggcacctaaaaatgacagcatccggtcctcaaaagttgatacaaagtatgcgttatttctgttctggagacttttttcagtatatattcatcaggttcttccactgcttctttttatgatcaatgcaatttaaattacataatcttagctttgatttgggtcttgtgtgacagataccatttggacctctgcaagaatgtctttggagagggtgtctatcctgatgttgatgcaactaatatatattatggaggcacaaatattagaggtccataaatttcatttttccatttttagaagttacacaactttaattttctatgtcacaacaagcaacagtcatgcatcttttcgacacattttcctgacaattataccaattttgcccgttttaaatagtaagctcatattgaatttttagcatctgatggctgaaacaacattataaataagaaccccgcatatgtacttacttatacaacccacatgagcttatgaagcgagaatcatttgcagggaccaaaatagtatttacaaacggctcacaggatccatggcgtcatgcttcaaaacagacttcatctccagatagtgagtctctcttcttgtacttaaaacttcattgacagtcttgagttgatttgagtcattacgaccttttttcagtgccttcctacattatcacttgccataactgcggccatggaactgatttgcgaggttgtccccaatctcctttaagccctgaaggtattctgtgctagatatggaccctttcttttgtttatcataaaaattcaaaacccaatttagtattcgaaataacattcaaaaacatccttttatttttaataaaccgaatctctttcttcctttcaggtgatgcccagaaatagcagctctcctgatgcagttcacaaagtaaggacaaaaggtcatagaaaacatagatttgtggctgtctcagtgccaagagagtgaaaagagttgcatctagtgatgcacattttctccacaactcgggttcccgagttctcgagaggattccttatctagacagcgaacaagataacactcccccaactcgtttgtctagtgccggccaaatgttatttaaacggataattgcaataccaagaaacgaaaatctaactcattatcatttgatgtaaatctcttgtcttgttacattttttaacacagattatgaactttgtattatatatggaatacaggagagatacaaataagctttgttgaaagaaaaaatccatttgacaaaagtatatatatatatatatatatatattatatcaaataagtatatttgatccttcaatttattaaggattaatattagcaaaaatttattagggataattaaaatatacatatatattgcatcctggttaatacatgcatagtggtcaaatgacaaattatgagattatgtttatgtatttgtatttttagaactaatatctatatatgtagtaacaattaaattaatttcaactagtttaagtgagttaaatactgcaattatagttatgtttctttttaacaataaccattgcaattcaattatagttatgttctttgaccacatttgcaaattaattagaaaaataaacaaaatacacctgaaagaggtacatttaggaagatcaagtgtaaatctctatcaatatttaagaaaaaaaaatcctattaattattattctatatgatttttatttatcatcccacatcagttaaggaggtcatagttgcaaatctgagcaggtataggagacaaccttgtcttgtgttgatcccaatttaattctttaattaattaaattcaagtataataagttaagaataataaagaattgttttaggttttttatattttaaaattactttttctagtatattagttgagacgaaactttcttgtcaatgtacattgtaagaatgaagaattttggtcttgtggtatttttggaaacttgttaatcttagaaataagattaataaatccgatttgttagaagcacgaaggaaggatgttctcaagactaaaagattttacaacattcttcatgtccttagagtccattactacaatgatgtttggcataaagttaaagtttctaaatattgctgcatctattgccaagctcttaatgaaaacttatttactcagatttattggcaaaagtatttcatgtgaactctcttctttgcccagtttgttgtgtcaaaaattaagaaagtgggaggattaatgatttaatagatagtatcatttagagagattttagagtgaaatataattgatttatatctgtcctttatgtatgaagtgaaacttctaagaatattctattcaagaataatctaattcaggagcggacccacatagaggcgaggtggggcagttcccaccctgaaaaaaaaaaatcg

SEQ ID NO: 299452 - DNA, 1385 bp, Cannabis indica
tattagatacaatgtcattagtcattttgtttattaaatgtacactatatcattttttttttcaaaattaagtcacataaacaacaaacaaactcattaaaatagttcagtcatcaatttgaccattttatgaactcttgaaattcatttaataattgtaatgtttttcaccaagcaccatcctaaagtattcatatcattttttaagaatctcctctgcacattctgtaccatcaccattgcttgtctcttcttcactgtccatctcaatataatatgacctaaatcccactaactttgcaggagcaaagaagaattttgaaccgctattaaccatgcactgaaaaattcaaaatttcaatcaacttaacaatataacttctgatagctttggtaataaaatgaactaaaatttaagtaaaagcaagtaaaataaatacaagtcatgtaattcaagatatataaaagactaattaagataatctttgttaagggaaataagacagactttaggaacaacgattgctgataaatgggagccctaagaaaggaccctgtggttaaccataagttaatctttgtaaaggaaacataaggaaaattttgaaccataaggataagtaacaagaacctcatgcaaagaaacaatacaacaagcgataatagaaagaagtcttaaattttcttcgagggagttaaagaggaggttaagattaagatcctgggaattgctcacatggaggaggagtcttttcctcttaagtacttgggagtcaatctaagaccaaccaaatggaaggcatcgaattgtggtataattctagataaatttaatgcgaaactcaatggctgggctagtaggaacttctcctttgttggccgggcccagcttatccactctgttttgcttagtatccgaaatttttggattagcgtcttcatcctgcctcaaagaataattactaccattgataaaagatgcatagacttcctttggggttcgattggtaatagaagcaaattttatctcccctcttgggaaaaagtttgtcttcttaaacaacttggaggtattggtttccgagaaggtaaaaagtggaacatggccatgatagctaagcatatttgggcaatttctagcaaacaaaacaacctttgggtgaagtggattaattcgatctgtaacgtccccgcttcaagcctccattgggtccttacacccacggaatgaatgtctcttataaatgagtacgccactctggctgcttcctcgattgatgactgaccctacagaccaacacgagtatgaatgtctcttatactcgtgttggtctgtagggtcacccatcctgaaaactttgtcctcactcgcacgcttcctggga

SEQ ID NO: 299453 - DNA, 5569 bp, Cannabis indica
aaaattccttaagcattgtgatgatcatgcctactctccctctctaagctataaagatactctaagagctcctgctaagtctgtctataaaaagagcacttttgagctttcaaactctattcctttcgaggagtcttccagtcatatcatctcttcgaaccaaagccttcacggtgttatggatcaccttctcgtccctaatatttccagtactatcctaatcacttcttcccttcatagttctactaaagcgatgtcagggggcccttttcaaaatcccttgacctattctcgcccattgtatttggggcccattactcatcctgttccttgtcctattaacttgagtcctataatggtccctgttgttgtctcatctgcctccaagggcaaaggaattatgcaatttgatcagtgaagaacttcccttctttctgctactccaggtgctattagaaatgtttctagtaccaagaggtctttctcaagatagaaccaacaagttgactcttctttcagaagtatgttgaagagagctcgagcttctacttctgactttgctatggtcccttccatttctgattctaatggccaggcgggtgttgctcaacaaccccaccaagaaaaatgatccttataagttggaatgcccgggcgttagggagtccccgagtattccgcaacctctcccttttggttactcaacatcatcctcagattctttttatgatggagactaagctggctgctaattctagttctaggttgaaagcttctttgtcttttggtaatgtatttgaggttcctaagaatggtttagggggaggtttgttactcttttggaatgatggagttaatattactattttatcttactccctgtatcatatagactgctttgtttctgctgatgataatatgaactatcatttatcttgtttttatggttctccttatgttacctccaaaaatgatttgtggttactgttaaatcatttgtatgatactgctcctattgcccctggttaattataggtgacttcaatgatattcttagctttaaagaccgtaacagctcctctactcctcccccttatgctatccataattttcaatgttttgttcataagtacgatctgtctcccttgcattttgttggaaatcattttacttggaaacatgaggatcctatggaaagattagattggggtattgttaatcagccttggtctgttatttttctgtctgcttctctgtttcatctctcgttttatggatcagaccatagggctcttaaagtacttttcaatgatatgaataattataggtcctcttcaggtcattttttctttgaaaataactggcttttagaacctgatttctttaaaattattgaagattcttggtattctagtgatcctatccctaataataatgctaatcttgtgaattttcttcataaacaaacttgttgcattcacaaattaagagtttggggcaagaataagaataactttaagagtgatattagaaatttatatattactatagatcatatctattcaccccctatcattactaatgatgatgtcgctaaagccaacagtcttcaatcttctttagataccttgttgtacaaggaagagttgtattggaaacagagatctagggtcaattggcttacagctggggactagattactaaatacgtccacaataaagctttaactagaagaaggaataaccttgttaggtatattaccctagataatggttccactgtccatgattttaaggatatttataaccactttgttgacttttactctagccttttctcctctcaggctgttgatgtcaatagtgttgatgttattctctctggtgtctccataagtgttagtgaccagcatttccaacttttggctaaactgtttgatcatgttgaagttaagcgtgctttattttaggtttcaggagacaaagcgcctagtcctgatggtttaaattcctatttctactaaaagaactaggttgtcattggggctaacttttgcaaggctactcttaatattttaaacaatggggttgacctgtcgtctattaatgagacatttcttattcttattcctaagaataacaatccttctaaagttcgtgactatagcctagaagtttatgctctaccatttataaggtcattgctaaagccattgcaaatagactcaaacctgtccttaaccacctcttctctcacaactagtgtgcttttttgtgtgaaagagttatctttaataatatctttctagccaatgaatgccattaataataggaaaagtagtaaagttgagtgggctgcccttaagttggatatggagaaggcatttgacaaggttgaatggacctttattaggtgcattctcaataagtttggttttcctggccaactcacttccctaattcttcgttgtctttctactgtttcttttaagctctgcattaattatcatttatcctctgtcatcctccctactagagggattaggcaaggggatcccttgtcgccctacgtattcctattggtggccgagggtctctctactgctattcgctgtaaagtgtccaatgatagtttccaaggtatttccatttgtcgatctgctccctctatttttcatcttttatttgcggatgttagtcttttgttcactattgttaccctacaaaatagtaatgccattaaagatattctttatatatataataaggccactgaccagtctgttaatttttctaagtcctcagtacttttctctcataacactagtgtgcaagacaaaaacctttttccttgattctctcgatcttgaggataaaacttttattaataaatatctcgatgtgccccaatatttttttcattcgaaaaaaatcctctttccactatcttctccaaaaagctagtagcaagctgactgtttggaacaataaattattttctagagctggtaaggaaatccttcttaaagcagttatccaagctattccttcttatgttatgttctgtttcaggcttccttcatctacttgcaggcattttgagaagttcatggctaatttttggtggggctcttcggggaataatcataggaaagttcattggaaaaaatattcttacctttgcaagttaaaattttttgggcgttttggttttcgtagtattgttcaccacaatcaagccatgcttgctaagtaggcatggcggatcttcactaaccctgattcccttttaaccactcttctcaaagccaaatattttagaaataatgaccttctttgtgcttcccttggccattgcccttctttcacttggagaagtctgctttggggtagggaactcctttgtaagggtttagttcggaaggtgggcaatggtaaccctattcaaataactagtctgaattggatcctggatttgagggctgtttcttacaataatgatcttcatcctcctgaggataccacttcttttttcattaaagaggagggtttctgggatgttaataaactcagttctcacttccccactaatgtggtaacttctattttaaaaatccctattgatctagctagagaggactgtcttatttggggataccatccatttggaaacctaactgtcaattcggcttaccacttgctaattctgtcctatccttcccttcttcttctgatctgggtttttttaaatgttggtggaaaactttttggtctattaagatgtcccctaagattaaatattttgtttggaaagctttcaatcacttgttacatctggtcttaatcttttccttaaaaatgtgattgataatccatactgctctatttgcttcaatcacgttgataccaattctcattctctcctagagtgttccagaacagctaaaacctggtcaaatactagattttctcactttttcgccactaacaaagattgtgatgtaaaagaatttcttttgagaaattgagaggttttgagtttcttaataaaaacgatttgcctttattttatggtatcttatgggttgtctagaataattgtaacaaatttattttctcagcttataagtcaacttttatagatgtagaatcatgcggctcaagcaaagattatcattccatcacacaacaataatatagaagttgccaacatgtcatctagccattttgctgatggttcgtcctaagatactgttctccctccttttggaacttataaactaagtgtggatgctttagttcgggataaaattgcaaaattagttttggtgctgttattcagaactgtaagggggaagttgttgcaggttgtttttcttcagtttctagtagcctctcccctctcttagcagaagaagaagctctcaacaaggctctaagttggtattctgcaatttgtttccctatcagcattataaattttgactgccaagttcttataaataaaatcaagcacaagtggaaggatagatcaccactttcgaacattattcagaagattgttccctctttccctcagcttcgttccaagaagtttaaatcatttagctcataatcttgctcagagagcgttaggaactgatttggaggttatttggaacgggtgtgattcaagttcgaatcgtggatctttgtaaattgttgttcactactttatctcatagagttacaatctcttcttaaaaaaatgtgactttctatagttaaaaaaattgagactttctatttctttttaagtaaattagaaaaattgtgagaataaatgaatagtgcagttaatgatgcctgtgagttgtgaagacaccgagaaaatcggagagtaaacctttcgaaaaggtgaataaatgatgtggcaaaaataaaagtatgtgtcatttatttattggagggcccagtagggaacaagggaaaagggacaggttccgtcgaacacctcaatatagcctaaaaatatattattttattaggttaatactattttggatcaaaaattaccgatttgaccatctattttgttaaatgacaaaataaactctatatttttaaaatggtacaaatagaatcctaaactcaatttttcactctttttaataaccaacttgtagataattcttagcacgaatagatactataatgtaacaagttttgtcataatacatctagatcaggttattaccaagttttattttgagaaaaaccaatttaaggtactatttaatactattttcaaaaatacataatctaatttgttatttaaaaaatagagggtctaatcggtaatttttgcaaaatacaaggtctaaaatagtatttattttattttatttttatctctttcatattatttttgatattttttgttctaaaatatttcaatagtaagtacctctaaatattattaaaataatattatattatgatttaataaatatttttttttaattttatgataaaataataataaataaagaaaaaaagagaagatataataaagaatgtcattgttaga

SEQ ID NO: 299454 - DNA, 1273 bp, Cannabis indica
gcttcattcttatcagtaatgactttaaaaccattccatttcactctctgatcagttacagcaccaggtcctttatttgcatactcagcaaagtaaactgtgttaagaccaaaatcaccattatcccattcaagccaaccagctggttgaatcaaatcatcaattatagactccatgatcacagttctagagtactctttcaatggtttgcctaagtatgttggtgttaacaatctttctgagaagaatttctgttcaggtacaatcctacagttttgtaaaactatgcctgttgtttcatgtttgttaactctgccttgggcagtcactgcattgttctggtttttctcgggctttcgaacgatgatcaacgagttttggacgacggctgctgcgtctccaaagatgaaatcgactgttcctgatatgacacagttgtgatagaattgacgatgtgtttgaacatataatgtgttttggtaaccatccattctacaattgtaaaatgcagacatgtctgattgaactcgaagtgccactgcttggtgtccttctattcctgctgtgttttgaaatccgatcgatttcgccacaaatccacttccaattgcagctgataaggtaagaaatgaagatgatgataagcacaattaatagcaaggaagaaaataaaaattattgggtcatatttttttggaccctggttgggccctaggcgcaggcttagttcgtcttagctcaggctgaccctgattagtagaagaaaaaagaaaatgaagggaagtgaatgtgttaaggtaatgaaaactcaaaacttacagaatgttgcagttctaatggttgaaactccttcattgaaattctttcttcctgtgatgattgtctttctaggtccatctccatacataaagacattcacttgttcttttgtaacagttaggtactcgttgtatattcctgctttaacatatataatgtatctgcctttgtggttcttgggataagaagaaagagcttctgcaatagttttgaaatctccactcccatctttagccacaattttatttggaattgcattttcaatgtcattgttggtactcactagttttttatctgtagtagaaaaccatgatggatattcaccattgctttgatagacctccttaagtcgtctagaaccagaaccgattgtaaagcctttgttaaaatttgcaccaaaacttgctttactagtgtcactgcctccgccacctccacctccaccgccacctcc

SEQ ID NO: 299455 - DNA, 926 bp, Cannabis indica
gagagagagagagagtatagtgagtgactacgtaaggtggtcttttatgggtcttgttaatatttggtgtggaggtgtgtggtccaacttctaatgagtaaatactgattgtgatgcgtatccttagagccaagacacacactctcttttccaaattagagttacaattagcttttggtcagtcactgtccatattgttgttcacatgtgctcaaacagagttggatctttgtagcattcgaaaattccatatgaggaatctaaaaaatagcatgcgtctttaagcatgagaaattgtttaagactatataataatatagttaatatttatgcaattaaatattttggagacctgttttatttttttaaaaaataagtaattgtatgattattggtttaaattagagatttagttatatttaattaatgtgtgttttgacttttgagaccaaattattatgtgattatttcttaactattggtagaagtagaattgttcatacgatgtagcggaaaataccagcgggtaaaaatatactgaaatgtggtattttaaacttatttattagtgattaattgttggtgaaattactaaactacccttacttattttttatattaaaaaagagctaattaaatttaggggtatttcagtcattggatttaattaaaagcgaatttttatttgggtaattatctttgcacccaaaataattataagtacaccactttttgagttgatcccatttaataaattaaaatattattttttttttgataaaaacacctcatctatttacaattttaggtcttgaatcaaaagtacactccactcacgtttagggtttttgtttgggaaacttacaaaaatactagattttgggttaaattttacaaaaatactgtcacacggaatttttttcaaa

SEQ ID NO: 299456 - DNA, 914 bp, Cannabis indica
aaaaaaaaaaaaaacaataatgtgcaatttaagtaattttgggtctattcctaataaaaaagacatatgaaagaaattgtaagataaaaaaaattaatactaaaactgaagttatgtacgtaattcatgaacttcattgtagtagaaattaatactttcctaatatacatatatctcttacaaaaatggcaacttgtgcagagaaaaagacaaaaagcaactgagacaagtctactctagctggtgaaagtgtaactgtgcaagtctattcaatatatactgactaggataaggacatgggctttaatatggatccaaatttgagactttttttataattttgcacttatttaattttttcaattattttttcgaactctttattatttcattttagtcttggtgtacatgtcaattttcaatggatcaataaccaccacaaaattaaagcatttatagattaggtgaggttaaatcaatttgcactaaatatttattgtttttgtcatcatgtcttcaaaattttcttcttctcagttcttcattattagttcctttgaaaaagtttaacctaatcactgtttaatttttaaatacacctcacctcaacacactacacactttcttttgtttaaataatattgggtaatttatttaaaatctaaaccaaactagttccatttaataaaataaaaaaaacctagtcaaaaattcatggtttttttttgggtatgcacatttatcttatgggaatggtttcgtagggacccgcccctagtgaggtggagattcttcgtctaaatggagaacgcgacgaggattgagattatgttttgtctctgaatgttaaacggagcgaggacgtagaccacatttcctgcctcgacgggaacctatttagtattttattttat

SEQ ID NO: 299457 - DNA, 2893 bp, Cannabis indica
catagcatcaatgtcattgtgtatcatcaatgtaaatttcaaaaataacattttttttatctctaatggtataacattcttatattttgccaaattttttaccccatcaagcatttttcaaaaaaataaccatgctctaataataaatatacatactatttcaataattagtgatggattcagaattaaaattgaaggtatggtatagtttaatcaacatgttaaaattattattatatgtttctatttattatttttaattaaaaaaaatatattataactaatcaaaatttatatataatttttttttttcatttttttaggagttacttggtcggcctatgtcaatattaataaatgagcattgttattggataccagtagtgcttaacacctttaagacgtgttgtcttgcgattcactagtgatactccctaaaagttattatatttaactatatagaacccgatatttaattaaaccaatagttatattgacacgtaagagagtgcttggcaccacgggtgtcttttaacatttatcataataaatatacatactgttttcaaaaaaaaaaaaattaaaggaaatatagatactgttccgataataaatatacaaactgtttaaaaaaaattaaaatttaataaagccattaattcctcattttaaaaaaaaaaaaaagaagcctttgattgctccggatataacatagcatggagtctgcgtggttgttagctctctcccaatttttagtggccacgtctatattactctctctctctttctctcaaacgtaaacacctatttgatcattaattaaactaatacactaaactcgcttactaattaattactgagacctcctctaggaggtgaaggtccttatattaaccaactttctcaactttttctctctctctctctctatatatgtaggtatatatatcagcaaaaccccgtggaccatttctttcttcttatttcttcttcatcttcagctcagtagtactctttttccaataataaatataattaattaataataatatggcggaggtggtgaaggagagagtacaatccatagctcattccatcaatgctgaaatgaaagacacaatcccagatgagttcataatgccagtggaggatcagcccattctcaccacattcaaagggccaatccctgaaatccccaccgttgatctgagtgagccggatcaggagaagcgggtcgggtcaatcgtccaggctgcaaaggagtggggtttcttccaagtggtgaaccataagatgcctgttgagctgataaggaagttgaagaatgttggagaagaattctttgagcttccacaagaagagaaagaagtctatgccaggccacttggggccacatccattgaaggctatggatccaagatatctaagggtgccaaatcttgggtcgatcatctctttcataggatatggcctccttccaccattaactaccaattttggcccaaaaatcctccctcttacaggtatctctaatttatttatatatgtttattgaggctttaagttacgcttttaacaaaatattttaatcatatttttaatttaaaatattttcgaaatttaccaaatattctaattgatcaagtgcgggtgcactggtaaaagatttctctacaaaaatggatttagccaatgcaacagtttagttctggcttttgtaaacatatgaaattttaaaaacctatatactaattaaatacaacttaacaaaaacagtttccataaaagagtatgttaacttctagctattcgcaagtttaatatagctttttatatatatataatcacactaaatatagcatttaatatagattaattaggtgaattaagaaaatggttatgttattttattttatttttttctcgttacatcctatattaatcaatagggttgtactttacctacttgtaattatttaccaaaaagttgacagcaataaatagagagatgttattattacttttatctaataattatagagagatattgagagacaataacgatagattaaagtgatgatgactaaaagaaaagggaaatgatatggtttgtgatcactttaattacctaaaaagggtttttatttaattttgtaatatattatagggaggtaaatgaagagtatgggaagtacgtgaaagaagtgggagatgagatattgaagagtctttcattagggttagagttggaagagagtaggatgaaggaagcagtgggaggagaagagattgaatatatgatgaagattaattattacccaccatgccctcgtcctgatcttgctcttggagttcagcctcacactgacttgtcctctctcaccattcttgtccccaatgatgtccctggtcttcaagttttccatcacaaccattggatcgatgtccaatacatccctaatgcccttgtcattcacattggtgatcaggcccaggtattcattcttattatattattattaataattaaaaataataataaatgttacctttatatggagcaataattttctcgaacttaaaaactttatgctaaacataaaaataacaaagactatcattcttataaaaatattacaccataccaaataatgtaattaactgattttgttgggacttacctaacttttagaaaattacacttctatatataattttttatattaataattaagatataagagcattaattagccaaccctataacttataggttcatatgcccatccctatgcagtatgtaccatatatgttaaacgtatacgttaattatagggtgattctaccatgcacccccttaaaagggatgcactgatgcaccttaacttgtttc

SEQ ID NO: 299458 - DNA, 3388 bp, Cannabis indica
attaatttacctcttttttttttaaatgattctctctaaacccaatttgtcatttctggaataaaaatatataataacctcttttaactcatatgactgagttaatttccagcaactttctcaagcaacagtgatgaagctatcaccattggcgaaacttgacatcgattggaaagccgaatacctagctgccgatgaggatgatggtgtttccctaggattcgttgttggcaaagctagcttaagagaaagaggtgatgggtctacagctgatttcagattcaaattaaaatcagctatagttgtaccatgagggatggaatgcaaggctattgggcggacgagcttaggatcagctgtggtgttggtgctgttgttaatctctggatgtgtctggcctaatgacagattttcaattggagagggtgaaacggtagtatgcagagagaacctcccactaggattgaaaggctcaggattcagtggtggtaatggatgagaaagtgagtgacaagcattatcttgattatggtattgctcttcttccattggaattgccgttacctaatacaaaataaataaaagaaaaatatgtaaggatgaatttcttttgatatttttcttgtcctctaatttctctttggttgttgagaaaataaggcaagtgcaaagaaaagttacgattttttttttgacaaaaaaaatattagatgctttgctcaacaaaagctaaatctattaattattaaaaaaaataacttatatttaaatccatctgactgatttttattcggatatttcctaaaaatgccaaaaacatacaacaacagatattcaaattcgaaaaaaagaaatcgacaataaaaatccaattactttgttacttgatttagttattatctgtttatatcagagaaaggaaagtaaaaacaaaatatgccaaaataatatgtatctaaaaacataaaataaaattcaaccacagaatcagcattttttcctaatattaatatttccattatccctatgcaaaaaatacatatacatttcaatcatccccagttgatcattttcattgtggcttgaaaatagtaattaatatagaaaaaacaggctaagagggttgaataattaccgtatcggtggtgatatcgaagaggctagatctacggcgtcggcgattatgattggtccggcgaagaaaatatttctgagcatggctagcaacctgcgtaggggttcgactcttcacgaagttcctggatattcctcgccaatctcctttcccaaccttctgtaatccaagcaagaacagcttgtgttcttcttccgtccatggaacacctatttcatcgttcaaaaaaaactttaatcgcttattctttcgagaataataaatactgaaaatataattttcttctcaattagaaaaatagacatgcacagcctaaaactatacagattaatccagcagattaaaatcattcccaataaattaaccagtgattaaattaatattccacaaaaaagtcttcgagaatcaattatatctcaataaattggagattaaacgacattaagatctgagactgacctcgcttgcgctcacgctcacggttcccgccggagttgtggacgacgtcgttatcggaggcataacctggaccgccgtcgtcttttccggcgttattgttgttgttggccgcaacagtagcggcggcggcaacctcttgaggctgttcgtactgagagagattgttcaaactcacactcttcctcatggagtcaacaactacacgtacgccaaacagcatgaactcgccgacgccggaatcatcaggaacggccgcggaggatgagtcgttggaggaggtcggaaatgacatcttcgagggaatcggcgatgatctccagggccgtacgatcggagaagagagagaaagaaggaaaaaagaaaataaaccacgcgcgtgctttacaccactgtggaatgaagagggtgagaggtttggtgggagtagtatttatacggagagaagaaatgggttgaggaggttattgtccgaagatgatacgtgtcaatgaatcattagtcaatcggtttctattttgtatttcgtgctgtctatttaatatttataaataaaataaaataaaatctctctcatcttcaattactctcaaatcaattactatttaattggattttttccatcggattttcctgctgtcactttttacacaaaacaaaattgaaaaaacaaaacaataaaaatatttccataaaacaaattatttcctttcgtttctcattcttagaaactttttgttacttaattatggagctgttaaataattttgagatttaaaatttaaggtaaaaaaagggtaatgcatacttgaactatagttaaataaatataagtttctttgaggttgtttagtggaataagttgattgggaaaattatatatttggttctatataataaaaaatatatacgtggatgattatatttagatctatagcataggtagctaggtagagtcattaacttggggataaggaataaagttagcacatgattgtgcaatgtgacaaaatgaaaggcgttatataaccataaattttcttatgtattgtatagccacattgtgataggcacctcatattatcaaattatgtaccatgttagagttaagtatattcttcttgaaaagtcataatgaagtttgaccatatatattataggacaattggaccctttttttttcttttttttttttaaggggctaaatgacaattgatttgatatcttaaattaaatggttggttagctagctaagaaaagaaaagagtagttggaatcaacaaatctctctatctttaatgtttaataaaaatacttcaatttgaggataaaaacgcacacaattgtgaatgttatgacaaatccatgccattttcatttattatgggtattggatgattagatagttcttttgataagtgtattatatgccatttaattatgttgctatttgttttatccatttatggtataaaattttcattatcttttcatattcatataaatgagataacatgttattaatgcaatttgtcaactatctcttatttttattttaaggaaatgatagtaagggcccgtttggcacagcttttagaaaagctaaaagctgcttttcaaaaaagctgtgacaaaaaggtgtttggtaagcagttaaaaaacaacttattgaagaaattatggaaaagctacagctaaaagctaaagctggtacaacccaacttttaaaaaaagctgttttgatttaaagactttataataaattatttttactaaaaatttatttaattatttatt

SEQ ID NO: 299459 - DNA, 3950 bp, Cannabis indica
tatatgtatgtatgttaccagtatgatatagtgaaaaagttgctggaaaatggcccaagagaagaagaatcaagatggtagaaacaaccaccagctttgcctgaaaattaaacttcatcagagtaaaaatggcagcactattttcttcaagtaaaacagatgaagcaataataggaatgtaacccagagaattagatccaaagggtttcaattctgatctgaaattctgttgtgtcatgtatcactataatgaaatattggtttgtgttttgacaatgtaatctgattatcaagatttctaattttctataccacgttaataggaaaatataaataaacaaaagggacttctcattagttgtgcatctctcattttttgtagcccaatacttgactttaataacatgaacaggttaactaccattaaatgagcaagagtgtaatatgatgcatgtgattaatgttttatttaaatcgaattgagtgtgtattaaatacacatagactaattggtttcacaccaagtttagagcattaaacagacttaatattctccaaatctttaagaaattcaatttgtttcttatttaacaagtataactaaccaatgaaattgtataccatctaacatcacattttaattgtttacttgacaagtctatatggttaactttataaccagacaattataacgggtgctcatcaaataatagcttactgttggatatttaatccaacaccaacctcaaatcccctgcacacacaaacacaataaacaagaaagtgcaacacaaatacaagaacaaaacaatacacaactcgaaccaatcatagaaaataaaattaagaaataacacaacaaaattatagaggttcgtacttcctctaacaatagttggagagcctattcccctcttctgaactcccaataatggacccagattcttgcactaattgattcaagtttacatatagaataaagggtttgatggattgttaatatgatttagcatgtataaattgtttcagatacttattatttactggttatggttctgtgggcatatctaaaaaagattaattgaattgtgagatttgattaacagttgggattatctaataattgtgttatctagcttgttggaaatgttgaagctcaaattttgttttatgtgattaacttgacttttatgtctgtgtcatttttttagtgttgtaatggggttagtgtttggtaaaattacccgagggcgagtaaatctcaagtttgggagaatttggcaaacgagatttatactcgtttattagggtagtttagaacatgctttagagtcttttatgtcaatttgattcaattttatgcttgttttcttttgtttcgagaaaatattataaaaatataaaaaatgaagattcaagttaaatttgtggaaaacagacttaaatggaattatttttggtttggtggtatttgggagcaagaatggagcaaggggcgaaaatttggaaaactagcgagttagagccatggctctaaaagagacaaatgagcatataagcccattggctgcaactccatcataggaggttgcagctcttgaagcaaaaaatttgaaaaaaaaaaaaaaaagataaaaagattgcaaaaaaaaatatgactttcttaggtggagttgcgatttcggtgcctcgagttgcagttcctaggcacattttttatcttttcaagtttaaattctaaatctttttagtatcttctagagaactttgttagcctgtataaattctaaatctttttagtatgttttgagagctctaaactcaaaaactcattaatagcaactacttagtatttttattatcttcttcttcttctctttctctaattttgtttatgttcttatttttaattgtgaatacaatggttatgaacataattttcatacactaattgtcttatctattaaccatatccttcagattccactaactctttatccgcccaaggattgccttatttggcatcatactgctacgggggtgttatgctgttaaattaggatatcatcttgctaccttcttgcgagaagcttcaaccctttaccatcacaatattcctgtagccggtggtcaaggttttggcgtctaaaattgcctcgaaaggttaacatttttccttggcgagtgattcataatatcttacatcttgttgccattctccaccataggcatataattgatgattctacctgctccagatgtcaacatctttgtgagtcattaaatcatgcttcttcctctgtaatcatgtaaagcgaatatggcagcttgttcctttccatatagacctcctcgaaactcattctacaaatggtagtgactttgtccatcatctctttttgcaatttggtgatgatcaaatggagaccattctttgtctcgtgtgatttatatggcatgaccataaccaatgttgccatggctcttgcatgctcccttctaaagttcttgttgagaaagcacttacctaccttcaagaattccaccatcataataacaagcaagtggtctctaaaaagatctactgcgctacggttcagccatggtagccacccctattgataagttaaaacttaatgtcgatgccacaattgaccatgagggggtgttagagacagttggttgctcctactgtcattggtcgttagtgttagttagtccatgttagttttagttagttggttcagttgagtttgttagagtttttgttttagctcaaacttcataaaaggcttgtactcattttgttaatcgatgcaatctttacacctttctcttatctttgtcttctctttcgttttactcttttcttctccctgttttcattttcttgttctttaatggctagacacattaacatggtatcagagcattttcctcctttagcttttaacttggcaactgtaggtaatggtgctacgatccctggtgcaaatccttcgaacactaccactgtcgatggagcttctatcataaatcgaccgaactaggaacctgtcatgttcaaccataacatctcgattagattgaatgatctcaatttttttttttttgtggaagcaacaagttcttgctacaattagaggcaattgtctactgaaatacatcaaagaaccccctcttgctgagttcttgagcaatgaagatcgacaagctaacaaagtgattcgatctactttgaatgggaagttcaagaccagcttctggtgtcctagttactctcatccatgattgaaagtttgctgacaagaatagttaggtgtaactcatcacaccaaatttggaattctctggagaaacacttcactctttggtagtatcattcgagactctaataactttgtgattgctgctatctccaaactaatcaaagagaggtacaatgtcaaaaaaaattgaagctaacgccatttcagtttgcttacaataattaaaagagattgaatgtggtgtgcatatcattgaaattgatgctcttgtggtctcgcaaagtgttaatgcttatcataaacagtatagcggatttaatgattttatttttgatgtaatttattggacattctttttttcaagtgtttctttggaagagtgctaattctaattatgataagatttagagggttgtcgttcgagatataatgttgtaagtgaatttattgattaatgtataagggaaattttaatttctatacgtgcattaggggataattttttccctaaattaatacttttctacattaaaaatatatgaccactttttcaaaccccaaaaataactcctctaaaaactcaaacccttctctctccttccctcaactctctctgcctcatcttcgcccaaaccccatcgcaggaaacccaccggccgtcaccacgcacatcgtccacgt

SEQ ID NO: 299460 - DNA, 4260 bp, Cannabis indica
ccgacgccatagggtagttcagaaaaaaaaaataataataatttccaaccgcctctaaatggtataatacaattttatacctacggtttttatcaaaaaaccgcctctaaatgtcaatttcgaacatagcgggtattttcacaccctttagcttccctttttataaatagggttgaaaaaactgcctctaaaggctaatattgtagtagtgaaatattaaatcatatataaaagcatagattgttccactcatcattttaattttgagatgaaatctcataattcttgtcaatcgtaatcgaccaaacatcttttaataataaagattaatatatactttctaaatatacgcgacaacgtattaacgtataagtttttaagttttgtcaatatacgaatggtcaatacacaaccaagatagttgcatacgttccaaactttaagaacagttaaaattatttttttaattatttttacaaacatttttcatttcatttaatggatttcatttgtataggtgatcacttgcatttctatataaataggtgatccacgtacatattaaacctaatcacagactcttgtaaaagtggactaagcagatcgaatcacaatttatacgtccttttgatgtttgcatactcgttgtttacttttaatactcgttacgcatgagtatacactttgtgaatacttcctattattctaagtactgttcttacttaactcgaatacttgcattattatctttgacaacacaacttaatcatcttttttcctcaaataattaattatagatgtaattattgtacatacgtatacttgatgggatatattcatgctttgttggatgtacataattttgactgtttttctcctatataatttttggcttggaaagatcttggataacttttcttttaaggaagaataataatggtatatattatgctatatcatcatgatgtgatgtactctttcattttttattctttcccaaaatatgtaaatagttttgattatgcattaattgtggaaattaattagcaatgatttattatatagagatatattgctatttcacatttggacttgaccaaatctcatgttagttagtttggattaactgtcaaccgcatatatatgcttaattaatgggaaattataggtatttctaggagcttttattgtgccacacaataattgtttcttacaacattttgaaacttagaaaacttatacagcactctcattaatatttgtattttgttgtcaaatataatatacattgtgactaatttgtacattaaaaaagaaaaaaaaatcttgttaaaataaatctcttgtctaggtcaacataaaaatagttaaaagaattataaacctacaagtagtattcggcctttaacaacctattgagtagaaccaaagttttgcaaagtttgttaaaactattgcaactaattctcagctctctcatctacttcctaagctattaatgcaaattcaatcaactaaaaaaatacagatcggatcaaaagagaaaaaaaaaagggagagacttacagagataagtcttggagccctagaattagagcttagagatccattcgaagggaacaccatgcacaaggaagaagaagaagaagtcagtaacagagagagaagaaaatactataaactcttgtaaaataaaagggattactaatcgtacctctgatttggaatctaagcttgtaatttgctgatcttgaagatccaatagtggaatcgaactattttttaggtaaactcaaagagaaagtgctcaacaatattttttggggaacttctataaatctagtgctatcttttctcttggtttttttttttttaatatatatatatatatatatatatattattgctatgtttgtgtgtgtgtagttttgtgttttggttttgatctgggaagggtggtaaggttagattgagggtgatagcagtctttgagtttcttgagaagaaactcgaagctctgctagggtttctttttgtttgtgcgaggtagaaatgaattaggttcgagattgttctgaggagattttgtttgtgagcaaaacaatatcgtttagttttgactcaagatacgtaaggtccttattgaccttaattaaaacttgaccaattcctattgggtgtaggttgaattagtaaatttctacagtggtatcagagctaatcgtggcaagaaaagctacaacaaaaagaaaggaagaaatcaaggaaagaagaggaagacttcgaaattcaagaacattttcttacttcacataaaacatcaggatatttctaaattttattcaacttcgacttttgccagcaaagttagagtcaccggcaaaggttttcccctaaaataaaaatgaaatgcaacattttattaattgtaaaacgttttgccgacgagcctaaattcaccggcaaaatttttacttaattttttgcgcacatttttactgcgcgagagaattgaatcgccaaaaattttaatgacttttactggtacatttactcgctagccaaagtaaaattaaaccgccaaatttttaatgacttttcgacacatttactttgcctataaaagtgaaaatgaatcggcaaaagttaactccttttggcggttcgcttaccaccttttaccggcgaagtacaatagtttcgtcggcatagcttacttatgccgacaaaatatctcatcggtataggtgttcccatagtgaaatggcagagataaattttccacctttccccgatgaggtttgtcagtgcaatttatgaatctcaccagcaaaaattctttttcttagtgttagaatttgttcaattgttatttattaatttttaataataatcatcaatttcagtaacttaagtcatattccaaaactatggatgaaaacacaataggaagagtattttttttttttttgtaaaacacaatcagctttacaaggagaaggatgcaccaaaacatgcgcaaatttattagcagatcacttaacaaattaaaaaaaaaaaaaaatagaaccaatactagtaataataaccttacaatccgaaattacatgcatgcagttattattcaacaaatgatcattaaccacaattaataagattattagattcaattcgatcgacaataacatctgcctagctgcgagttttaatccaacttaaagcctctttgattccaaagcacctcaacaatatatgggtcatgcttcccaatttggctaccacacttagcctccacaaccaaaccagttgagtccctagccacttagtcttaatctagtttagattttttttgtttttggaaaagaacgttcattttttgagaaaaagcgtttaatattatataatcaaactgagtttagacctcacggtcattacataaaagagcttccggtatagaagggaccgggatagacccataaaactgatgggagaaggctcatctagccacattatgagcggcaaagttgcaagatctactaacataagaaaaggaacaaacactaaataaaggagaagacttagtacaaaatgagatgcagttctctaacgcccaacgagatcccttcccattgatagcgttgatgaccactctcgaatcattctccacaataacatacttatagccgaaatctaaagcaactgacaccgccaagcagcaagccgcggcttcaccttagattctccttaattataagcgcctcaacaaaatgcgggtcatgcttctctatttgtcttatttttattggttggagatacagccgagattaaacaaataaattaaaatttgtcaaagaaaaaaaaaattaattaatgtccttccagaaattggacaaagtcaaaacaaaatgtttctaataaaatacataatatatatcatcatggatacgatcgaaaactacacaagtacatcttattaccgtgccaaacatattactatatatagtaagtttttattaagaattatcatgaacaagataagttaactaatatataataatatataatatttagggttaatacctttacactatgtattttacaaaagttaatatagattttatatgggaattttgattttatatgcttaaaaattaaaaaattttataattaaaccaaaaatttaaaccctaaaaaaactatacctttttttcaaaaccccaaaaatacccccctcacaattctctctctctgcatcatctc

SEQ ID NO: 299461 - DNA, 1820 bp, Cannabis indica
tttatgaattttaaatttaatttcattccatttatattcttatcgttcttatttctgcattttcattcctttcaatgttaaggcaacctaatatcctttcaatgtaaaattaagcaatcatcatatgcaaaatcctttggcattctcttttccacaaactcttcctcgtactaattaaacatgcacactccaataatataatgataaaagtcaaaaagcacaaacagtagtgtgaaaccaagtataaatatagtatagcaataagactagagttaattatgtcttattaatttctttcccttaattatctcaaggggttagagtcttttaattttatgagtagaaagatttctcagaacatcgtagggaatataagtcgtaaagaaagacataaggaataataaataaataaaattaagaaaagaagttaagagagtggagaagcagactttttgttttaggtgtacgtacatggcctaataatattatatagttaaagtccaaaacaaaacacagcaagattttgcaacaagatgcgcctgacaattaataattttggggccaaagaagagctcttattatttcttttgcctttttcctatggcttcatttgacccacacgttcttgtctccgcctcaactgcaacgtgctttgccatttcatctacccctttttcataatatatataaataacccaactaaacaaacaacaaagtatcctatgcttcattttcatatataccatttcatctactactagctaagttactatatacaaaaattattattagtaacaaatcttcttttgtttggacagtttttccttagttggcaaatgagtgaagggtttgtttatatatatgtatataattaatatatagtctaatgattgcattgtatctccaattaagggaaaactgtcccactaattgcaatgagaaaattgtttagtgggaagcacaataatatacggtagaagacttgggacagttgtttgatgcggtttggaccaattgattctttattctataattttttttattatttattttaaaaaaataaaatatatatttgttctttagaaaaaagagtcatgtatatgccaaaaaaagttggcattctcaaatgacactatctatatatggtataaaactcgaacctaataagatcactttcaattaataagacctcatcctcaagtggcttggattattacaagtcgtgttgactcttatttatttatttttggaacatattttgaaccaatgtaatattgtgagttttttttttttttaataaacttgtgatgaaaagaaatgggaaccaattagatgctatctccatcacaatattcatttttatttgaggctttggccatttggggaccgtttgaaagatagctttattttttgtctaggttcgatgggagtaatgcttcacgtgaaaaaatttgactaacataataaatatataaatatttatgtatatatgttatgtgggtagattttgtgtttgctgggttttatagtccaaatcttttcattcttgtaatgaggatatatataaaacaccgtacgtccccacagcatttaagggaatcaacaattcggttctgtttggctccgtttgatttcaattccattgctgccttgtctcccttcctacattaactattacttaccttattattaccaataaataattataataatgtatacatacaaaagattatataaagctttgctagttggatttttttggcatgttttggtgtatgtatgatatttttttttggtaaatagtggcataagtacttaaa

SEQ ID NO: 299462 - DNA, 1533 bp, Cannabis indica
acaaaagaacatattctcttttagttttagaaaatttggcagcataacaggtttaatttgaataaacccgaaaattataacctgcataaataattgtacaaaaatatatttgacactcagtgtcccagaacaatctagaaaaatatacagattaagtttttaatatttcaaacatttaaattataaaaattagaatgtgtctaatgttattcataacatataaaaacaagtccaataattaagttgagtctctacctccttaggaacattaaagtttctgcaaaagagacgctcctaagtccccgattcttaagttaaagagcttagtcactccataagtcactttgttctacattctcctatgaaataaaaaattattattattataatgtactcttcaaactgagtccaacaataccattcaaatatgatcaaagatctcaccttagccatgcaaaatgacagtatttggtagtcaaaatggtgtttcgggaatgataacgaatcttgacatagcatatatcaaaatgactctcttgatgagtagatcatcaccctcgcaaaaaaaatgcttataaaggggaggatatcccaaaatcttaccacatacaaataatgagttgacaaagcaaacttagtgggtgatgttcttctcgtgaagctgattccaacagtaccaaccatttgtcaaatggtttccgaagtcagtcgtaatgtcgacatgaatttttgatgttcttctcaacgttcgtctcagctccaattgtcactaaatttcgcaccccaaattttcttccatataatgtcctgagtctcccatctttgtttgattgatgaatagtaggcaattttgacaataatcacatgtgggtctttccaaatcaacttgtctgctttaccatcaggctagacaacatgctctagaccttcaaaaagagcaggagtaaaccagtaacttaagacctgagaatcaaggttacctgaattgtcaaaacagttgctaaggttgaacaactttaggttgcaacatcttggattgaaggtagccacgtagttttcccattccatccaaggtgtccatggggcagaccaaatgtcaatgaccattaccaattaactagcaactttcacatcaaatgaaatcatgggtagccaagatacctcatgcccattttgaagctaaaggagggagggataaattccaaaaatatttggtttgcaatattttacattgaaacctggcaccaaagactttgagaattactcgcaagcatccaacccaatttagagataaaggccatattcagatctcgattttttttttattctgagaccaccatctaattttggcttgcaaataaagtcccagttgatgagggccagatacaagtcttagcaactgaggtaagaagagtggacatctgtacacagggtgtatgttatgcatacaacttgggttggtttgttatttaatttgatagtgttgtgatttccttatattttgtgagcatcgttagcatgagaataatatta

SEQ ID NO: 299463 - DNA, 1085 bp, Cannabis indica
tttagtaaaaaaattctaacattggtaaatatcaaagtctgagaaacatggtttagtcactgaaacactaaaattaaatgaaattagacaaaagtctttaaatttaacaatctcaatagttcagggggaatttctaacaaccaaaaagttcaagaggtacaatttagaatatgtcaaagttccgagaaaaaaattactaattaattaattttttattttattttttattattattttttttttatctttggactccaaaaccgaccgtataaacctttcaattcgttttgtgaataagtaaaaattatattattattattattattattattattattagaaccagttgattttctaaaaaaaataaataataaccatataatgagtattatcatgaatacataagtcaaaatagcagctgaaaaatattccaaccagtaacctcaccttttttttttaataaaaaacctcacctttttatatgagcatcagataaaaataaacccaataaaactaaatatacacccaaaaaaaatataacaccaaactttttaataatttacttttaagaaatcttattccattccattaataaaattaatagtagattcaataacatttctcctaaattaaatatttgattgcattctttaatttgaattcctaaatatcgtaccaagttcatttgttaaaatgtattttcaatattcaataactaaaaattatctcatttaaccacaacaaataattataaatttaatttaaaagggagtatgatttataaatttcatatcttttttttagttataaaaaattgtaattaagatatttatatatatcatgcataattaatttagagaagtcgagaaaaattcttaaagaagaaattaactacgacaatggcgagtctatctaagaaactgcttatgaaaatactgtgcatgtttgacatcataactaaaaaactgttttttgtttttaaaaacagaaaattatttttaaaaacaatttggcttgtttggccttgttttttaaaaacagttttcagaaaacaaagttacaaaaaatgagaattttgaaaacaa

SEQ ID NO: 299464 - DNA, 1546 bp, Cannabis indica
ttaacatgtggcagggaaattgctgccagatgcttcttctgatccatccagtctggtggtggttgcgattgccaatgcctttggcttgggggctgctgtgttcatggccgccaatatatctggcggccatgtgaatccagcagtcacttttggaaaggcggttggaggtcacattagtgttccaaccgctcttttttattggatttctcaaatgttggcctctgtttttgcttgtgttgttttgaaagtcactattattggacaggtatatttttcttggtaatgtgactgttgttgaatttaagtatttaattgtcataagataaaatgttactggcttatgcagcatattccaacatactcaattgctgaagaaatgactgggtttggagcctcaattatggaaggtgtgggtacatttacactggtctacactatctatgctgcgggggatcctagacgaggcccattaggtgcagttgggcctatggtgattgggctatgtgcaggagccaatgtgttggcactaggcccattttcaggaggttcaatgaacccagcttctgcatttgggtcaagcgtggttgctgggactttcaagaaccaagcagcgtactggattgggcccatattgggagccacgattgctgggcttttgtacgacaatgttgtgaacgccaatcaacctacagcaacggcaggaggatcaattggagttgaggtctaaggcaagacttcaattaatgtaatagttatatgttgttatgataatcaattatttgtatggtagttaagatctatggggacattatctatggcagttattgtaattttatgtattaatatctgatgaaaaaaattaactcttactaattaatataatatgaaattattttacttttttaaattgtttatcatgctctcttatatttgacagttaactttaaagtcaatataatagtacaaaacagttacttatttgtatctcaaatgtataaccaacttgactaagcaaaaactgttcaaccaactttaacttgagtccgcaaaatatgaataaccaacttatagatgatatatacttaccaaaaatttgatattctatcttatgttgagcttgtaaattgtgttttcaaccttttttgagaaagatgtttgatgaataacataagatattctagtttcaaaataataataataattttttattttacaaaacatttatgattaaagttatagggcaaataaacaaagatccaccaaaaattcttgtagtgaaataaagtaaaaaatatgagaacgatgatatgttttttgcattatttttttcttgttgtgtgttactaaatacatgttcatgattgaagcaaaatgccaagcaatttaaactaaaaatataattttgtcaattattttaactcagtcacaacatgaaaacgaagaagaatgtgtgacattttatttgtatatagaaatatactttttttgtagagaaagaaactttaacttaaaagggaaatttcactttttgcccctaataaaaccc

SEQ ID NO: 299465 - DNA, 2641 bp, Cannabis indica
aaacctggtgatgcatcatggattgcttcagaatgagcatgtacagacctgctgatatcaacatcatttgtgggaactggaagtgtagaccaggaggagctatgaatgatgacaggtttggggttttggtagttgtttagaaagccatgtttaaatggaaattccatctcattgaatactacatttcgagatatgtagatacgacctgtgggagttaaacatttgtaccctttgtgtgaggtactgtaaccaaggttgacacatttcagagaatgatattggaacttgtgtgactggtatggacgaatacaaggaaaacaagcagttccaaaagtcttgaggaatgtataatctggtttttcattgaacaagacttcatatggtgatttatggtcaagtactggtgttggtaatctattaatgaggtacacagcagtgtgaaaggcatccacccaatattttagtggcatttgagcttgggcaagcaaagtgagacccatctcaacgatgtgtctatgtttgcgctcagctctaccattttgagtggacgtgtgagggcaagagtgttggaattctataccttgatcaatgactaaagaagtgaagggctgatattcaccaccccagtcggttctaagacatttaattttcctgtcaaacttattttccactaagtttttaaattgaatgaaagcacttaatgcctcggatttaaacttaagtggatatagccatgtgaatctgctatggtcgtctaggaaatgaatataatacctgtaattggcatttgaggcaatgggggcagccccccacaaatctgtgtgaatgagatctagaggaaatttggcacggtttgatgataattgatagggaagagcatgtgacttgccatattgacaggcatcacaaaacttttgcatttcattcttagacttccttacattagcagattctaaaacttgatttaaaattctaggtgatgggtggcctagacgcctatgccacacatcgattctagatacatgactctcatcagctcttggctggttaacattagactcaacagaaaaacaagtaaaggaattatcacggttgtactggtgtttatttgtagtgacagattgttgatgatcttcaagtctgtacaatccatccttaagcattccttggagcaccaccttccgagtttccttgtccttaatcaaacacatgtcagagtgaaattcaatcagtatgttgttatcttttgtgagtttggatacactaattagattcttagcaatatttggaacatgcagcatgtctttcaagagtaagaaattgccatcattagtatccaaaacaccactaccaacatgagagatatcaagtttagatccattaccaacaacaactttttccttaccaccatatggctgtttttgattcatggcagtagcatctgaagtaatgtgattgctggctccgctgtccgcaaaccatgcatcgctttcaaggacttcaggactggctatgaatgcattgtgattgttttgagcggttttgttgcctccattcgtgttatttgggtcagaacccatgtaactttcatcaaatctgttataacagattgcagccgagtgaccatacttgccacagacttggcaagttggtcttgaagtgttggtgcgccctcttcctcgaaaacgtccaggactccctcgatttccagagaaacgaccaccactgttggtataatgattggagttttgagagccacggccacgaccagtggagttgttcccaggattgtttttggctgccaaattagcttgaggtgtagatgatgttgctggtttgctgctgatactgagagtttgcagcctctcgattttactgtcaaagctcagtaaaatatcttggagttcttgccatgttgtggttggtcttgcttcaatctgaactactatcgacaaatactctgcatctagtccagaaagcacattagccaccaagtgtgcttctggatacgggtctcctgcaagcgccaaaatgtcggaccaatttttcttttgccgtaagtactctgtcatgggtgtagatccttttcggactgtctgaatgagagttcttgtttcatccatcttggatttggagtaagctccatatagactctccaatgaacgccagagaccagcagctgtggaggatcccattacttcagtggcgattccttctgtcatggaactatacaaccaccccataagtagctgatcgtttatgatccattgctcataatctgggtttgtttcaagttcaccttcatatttagcttctccagcaactggtatgaactccggtgggcacattctggtgccgagaagatagccgtgaagtctgtgtccacggactatagtggagaccatggttttccataaggtgaaattatttctgtcaagttttaacgagaagggctgattgagggtagtaggctgctgtgtgtatgtgtttgggagctggattggtgcagcactatctctgttggtgctagttacagaggcaccttcggtttgttcttgaggagcagccattgaggaacgagagagagaggctggctctgataccaagtaaagtttggtaaaataatgaagggataaatctc

SEQ ID NO: 299466 - DNA, 3203 bp, Cannabis indica
cgtatagaaacccctattgcaactagcgctgcaaccactttggaaacccaaactgtaaatttagaaaaaaaaaaaaagttaaaaaatagtatatgagtatgaggtaattcccctatattttaaaacataatagatcaaatatttattccattcttatttgtaaggaaaaaataatctaaaacaaaattaaaaatttctttatacacataatttttttttcttcttcttttgaatttgttattttttggtctatttattttaatttgtttttagagacaaaacaacaatattttattgttattatgcgatttttttaaggctaattaggatttttgccccctatactttgacatgtaccaaatcatatcttgggagtatggtttagtacataaacaatcactgaaatagtaaaattgaatgaaattagacaaaaattcttaaatctaacaatctcaatagttcaggtagcatttttaacgacattaaaagtttaggggaaatgatttgatatatgtcaaagtttagggggcaaaaattctaattagcattttttaataaatattaaataattcaatattaaaaagtacttttgcagattgaattagattgaagttaaattattatgtagattgaatttgatctaaaatatgaaattcacacttaatataaattacatacactttgactaaaatgtacagattagattggaaacaattaactgtaatagtctaatagatcttaatgagtgttagggtaactcacaaatttactctttgcactctcattcaatcatttaacgtgtatttttttattattttttaaatataaatatttgaataatctcatttgtcaattgtcattctattttgtagtttacaaaagcaaaattggaaaaagaaaaaataaatattggaaaaatgaaaatttttttgaaaaaataaatcataagtttgtaaactttgccttaaaaaccataaaatgaaaattctcttttaagtaggttgatcactcatttaccatactactactatttccacctactttttgcgtcaatgcgttagttaacagacacaatttaagacctattatttactagacaaaatgtattgatgactcggtctaaaatttgtttcggtagttaagagacacaaattaagctttaattgcatcatcaataacactggtatcgttgatattaaggatttgcatataagataaattttcataaaaaattatttgcatcagttgggcactaacgtatattttataaatcaggtcagatcaaaactatgtatatgtatatatattgatttgtaccataaaattaacttaactatcaaatccaagtctttagtactatatatttttatttttatcaaatttatttgcataacccttcaccaacagaaagcacattgtacctttcacttgtctaagtaaaacttagattcaaatggcaacaacaagaataatatgaccatcaaaactgtgttgtttaaacactttggctaaaagactttttcaaaaagagtctcgaagcactaaacaccaactcaacacacacacaaatcactttactctgttttccaaatcctagcagagcaaattctcgtgaagaacttgctcgatcctaaccagaaaccctaggatcctaagcacacacacagagatcaaaaatgagagaagtaggtaaagaaaagggagagaaaacagcagtaatatttcaaagttcactccaagaattaaggctacatctttgtcaagctcatctcagagatttggtttgagttccactatcaacaatagcaattacaacttttggagcttcctgtcacaagaatcgatcaggtaaggctcgatttctctatcttttacagatttctctctttatctactagatttaactctgtttttctttagcttgtgctctcccttccttcaatctcctcaccatgagagttatactctttacctgaactctttctctatggatcttggagttaaagcttcggcattggttttttctctttttgaattgattgtactgtaaatttcttctcttgaatcttatttatagagtagttgtatgaactgatcaagctggaagttagttacaattcaattataactaacttctggttctaattttgtagaggcaagtccacttagatttaattcttgttctattagtttatgttgtatgttgatgtggacacttacaaaagagttggttataagtggaatttacttaacaattcccacctaaattccttttataaatagctctaagctagtgtgttttaatttctgaaagtcttagcttgataagtcctactttagtctcctgagttaattcttaataagttcatacaatgtttgaacttattaagagtcacaatcttagtacccgcgtctgatgggttgtcttcagtatgcaccttttcaacctctatatctccatgagtcactttatcacgtataaagtgatatttaatttttatgtgttttgctctgtcatggaacttggggtttttacataaaaaaaggcagctctagcagtttgaatacattgtaagtactcttttaagtagttttagttccccaaaaattaaaatcatctttttccatattttttattttttcccacatttttttttgaaaaaataaatcatatgtttataaactttgccttaaaaaccataaaatgaaaattctcgtattaagtaagttgatcgcacgtttaccatactactactatttccacccatttttttgcatcagtgcgtccgttaacagacacaatttgggacctactatttactagataaagtgtattgatggctcggtctaaaatttattatggtagttaatagacgcaaattaagctttaattgcatcatcaataatattggtaacgttgatattaaggatttacatataagatagattctaatacaaacttgattatttgcgtcagttgggtactgacatgagtcttataaattgcatcagatcagatcaaaactatgtataatgtatatatattgtagtgatttgtaccataaaatttacttatcaacttaaaaaccacttgaggctagcttaagtggccataggtgggtgtgtgtgtcttggaggtcctaggttcgagtctcaggtaaaacatggttgtaatatataaacgcttaaaattaaaaaaaaaa

SEQ ID NO: 299467 - DNA, 2083 bp, Cannabis indica
acctatggtagatacttacggttggtactggatatcaagcaagctaagttccatggcccactttagaacactaccagaggactaaaaaattttgaagcacctatcggaggggatgattcgttagtacttttatggcataggcttggaagtatggtcttaccttttgagacacggttagtgagcaaaatgtcaatttgtcgatcatagggtatttggattctacacctaacaatctttttcttatgtagtaaaccaggaactaaaccttttcttcctctcacagaagtttggcactaagctcgtgattagacactgccaaataaaaatataaagattctccttcaacgggcttgaataaaataagagcttgagtcatatgctcctttaatttcatgaaagcaacttcatgttgttcagtccatcaaactttttgttgcttcacaacacgttgaagagcgctatacacttatctatagactttgaaataaaccttctatgtgtggtaatttgacctgtatcactttgaacatccttatgcttcttgggagaaggcatgttgattaaggctttgatctttttttgggtttgactcaattctgcaagagctgacagtgaaccctaggaacttcccagaggaaactttgaaggtgcagttcttggaattcagcttcatcacgtacttccttattactgtgaaggcttcctcaagatctcgcccatgtccttgagaggtcttggattttaccaacatgtcgtctacgtacacctccatgtttctccctagctggtatttgaacgttcaattaaccatcagttgatatgtagctccagtattcttaagccgaaatggcatcaccttgtagcattatacacctttgtcgatttggaagctagtgtgttcctcatccgtgacatgcattttaatctgattatactcgaagtaggcatccatgaagctgagaaacttgtacttggacatggcatctaccatctgatctattcgtaggagagaaaagcaatctttggggtaggccttgttcacatcgttaaagttaatccacattctccatgaaccattggctttcgaaaaaaataggttttgcgagccatatcgaatataacgcttcttggagttaatcgttggcagtcaacttttccacctccgtcttcaaagcttctgcccttactggatctaaaggccttcacttctggtagactggtgttgcatcttctcaaatgttgaaagtgtggtagatggtgttacagtcaatccttgccatattagaatggctccatgctaccacatcatggttccttttgattgtgtttatgatattcgctcttatagatgggggtagattccttccctctctaatagtccttgtggggttttcatcacttatgcttacctcgtctacctcctccattggttctaagttttggtcccaagcttgggatctaactcatctttaaaatcttcccaaatagcttcaatatctatctaatcttctattcaaagagccatgagcgtctctccccgaaccatgaacatggtccgcattgagacattgtagcaatttctcgcactcttctgatcacctttaattgtgccaataaatccgttgtcacatgggaatttcatgcataaattcttgatggaagttactaccccaaagtctactagggttgtctgccttagtactgcattatacgtggtagggaaatcaaccaccaaaaaggttgagtgcttaaaagcataaaaacacttgcattgttctcccgtttgagggtgataggcaactgaattttacccatcagcattacaacatctctgttgaagccttccaatttgataggacatatagttaggtccgctttagtaagccatatgacctggaatgtaaatttgaatccgatgctaactgagcttccattgtccaccaggaccctaaaaactcatttgttgggaatctatgcgtcaatcactagaggatcattatgggggaaaggcacatttttggcatcatccctaatttcatgacataggttaatttataatttgtcatcacataggaggaagaag

SEQ ID NO: 299468 - DNA, 3479 bp, Cannabis indica
acgtacgagagagagagagagagagagagagagagagagtaatcaccaatagaattcgtgcttcatccatggatggctggtcaacgcctttctcaaaaatcggctccacctatattccacaagaagcactaaataatataaaccacaatcatgcaacaaatatcaatataatgaattatattagtcaaatctagaaaattatataagtaaaattaaaaaacgattggtacatcttaaccattactgaagaggccaactgcaactcactaatgacggagggaaacgcataaattgtgttggatgctagtcttactattctccatattgaaaatggccaaaactcttcttagcaataaaaataagaaacaagatcccataaaaattctgttataaaagggattagcatattcaccaaattcaacatcaaccgtgcacaagtagtatgaatgctgagagacaatgaagcgtcatgcatgttacttgaaaacaagtatataatccgcgacaactgcaataaaattcacaaatttgtcagtagacagaacataaattgcaatgtcatgtaatgcaaatgcaactagagaatgtatggaagaacacaacaaaccaatacagcatttaaattttttgaaaaaaaaaatatcaatttataaaagcagcattacccaagaataaaaaactgttaacaaaatcaaaatggctaaaaggctgagaatatcaaaaacacacatagcacagatgcaatagtgctcactttaagcatctaaaaactagctaaaagcatcttagcataagtatcacacacttcacaccatgtagagtacctgtgacagggaaagatccccacgaacgtgatgaacaatttctgctagtaaactataagccagaggccgcaatgtctcaaagcaggctctcccagttccaactagaactctgaagaaattaaaagcataaacattaaataactgaccactcgtgcaggaggtatccaaaatcactgacaaacttgaaatttatttataagacagaaaaaggaacactgcaaaacagaaagtacaaggtttgtgattcaatatcaaaataactctagacatttagcaattatcaaagacataaaagataatggcgtgctgtcaaacaatcaacacagataacagggaaagattgtattgcaggagcaaaagaactatatttaaactatttttatgagtgttttgttcaagagtgtatgcagttgcagtcactactataaacttgttaagattcagaagagtttgatttattcaacaaatccaacaaatgccaactaattgaatagcaatatagagcgaaatgcaaggatgatagaatagaaaagtgaacaataaactgtcaaactccattttattttattttcctttcctttactctttgataagcaccaacaaacaagtgccgcagatctttccaaaaaaaaaacacttatataattggcattcttcataatttagctaactactaactaatacatccactcttgcacaacacttaacacaccaggggtaaaaaaatcaagaagttattttcctcttcataatttcaaaagcatcatatatgattattaaaagtagaaaaacctacacctggcattgattagtattccttctactgcagatgcattaacatctagtagaaagtgaggactgggtgaaggcttccttaagttcaaaaaacagctcaatgcacgttgaataactctttttaaaaaaaattctcttgtgcctataagccacataaactacactgcatgcttccaacatgagaagacagcgttctcaatgcattatagaccaatcaacttgtaattataaataaaaatataagataaaacttccgaacacttttttgacatttgtggggacctattgtacagtctgcaatttacctctcttccaaaagtgtgtctatcaaaggaaataaacccctcttgcaatcagttccaagaacatgttttaatgctactaacagttcctgcatggaacaaattaaattgtttatttatttattcaacatacagcagaaaagatgtcaagtaatttttacaaggtaatctcgagcgcagtctcattgagacatagagcactaattgaaatatatttgcattaaagccaaagcttgaggattaatgtggaagaaagttggattactgctttaggtagttccattagttgtgaagtagaagcttggcctcttaattatttcgggaaccacttatcatgaaagtaacacgaaaaatggatggatagatggaagtaatggccatttgcaggcctatttggttagagagcaatggaagatttttttgataatattgaggaccaactagataacttctagtggaagggaattagcctttgcgtagctttggctatgtgacgtgaaagagttcaaaaatcttttgctaaatgagttaataagggactggaattttctgatgtaatttccataaatctgattttattctcaaagttgtggaattattccatcgataatcaagtgtttatttctccttaaaagaaaggtcaagtacaataaataaatcaagacagaattttacctttctaattgagacagagtctgagcatgtaactagaagattcacaatgctcttacaaatgctttcttcatgaggccttatataatcagcaaatccctttaacagatacgtcaaaaaagaaactgtctggagcaagaaacagaaaaataaactattaaacttgaaggcaggtacatcaatgaactaaaaaaacacgtcgaaacttcagtatcttccaatatcttaattgaaggtcgattcaacgctatagacgaaaggaaaggaaagatggccttaatttcactattatgagactattgacattgggtattacatttgcaagagagacattaaagtttaatttccttatcatagaagacatttgtaacacaacctccttgcccatcattggtggaaaaagggcaatactgtttttaaggtacattaacattaagcatgagaagctatttctttgaggataattctagtagttttgatgcttacaactaaaatttaaacctctcctccagctaaatttgagttctccaaaacaaatatacctaaaaacaagggagatgtggctcacccacagagcactaaatataaattaaacattcacagttgtgtggccattcagactggtattacacttgcatgaaaaactaacaggaattatttgcttacaatagaagcccagtttaatacagcatctatatacccgtaatttatcggaatagggtcgcaactttttaaacacaggcttcattggtaggatgtggggcattaagcatgagaatattcccagctttaatttttattttgataagaatagaaactacatattactaataaacataggtggcgtttggtaacacttttttaatcagtttttgtttttaaaagt

SEQ ID NO: 299469 - DNA, 3513 bp, Cannabis indica
ataattaaatactaactaaagtataaagtaaggacaataaaaatgactctattttaagtttttagctattttagctcaattttagctaaaaaaaaatataaaaactacccttagagatgttctatcacactacgtaccttaatattacatgtataaattaagtatcaagtcccatataatttaatgtaacaacttttatatagatacgttaaccaattgtaaagtgtaaattttaagtgttgctagacactactcatataaaagtaatactctaaaataatattaaattagtagtgtctaacaataatgatctacatttaaaaaattgttaaaagacactaataatttttaatactatttaaaatgtaatattattatttatataattaaatattatattttatattttatgaaatattagttacacgaaactgaatagatatttatatatgtataaatgaatgattcaatgaaatctatgcatgattgatgggttcttcatagtggtgcatgcatgccaactgtaaaataacacgtaactaaactatatcttattttattttattctttagtttttcttcatattattattattattattattaatactaagtttaaaaaaaataaacacttaataataagtaactatatccatatgatatctagacgaaaggcaagtttataacccatcctctatatatataaatatatatatttatatatatatattgaggctgaggaccacttttagcaacgctccacagcctagctatggaacaccgcaagaggaccaccaattcaaatccccaagctaccccagcttttccttttctttagtcaaatactaatggacttgacaaatctatatctttataaattcatatatgcatgcagatacctaagctttcatcatagaaaatccaaatagtaccactgtaattggtaagtgaccgaacatgctggtcaatatagtcaaaattatgtatatgacataacaattaattaacatacgtgaaaatgaaactactttataatataataggaatattatggaggagaattaaacctgtaagtggttgtgatatgatggaggaggatgagaatctcaagcttcgccaactcactgcctggacaagaatgcacgccgttaccaaacggcatgtacgtgtttggctttggtggaacctgaaaattattattaataacaaaattccaaaaaaataaacaaattaataagagtccatataaacaaaaattattacaatttaattaaatcactactggccaagcaaacgtatatagttggttacactatcaagcacctttctttttactaatgatagtaattctttgattaacctatataactaagctgttacacattattaatatttaattaaagatgacatgcaaataataactattgacattaattattattataataatgataatttgttttcaaacttttttacttcgttctgttctactaccctacaaaaccagctcacgtgatcctgacactcgaaagatttccatgatcaggctcatttctattgaggaagattcacacaagggctttgaaaatgacaccaccaaaatgatataaatagaaaaatggtaaaaggcagtctaatatttcgttaatattaggcaattaattaaatatccaatttcatattttaatgtttttttttgaaatattgctaatcaattaaatgtataatctctaaatgatgttagacataatgatgtctaataacaattaaatatactttgttagtttttaacaatttattcaattaacttattaatttaatttattattataattaaattaatacctcaaatcttgaagggtcgaacttgtcaggttgagggaagatatcagaagagtgatgaatggttctaaagagtggaagaactttccagcctttagggattaagtagccctcaaattccacgtcctccactgcttctctgaatgtaaaagatagaatacttgctcttcttagagtctcttgaatcacctgatcaacaatatttatctttatctatttctttttttattatttaaaaataaataattaataataattattttttaaaattgatccttataatacccgactagtcaacgacatgcgcctagtatcctcccacgtaagccctcgattgccctccagcaacatgcctcgaatctcttcttgttccctctgaaacggaaaagataccccaactttcatttttttatttattttgtatatatataattactctttgaattatataattgcaactaatgattgggaaaattcaatttttaattgttaaaaaaaaatccaaaaatattttatgtaccgtgacagcttctaagagttctgcattatcgtgcaagtacttgaggatccaagtgaggacactagctgtggtatcatgagccgcaaagataactccaattatattatccacaatttgtttatcactaattataacctcttgcttaagcttaatattattctcatttgcacctaacaaaactcccaacaacccaccactttgttctccactttctcttctcttctctatcaatttcataagtgtctcgtttagtatcttccttgcctatttaatttcacatcatcgaatagtatttagtcttttatttattgagaaaggaagcactataattgtatatatataaataaaaatataccttgatggctttgtggaagagagttccgggtagatctagaggcatggaattataacccttctcaaggcaatgataaagatgtttaataccttccaattccaattctaggtcctctttactattgtcgccaaacacagaaatgagtgccacatcaaaagcgtactgccacaaattatttaattaataattttaacttatagaatcctaattcgattccaataacttattgtacagtcatcatgcattaattccaaaaaagggtaaaggaaatacaaaaatatatgacaaagtgatatattctttaaagtgacacatatattattaatatacacacgtatatgataagggaatgaatatacaccttcttcatttcttgcaaggtgttgagagaggtatccttccatgtggcaagaagtttcagagcaatattttcaatttctgagactgaccgttttatggcagagggcaaaagggaagcttgaaccagtttctttaccctggaatggtaggcccctgtgtggaaaaacacggccgctggccctataattttcattttactcgtcggataagttggcctaaacagatgtgcacggctcaccagaatagttctcgctgcttcgggcctagatatcatcacacatgggcatcccaatatgtgtgtcttaaatatatctccatatctacatatgatataaacaaaaataataaacattaacaacaacatatactcctacgacagattaacccatgggaaaacgactagcttttttttttcttttaccgtttttggtcgtggg

SEQ ID NO: 299470 - DNA, 4905 bp, Cannabis indica
cctccatgctttttcttcattttataatttttttttccggctttcagatttcacagcgtttccattctaacaaccatacaccacagctccaaccctatcgtggtgcctatggccatgggggtctcctacatactcctctatcgctccggagaagaggaagagccttgaggttttcacgtttagcggtgagagttactgcttcttctagggctgaaggaggctcgaggaggcccgcttctggtcggagagtctatcggcagtctcaaacccagagctcgtcgctatctgctcatccgctgaaacaagttgcttcctttgtggtcccagctggcttgtttttggccgtcacgtttggtaatttgtttcgggcaaaattccttcagctgaatttgaggggaaaaaaatgttttatttttagatttattgaggtttctactatgtagtgtgatagaaattttgaacttttgcatatgattattgtgtttatggtctttggcattgatttcatttttcaagggaagagaataatgttgtaacttgttatattatctcatctttgatgcttaaccctaatgaggtatatcaaacgagtttgtttggttgtaaagcttgatgctgggaacacaagaaattttacttgttgggtttctcagtggccgtactaatttatatcttcagctgacagttttgtggaaggtggtggagaaacttcttgttccgaaatctaagaagccttctaatgtcgaagaaaaaacggctaaacaaggcttggagtggtcttttgctgctggtacaaatctgttatcaggtcttggagcaaagattgaccgagagtccaagcaaaagctcaatgaatttgccaaagaactcagggcatttagtgttgtcgatatgtcaggtataacaaatgggcgaacatagacattgttagtttttgaagaagttatacttgtttatggacactaaagtattaatttacggtcattatactttcatcttctttataactgcccctattggttagatttttcaacagtcttgttgaattaaaaataactgttataatttgaagtcgtgaaatagattttatttggcagggaaacgtccttttgtattttgctaacaagctaagttgtagttaaggctgctgccctctctcttaactatatcgaaagaaaataaaattctgtttattaaacttttttgcaggatgtaattttggtgatgaaggtttagttttcttgctgaaaggtttgcttacaatcaggttagagccgttgtctatcaatttgactcataatattttgtttattatgctggtgatcttaatatttaccaatctactttttggtatcattgaactaggaccaaatgttgtagaatccaattttttgattctaaacatatattccataattgacattggactgttggtactgtttcttcaaaaagttgtataataaaatggtttattaaactataaacaacttattaaacaatttagctaaacatggatcattatttaaaataaaaatatataattataaaccataaataaatatattaataaaaaaactacaaattattaaattatataatatgtaattgctctaaaaatatatacaaatttatattcattaaatggcttatattgttgttttttagtaattttttaatgggaatatactcatttagtaccttgtgttttctcgaaaaacataattggtaccctacgttttcaataatactttttggtatcttgtattttaaagttgtacgtatttagtaccctaaagtaaaatttcatcaatataattttattaattcgaccaaacggttctttgttatatgtaatcaaataattaaatttaaattcagaattcataaaattgaagatagtttgattgcattgatagaattttattaaataaatttgagtttagggtatcaaatatgtatgattataaaatatagggtaccaaacctatatttagataaaacacagattaccaaatgtgtagacacttttttaatcaaaaaatcactgtaatattataggtttgataaaacattataatattattgtttacccgaaatcttatcctggtgacgtggactgatatcaatgtttgacatgtgacaagaaagaaaactctcggagttgagtagtctcaagtcatatcagtcgacttgggacgggtccttagtcctgctctgctcccaagttgactttgagaactccggaatgagtgtttggttctcgccaagttgtttccaactcactatctttcagcaaagagtcacgagacactataaatccaaggttaaaaactggtaatttaagcttgaagacatggtattacgataggtatttttgaacacaaaagacgccagcaggagtactcggacattcttggaagggtcatacgtcgtcactgaagcactagaactcgaaatatacaagttagcacgctatgacgataacttgaattcaatgcttgtaccaaggtacgggaatggggtgcatctaaggtgatactaccattaaagcagatgttttcaatacagctcgcttcacaatgagattcactttacgacgtgcaagtgaatcaaccgcctctcgaactgacaagatgcaacaaagttatttttaggtcgagaggtccatcgccaagttatgacccctacactactagtcaaacaaggcgttagtgtagtgaaaatcaacttagctagttcttcatgaaaatataaatttgcaattgtatttaattttagctaattttgttttttcaacttagctacgataacgtaattgtatttaattttaagaatgttaaacaaagtttttttggtacttcattaatattatgaaattacagctcatagacctaacgacgctctcaagcgttgagtaaagctcatagagttggtcttgggataacttcggttatttctttagtgagttcaacttgccaacctacgaatttccaaataaatggacgagtgctcacatatgtaacagcctaagacccatgatcaaaaaagtccaacgagatttggtatgacaagtgaccaataaaggcacttctttgatcacttggggcacataggttatggtacacgagagctatatgttacatggtgttaacccatatttcgagcacccatatggtcacgacacatgtaaggaagctggaatatgaaccaactcagattgtgtagagataaatacgttcaataacttgcctctaagaatacaaatggtggagatattttagttgctccttaggcatttaagggtgagtcatgaatgacaactgccattcggtagactagtgagatgaacatctaaagaaaaagtccatcttaggatacacagggtaaactataaagcaacagttagctcgaaagagtagataataaattctttaaaagcttacaacttattgacccccatcctcgtgaatatgttaaaagactaagggatattcacatagagtaattcacctcggaatgttcacgaacgacacaagtggatagcgtcttgcgtaagtgtatttaatcagttctaacaatacagaagaatgcgaggagcatcttggatataatacctctgcatagaatctgtcttcaagttaacatgagaaagtggtttccaatacatgctgcgacgcatagaaaacttaatcagcataactgattttagataaagacagaggcaactatagcatttatttatttatttcatgtgttgtaaatatgaaatgtggggattgtccacatttcatgagcaattacgaggataagatcacaagagaataactgtctatcccagaaacacctataaataggggaagaattcccagaatcagggacgaccaaatcgaatatcagagagaagataccattgttgtattattgttactctctaaattcaccaaattctgataataagatggactcgtggactatgaagaattaacttcaaaaccacgtaaaaaccttcctgtatattattattgttatttaatattctaaagtttatttataaaattagggcttatatattagttaatgaaaatcggggttaacacatgggcattcaaaaaatttttgcacacctgagtagtactttcatggtaaagaaactttaagaaacattgatgttactcccaatgactgagtttcttaagacatggaatacctgtgcaagtgttaagaggtcaaacggtaatgaattaagtaaaaaacataaacattagaataatttttttattgaattggattaatttctaatttaattaaaaaaatctgataaatttttagtgagacttatccacattaacaggctgcccgggacaaccaactaatacactaaagctaaaagctaaaaaagaaaataaaagaaggattaagacagtgccctacgaagccatgaagctatctaagtcaacaatgactattatttgttcctcattctctgtttgtggcgcattagcagggggaggaaagtcgggatgttcaaggttgtagccttcgattctcgtagcttcttcgaccactggttcatcgccattcaagttgaagtcgatcctttgaagagctttagctttgagacgttgctcacaacgcttcacaaaaaatggaacttagttctcagggaagtctgaccaattaaatgactatgctcctccattggcctaccaatcacagtagatggcatcaaaatatgccatcatagtaggcaacatcttcagcctctttccgctctgtctgtcacttggctcataagacgttgaatttgatcctctagctcagcaactttaaggaggcgtttggttgggaggaatgaaaatataggaataggaatgagaatgtagataggaataggaatggaatgga

SEQ ID NO: 299471 - DNA, 3450 bp, Cannabis indica
tgcaatgtttcttgtaataaaaaccaatgacactctcaccttggacacccatctatattgatcactaataaacttaataaaatattcaatttgtgtattgatcatacttcaaactttcactatcaaacatgtcattatgctaaacaaaaaaaaaaagcttctatttatttcacataataacatggctgctaacacatttgatctcattcacatggacatttagggtctattccccattaaatctattgaaggatatagatatttttttttatcattttttataacaattcaaggtacacttggacttatatgcccaaagccaattagatgcaccttcactcattcaataattttttttctctcatcaatacacaatacaacaccagcattaaagttgttagatttgacaatgcaaaacaactaacactaaccaatttttttttttccacaaaaggtcttgttcattatcattcatgtgttagtctcccccaacaaaattcaattgttgagcgcaaacaccaacacatcctctacattgctcgagctttagtattctagtctaatattcctcttgtctactagagctatatggtatgtactgcaacctatctcatcgatagaataccttccatactccttaaagacatgacatcatatgaattgttacataaaaaacctcccatgtatgatcatcttcaaaattttggttgcctaacatatgcatccaacataactcatgaacataagttctcacgaaagcatgcatcttcattggctatcctaataatatgaaggcttatactctggcatcctcgttgatgtcgggaagggttcttgaacttcagagggattggtcgagctttgattcgattaaagtgtggggagcattgttctctattgagttcgaactctaacaactttggggccatgatttccttcactagggttgctaggtttttaaactctgccctgttgacaccatggatggtggtttgcgtcccagttggaacttctattaccagatcagggtctcctctagaagcacctacatctatcaactgttttttggttaaagtgtcacacatgtcttttgtttatcgaatctaatcatgaactcgagtcgacttgggtcttattgttgtattctaaccacgggtttcgtgaaggcaacactagtgatgtttctagaatgaattccaaatcgtcttatgatgatgcactgcgagaatggtcatctggagcattgcagtggctactcccttaaagtattcttcaactggatgacaagtgtggagagaattgaactggttactcaagctcaactcttcaccatgtacctggcggaagtaattatactactagccatcgaggccacgcgtaaaataacaacacaactcactgctttcatctctgaaatattttttagtataaagcggcttgttggtccttactcgtcagatctcatagccttctatttcaaagtaacaccattgatttcctccattgtcttgagtagtaggtccattttccctttgtagggtctcgcggcctgatgtcatgacagcgttgagaaggagttggtggaggagtcctgctggctctcactatatttcagggttgctcaacatcaggtggagggctcattggttggcacccattagtttgagtcctttcgaactctagctcgaagtttgcttccctccaaggagccttaacacctagtgtttgcttagtgcttgcacggttactaggcatggtagttgtgttcagtgcattaagggtttccccttgagcactagttcacacgtggctagttggccgaaagagaatctctcttaccgactcgaaaagacccctacagggggtagtttcatgactacagtgatagacttctctgattcattgagagatgttagctttccgttgttcaggctcaactcgttggctcttgatgttctcccacttctccacgaacaagtgttgaaattactcatgttgcttgttgatatagtctcacaactattgttatcgatcaaccacagtttggctaagttgttcaacccgaggatcagcctcctgagggacttctaactccacgtgtgactttttgagtggaatctgcttgtcagttctagtaccaagagcattttgtggccttggaacacgagctattgagcttgttaggaggcctccacctggcacctaaaggagtagtcccagttccagctttagtaactatcatgcccccaatttgctggccagttgttccggctcctctttcagcacttgaggagcgtgttgcaaccattttgtaagtgactttcttgagctttctactctcaaggaaagcaccaaaatgttgactcaaaaatctggacatggacttccaagccacacctgctcgctagattggtgacaatgaaatatatgttaagtataaatagagagacacaataatttataatagttcactccctatgtcccgatagtaatggaactacgtctacttcgattttttattctcaagagatggattatagaaaaatggctaagtttggatgctataatttcaagagagatgaaactagagagagaggcttcgaccttatggatacttttctgaacttaaaaactgagctagttaagctctccttttataggtgaaggaggtcgtattaaatggaaataatataatccaaacaatatagaaaattacatttaggctagtcttgatcatagatgatgatctaatggtaaaaattaacttttgaggatgatcgacaaatttcagagttcgagtcgcgacgacgggacccgctcttaggaagttgcagcttaaatttgtaactcccttaggggagaaatttggtgtcgatagcttctaaattgcaattgatttgtaagacatgacttgataaaccattcaaataactttaaaattcaagttgaagcgtcaataggatctatattgagtgagttatggccattttaataaaagttgttctgggcctagtgctaagtttacatcctagcaaccaggctgacatccaacacccacgttgatatgtgatatcaatctggacacttggtaagtgggaaaaagtgctagggatatattttttgatgcctaagtgatattttgacatcacttagtctatttgtgtgttctaacaaagctgatcaacaatcctcagagatgttgttattctacggaaatgagagacttaaaactacctagtttccaagtaaattaccttgttagaaaagtgaaaatatgaagtcgtgaatttgactcttttgacttcatggctcttagttattgtgaaaaattagataaaaggttgagacggaatcaaaattggataagcagaacttagtgattaaggctcaaatttgtacattttaagtctttaattataggcataaaattaatttaattaattatttcat

SEQ ID NO: 299472 - DNA, 2452 bp, Cannabis indica
gaaagctatcaaaaaactagaagttgggataagtggaacaaatctatgaaagaagaaatgaaatcgttgatagataacatgactttgatacttgttaaaagacccaagaacaagagaatcataggctccaaatgggtgtgtaaatggaaacttggtattgaaggtgttgagaagtctagatttaaagcaagactagtagccaaaggtttttcacaagtagagggtatcgactacaatgaagtgttttcacctactgtcaatcacacttctataagagtcacacttgcaaacactacaatatgtgatatggaattggactaattagatgttaaaactgcatttttacatggatgaagagataccgatgcatcaaccagaaggttttgtacataaaggagaagaagataaagtctatttactaaagaattctctctatggcttgaagcactctcccaactagtggtatttcagatttaatgagttcatgttgaaatatgatagtttcctgcaagcacaaggttcaaaccatggccttgttagaagataataatttcatctacttgctaatttatgtagatgatatgttaattgcctgtaaacacaagcacgagatagaaaacttaagagaaatgttgagtactgaatttgacaagaagtatcttggggaagcatcaaagatacttggaatggaaatcaaaagagatagaaatattttcactctataattgacacaagcttcctatgtcagaaaggtggtgaagttgtttgagaagaaataagccaaagctgtaaatactctcattggtgcacttcaaactaagatccttgagtgaagaagaagttgtagtggaagagaagaaaatggttggcattccttactctaatgttgtaggaagcatcatgtatgctatggtttgaacaaggctagatttggcctatggtattggtttggttagtaaattcatgagtaggctgggacttgagcattggaaagttgtcaagtggctgttgaggtacatgacgagatctataaacctatttattagctacaaaagacatgagcatggaaactgtgattgggtactgtggatcatattttgctagagatcttgataagagaagatctctaactggttatttttttacagttcgaggaaatgtggttagttggaaatcaaacttgcaatatgttgttgtactttaaaatactgaagctaaatacatttctcttagtgaggttgctaaagaggctttatggctaaaggaatcatgacagagctaagatttgaacagaaagaagtgaatgtgcgttatgactctcaaagtgcaattcatttatccaagaatactatgtttcatgaaaggacaaagcccatcgacatcaagcttcttttcctaagggacattgtcaataaaggagactgatcaaggtggtgaaaatccacactgatgtaaaacatatttatcccattgactaaggtgatacctgttagtaagttcaatgatgtattggacttacttggtatcaagacatgattcctagcaccctaaggcaagtgcctaaatcctctaagtgctacaattgaagaaatcaaaaaccaatgtggagaaatgtgaagtctggtccctatttctcaacttatcaatctcattccctcagattgctgacatggcatcaagaagttaaaacagttaggccaactattttaactgtgtccaagactctaaatacagaattggttaattctattgctcattccttctctctcccatgctcccaacttaaaagcctatataaactcacctagaccaatcaactagagagttagccaaattgatgtacaaagctgttatgaaactatgctgagagtcgatgagttgagagaattgtagatttgttgcttaagtgagggaaaaccaaattgtctcatctatgttggagcatgtaaccttgttcaaaacttattagattgattctcaggcattactgacccttggagtaagactatcccacattgagatcagaacttaaccgagtaattttagtgttcattatttttacttttttgctttttgttttgatcattaattgttcatgtttttgtttatctttaaatctttgttttcacattgcttgatctttgttaaaatttaaatttgtgtagtttagattctaacattatttttttgttattttgtaggatactgtacagaaattgactttataaagttaatttggatgtaaattctttgacaattctataatttcattttaaataataaatttttgagtaattcttatcttgcattatagaataaaaattgttcaaatttgtagttgaaattaatgaatagtaatctaatttgcttctttctaatttcaataaacttcaaatctagatcttatttatttttttttccttctttctaatttgcttcatgaacaagatca

SEQ ID NO: 299473 - DNA, 1469 bp, Cannabis indica
aaaaaaaataaaaaaaaattaggtatgaaaaatataaaggtaaaaatttcatttttaaagtataaatataaagtttggataaaaactaatattgggtgtaaatgtttttagacattaaattgaacataacagctgatattgccaaaaatttgtctcttaaaatcatataatttatttatttaattatatgtgatataataggaaaataattagatataggtgatttgaattaggttttcagtgagattcaatctcaactactcaaaatattttatcctgttactttaataaataaacattttggttgttgcgatttccagtgaggcaagagggacccgaagtaagcttcatcttggttcttaggagcaagtttgtcttccaaagaattatggagggataggatttcgagaaggaagaaagtggaacattgcattaatggctaagtttttatgggccatactagaaagaaagataatctttgggtaaaatagattaacaccatttacttaaagggtcaaaatatctggaatgtcactatcaagcacgatatgaactaatatttttgaaaactccttaagctctgtaatataatagaagactttaatctgattcaggctgaaaagggagggagattcaaagtgaaatatttttacaactccttatttactgggaacaagattgagtatgacacgaatgtctagaataagctaatcatgtcgaaatacaggtatacttattggaaagtaatcaataacctgttattaactagaaaccacttgagcagaattatgaacatctcctcatctctttgcccggtttgcaatttagagaatgaatcccatgatcatttgtttagggagtgcatctttactaagaaagcagtggatgaaattggtacttggctgggtatttttcattgggcgagaaataggttggagcttattatttggtgttcgaagtctcaaattggcttgaaaaacaaatttatcaatgcaataatcgttacaacgatatacatgatatggaaaaatagaaatacatgtgttatttattgtgtttgtagctcaattaaggcaggttgtaaagagataaaatatctagtgaaatgacgtattttgggtgtaatcaattccaatgtcaaaaagggtgataagtatattttaaatgtaattgagggatggtagtgtgttgagtgttttgttgtgggttgtttcctttcctgtaagtttgcattgtttagttttgaataaaatttatcctttgttcaaaaaaaaaaaacattttaacctaaacctagtgtgtgcctatacaaaggaagagctgtaaatagaataccaacatgtaacgtccccgcttcaagcctccattgggcccttacacccacagaataatgacttttacacacgagtacgtcactctggctacttcatggactgatgactgaccctataagccaacacgagtatttc

SEQ ID NO: 299474 - DNA, 1261 bp, Cannabis indica
aaatgtcaatagtgattctacatagcaaagtaatgatttgtatagactaatatcctttgcgttaagttcattgacaaaaataaaatccatgttatttgatcagttaatgtatccttataattaataataaaacatgtcacttactgcctctaatttgtacaaccacatcctactgcccttttccctcagtaataacacttcaaatgtgttacttattttatttttcttcgtattttgaatatctattcgttgattttctgacacattttattttcatagatatgaaggtgaatggcttcaaaataacatggagggtcatggcgttgtggaagttgatatccctgacatagaacctatgccaggttccaagtatgtatttagttccaaataacctatatgtgcactggaaaggtgacactatatctcagtagttatattttgggcaatctttgttagaaatattaatttattgagattttggtacacccttatcaggcttgaagcacaaatgcgtgctgaagggaaaataatagcaagagattatatgtcccaagaagatagagaatggttggagatggatatagaagacagtgttgctttggcgggagatagctacgagatacctttctatgagagggacgagtggatcaatgtatttgggcagaagccgtaagttatatatttttgctgatgttattcttgctatagttattgttcaattcagttgaaaacagactgaatgctggcatagtaagtttgtttgtaatttattatgtctattgatgtgatttgattaaattgaagtgtttgtttataagctgatgtaatcatcgttagtaactgctttatatttttctcagggagaaaggtaggtatcgatatgctggtcagtggaaacacagcagaatgcatggatgtggtgtatatgaaatcaatgagcgcactgtctttgtatgtgcatgtacttcagaagcttattttacatttattttgtgtaattagttgttatgccttctgtgttgtatgctcgagtacaaggaagaggcccaaaagaaaactattcaaaaatggagtcccctttttcctgtctttctctcctttgtttattattttagtacttatgtactccatacacatgcagggtaggttctactttgggcaactactggaggatgattatggctgtgatgcagatatatcagcggtatatattttgacttatttccataatgtatttattggagaagaagacagctatgat

SEQ ID NO: 299475 - DNA, 4621 bp, Cannabis indica
aaaaacaaactactcctttgatgtttaaatgttaaatagtttcaaaatgaaagaatgacaccttgtatagtctctctagagcctcaatggtgtattttcatttggtttagatgttaaagatgtgataaatttataaaaaaattatactaattttttcacaaaatatgatatagaccaaatttaatactcggtaaatttactttttcttcatccatttctcaaaaattgagttaaaattttttatttataaaaaggagaatttggtcactataataaatgaactatttcgatgcttatctatatgcatagtactatgaatgatttactgtttctagagttgtttccctttccttttaagatattttgttttagttgtcgactttgctttagtgccatgtttccattagcaatggcatcgcaatctgttacgtatctttatactttattatgctatttattagaattgtgtcaacctcaataggaattgtaatgctatgtgatgttatgtaactcttattaactttgaaatatttaattatttattttaacgttctatatttggcaatcatataggctgattatactgatgctttttatatcacttctcctaagaatcgtgatacacatggcttctcctaaaagctttacaccatatcaaagccattatcttccacacttcaactataaagtcccacttcatagcctcaagataaacatttcatctttgcctcatttctttcactaaaccaactatttttgtctaatgttctgaattcatttagtgctgattaaactaaagtgatatgttgccaaggagtcgaactctacctagcaggatccatcatggagctgtaagagacaaacaacagttaccttatctcatatatcttgattctttcttagtaaagtcccaaaattatgcatgtttttcttatctttgtatttatgtcgcagttggaagagaggcatgatatcaggcactacttacaagttgaacctcagcctaaagctactgaggctggagcaataaatcctcaatccaactattccaagtgctttgatgatgatggccgcctaaagagaactggtaaaatagcattacaatctttacttgactttcaagatttttgaactcataaaataaaccgaacacagttgtgtgtagcatttgacataatattaacactgcagacattaattgaattaactcattattgtcttgattcatgcaggaacattatggactgcatcatcacatattatcacagcagtaataggctcaggagtcctctccttggcatggggaatagctcagctgggttgggtcacaggtccagctgtgatgttactcttcgccattgtaaatctctatacttccaacctccttgcgcagtgttatagaactggtgaccctgttactggccacagaaattacacatacatggactctgttaagtccaacttaggtaatataacatatcatctctataactatataatagtctcaatatttttatatataactaatatactaatgagggtattccatctggggttgcaggaggaagaagggtagtgatatgcggtttaattcagtatgttaatatgattggggttgcagttgggtacactattgctgcatctgtcagtatgatgtgagtaattaacctagaaccgaattgagttagtttaataacagcaactattttaactgtcaagacagatattgaattcagattcaattatataaacatatttatacaaggactgagaaaacaacttttctttttttgttaagtagtctttcaaacatagttgagaacctgttctgtccaactctgtctaaaagaccactttataaactataatgatcaaaatgagaccattttgtaaaataatactataaatagttttacttaccaagtacctatcttcactttgtacatttattacatgttttgtcgtgtgttcagggctataaagagatcaaactgtttccacaaaagtggagggagagatccatgccacatgtcaagcaatgggtacatgataacatttggaatctttgagataatattttcacagatccaagattttagtcaagtatggtggctctctatagttgcagcacttatgtcctttacttactcagccataggtcttggtcttggcataggaaaagttgcaggtacaagcatacatatactagtaaagataataagctcaaataagcatatgatcatcaacaagaatgtctcaattcttcttacatcttttgcagtaaatggaaccattaaaggaagcttatttggaattagcatagggacagtgacaaaggctggaacagtgaccgaaacacagaagatgtggaggagtctacaagctcttggagccattgcttttgcttacactttttccttagtcctagttgaaattcaggatacaattaaatcaccacctgcagagcacaaaaccatgaaaaaggcaactcttcttagtgtatcagtcaccacagtgttctatatgctgtgtggatgttttggctatgctgcttttggcgatttgtcaccaggaaaccttctcactggttttggattctacaacccttattggcttctagacattgcgaatgctgctattgttatccaccttgttggtgcttatcaggtaataataacttcatccacactaatatacatgtaggggcagccaaaaggattagacacaatagcacgagtcgaaacccacatgaaataaaccgatatgggattttcttaaatgggatcgtatcattctctggttgatccatctaatctattaatagaacatatcattaaattccaggtgaacacaattcaaatgacataacaacaacctatgtaaaacatatactatttttaaaatatattgaattagttaaataagggataaacacgaattaacactccttaacaacacgagtcaagagaacttagatgaacaatgtctcagatcggctaactctacttttctctaattgattctgagttgaaactgaactgtactcttattttctgttttgacgttaattttttgataaggtgttaccatactggcatatgcaggtattttgccagccattatttgcgtttgtggagaaatggagcagcaagaaatggccaaagagtgagtttgtaacaggtgagtatgagataccaatccccttggttggtgctgtataccaactcaaccttttcagaatggtttggagaactatatttgtgatgatcaccactctaatagccatgctgatgccattcttcaatgatgtggttgggatacttggagcctttggattctggcctttgacagtttattttcctattgagatgtacatagctcagaagaagataagccgttggagcaccaaatgggtgggacttcagatacttagtgctacttgtcttctcgtatccatagctgctgctgtggggtcttttgccgggattgttcttgatctcaagacttataagcccttcaaaactagctattgagagcatttacataatttatatctgtgtccatgtataatgtattaactggttatatgttgtgctaaaaaggattattggaagcataattttagtaattattgtggaccttgtctcgctagattggcgagataagtaatgagttaagtaaatattaaagatagacaaacaagatttatactagttaacttcctttgtcgcggcggtaatcgagctacgtctattttacatcgagtttttattgctcgcgagcactacaagaatattgactaaggctagagctcagatttcaagagagagatgctctcaccttatgaagactattctgaatgtgaaaattgagcttgtggagctctctttttatagacaaataggtccagtaatatagtaacaaaataatacaaaaaatatagaaaatgttagggactaatctatatcaaaacgacatttttagggacttctccacaaatttccataataattatatcaaatatataactatgatagttacatttacttttagtcattaaatcattattaaacggttgtgataatttaaaaatttattaaaaataattaataaattatttgtgactttactaacctaattttatttattttcaaaaataataaaacaaaaaaatatacagttatgaaaattatgaatagctgcaattgcacgtaatcaagtaatactcacataggtgagatcgatcccataagaaattgaacggaataccactagactagacatatgtttctatttggcaaaccaataattttgtgattgtgataaaaataaagattaacaagaaaataaaaagatctcatcaaagatggcaaattagggaaaagaatcatgttgatttaattacccaattgttaatgctaaatactactctctttcttaatgtgaatgacaaattataacaattaacctaactcttttttagatcttttaggccttaaattacatgttatctaatcatctctgaattagactaacatgtaatcagcattgagtaataatctaaatgtcacaaaagctatgtgaatactttcgtttcatatcaaaacctagtttatccaat

SEQ ID NO: 299476 - DNA, 3458 bp, Cannabis indica
ttttaaaagtaacagcatttaaattcgtatacattttctttgaaggttggatttcaaatgatgaataaaacaaaaaaacaatatgataaatatatacgaaatatgaaatttaaatgtcgtatatttttataaaagaaaacatttacagatatattcaagaagaaaatattttcattgacaaatgtttttctcagtgaaatcagattatttgtttgtttttaataaaagagactagaaaacagtacaaaaacatgggtatttatgttaattataaaattgatttaattgaaaaatatgttttatttacaggttaacatcagtatcaccgtacatgtgcgataattaaagcgtcaaaaacgcgttgtgactcatatgacttcttcacaaaggcaaagaaatcgactaaaataccgaaagaagaagctgataaatatatatatatataatatataacataattcaagacattagcatatatatgactatagctaattgtcttgaaataattagttaattatatatatacataaatagtattttactcgttttcttttttaaaggagttgaagcaggttgcctttttcctccttttcatgaaagagtacagtacctacttattactactagaaattatattgaagggaagtagggacttgcgtagtggttcagtttcacgttttagtaatggctcttctaacgtacctttgtttgcttgtaattttttctctctttttttgggcaattaaattgctgtctgtctactcttatttcctatcatatattattttctttatttatttgtaagagtacattattactaattacaggggagcccacacaatcacatgtatattaactactttatactactaatattattaatatatatatatttttttttattttattcaatttcgtggaagcttgcgttcttgtccttttctttggtcgcttctttagctttgaatcctttttccagtgaattaaaaatttgtattatacacattgaaaaaaaaaaaaaattaatatagtcgtatttaaaattattgtaagtcaaaggcaactttggtgagcaaaatcttagccgacggcagaactaaaatcattttattattggacaaaaatgaacgtggaatgaaattgaaaatgtgtcggctattgggtttttaggtaccggaatctagaaggaaggaaggttgggtatgtggtcagctaattcattattcaggtcggctgacttatagagtcaacattaataaaacgtgattaatattgtattactatattaaggtttaaagattcttttcttacctacattcttatttcttaccctttaattactttattctttgtcactaaattttttttttttaaaaaaaaaagcatttatagattaaaattaaagttagatttcatgatcattatgggctgcaaaattacaaactataggaataaatgaaaatttacaacttaacataaaaatagagagatgtttataatgacgcacatagttgccaatcccccgactggagcaggttccctttagcgtcttaactatcttagaattactatcaaccatcacaaaagtgtgttgaaatgaaacgacagtctccatgactaacagacaagccgcttttctccgatgaggaggttagagaagttgagcatgtttgtagccacccacaaaatagattcagtgtgatcgctagccaaagtcactacgcacatggatccacatccaattgtaacatcacagttgatcttgacccaatcatttggttaaagggacaagtatgaggccgaacagccttcgaagaggcaaacaaacaagactcataatctgcgtaacaaatagagacagagtcaatacaatgtttaatgttactcagaaagttattgtgtacctttgcattacatactctccaaattatatccatcacaatagaagcatagaggaacaacttctcaataacaacccccttagatgtcagatttcacaaaaattaaccaacccaattccaaacacgagctctagaatccaaaactggcataactcactagagagaaaaccaccaaaggtgaaaagcaaaattgtaatagaggaacagatgttccatcgtctcctctctctcccacaaagaggataagagacctcctcaatatgcattctcttagcgagaagggcaaggacacacagagcatttgaaagaatgctccaccaaaagactttgtgacattcctaaactttaaagctccatatttgttccatagagctggggaaacgttgcacaaaggggcacgctctagagcttgaataaggtaggcaaacttagtagaaaataaaccatttgactctttagtccatacccacctatctctaccctgaccacacggcttaccacctttgatgatgttattgatcgtctcctgttcaaaaagggtgtgaagcttagaggtgtcccaatccctgctaggtaatagtaaatttgccattttcttcaaaccctcaggtggatgggtattaggcttagggtagaagtccttaccatatataacccacgagtccaaaataagcttgcaagccccattcttgagaattttatttcgcacaatattcttccaaaaccacgaatttgagttttttaaggaacgctccaaaaatggctacccctaagatacttggcccttaacaccttacaacacaacaattgttcttcattaaggagtgcccaaccccacttgaccaacaaagcctaattcatttccaaagacttttagaaactaaggcctccccgggatttgggaagacacaagtgattccaagcatttaaatagataccacgatttcctcgctcacaaccccacaaaaaaattcttggccataccatcaatcttagaggcaagtttcttagaaagcttcgttctctgcagtgtacacaggcaaggcaagccccaaagatttgatcaaagtagctcgtcctgccttgcacaacattttcaacttccatcagtggagttttgaaactaggttatccaagtttggacatgagaactcccatttctttcatgctagccttaagaaaagaagatctaagaatcgtattactacttttgttaaaaatgggcaggttattaatgattatgatcgagtagtagctcattacctcaatcattttagagattacacgggaaagaaaagctctacctcttagccattggaaccttcctacatgaatttttttcctaagcttaactttcagtaaaaattgaggctcattagacctttcgtcatcattatcgatcttttgctttttttgatttctagttttagctactttaaacagttcgttatgaagtgcaaatggttcgtctggtcttagaacataaaacccttgtttcatggatgcaacacaaatttgaatgtcatttcgagaaatggtagaaccagaactcgaaaa

SEQ ID NO: 299477 - DNA, 3549 bp, Cannabis indica
gtttactccacatgaaatgattgaccatgaatttggtggctggtagctctttttcgaatttcataattccatctattctagagagtatcaccgggtttcagcggcatgtgtctatatgttcgagcttatgaatacaaaaacttaggagtatttcgggagacttgctgagttgatgatataaaataccaattgcttagaagtttaagctgataagctatgcttaaaagtctacctgaggcttttgtacatcgtgacaggtgattgaggagttagttttatagatgttattcacctttgctgccttaatgtaattgcattgaaaattccactttataccaatggtattatagtgtacatgtcaaccataaatctggaaaattgaaaattttctgcggccccatttttggtcttaatttcgtttcaatgagctgtctttggcaacgttgcattattaatttattatgaacgagtatcatacccaaaatatgtatttgaacattgtagctaagtaatgatcataaagatacgcatgttacttaaaaggcccctttgacatgcatggacaatttttattttattttttaaatagtaaataagacaaataaaatttaaaaatattttaataataaataattataatataacaagatctgtaaccaaagaaaaaacaagaaataataaggttacaaagatctaaggatatctgaaacacaattattccaaacatgcccttcgccaattcctaatgcagcttggataaggttatgtgctagagtattagtgcttctaggagtgaatttgattgttgcactaggaaaagagaacaaagaggagatgattttccatattagtctagacaggcctgattgatctctctgctgctttataattcttgagacaaggacttgacattttggttctttaatgcgatatctacactcaatttatacaaggcagcagagaaatcgatcccaaatggtcagagttactatcatgaagagtgttatttggtgatgagatgactttagcttgagctacctcataatcctacaaatatgaaattataaaaggctctacatccatacatacagtctttttatttgcaaaagaaacttattacgatgattccaaatagtccataatataccaaagaacactgacaactcatctttttgaaacatttcaaaccttcttaaaagaaattctttaatgtcacatgaattattattgtaaaaaaaattgggaaaatgtgtaaacttctaatacttacctttcctggaacattgtaaaagagaatgagtattagagtcaatttggtttaaataaaaaggccagtatgagttatcaggatttttcttgaaaaaagatttagtttagaaggaagaaggtggtagaatgtcttctagataaaatattttatcttaggaagaatattagaagaccatacagacttccaccaagacttgaaagtcttaggattggaggaactaagataggggtaattggaatttgcaaggtgataggcagaattgaccgtgaaagtgccagaaggattgtgtccccaaatgagacagtccttactcatgggatcagttggcactttgaggacagagttaacaaggtccttatcaaagtaattattgaggttatcaatatcccatagaccatcctccttaataaaataagaaaccgtagtctcaagtggaggtgaattgttttcaaaagagacaatgctagtatctagaagccagttagggctagtgatctgaatagatttaccatctcccactttccaaactaaacccttagtaagaagatctctaccccaaaggagacttctctaacaaggagggataatgtccaattggcacatgaaggaaatcattattcttaaagtattttgcttttaagagggaagccacaacggagtcaaggctggtataaatacgccaagcttgtttagcaggcatagcttgattgtgatgaacaatatcttgaaaaccaagacccccatagaacttggatttacaaacttgggtccatttttttcagtgaatcttgtgttgcctattacccaaagatccccaccaaaagtagtaccggcccataagttttccaaaatgtttacagatagaaagagggatcctataacaggacatagcatatgagggaatttcttggatcactgccttaagcaaaatctctttaccagcttttgaaaaaagtttttgactccagacatataatttactaccagccttttggaggaggaaaagaaaagaagatttcttagagggagagaaacattgggggggatatctaagtatttatcaataaaaggtttatcttccatattgagagaatggaggaaagaactcctatccataggattagtattacgagagaagagaatggaggacttagctaaatttatagtttggccagtagccttattatatatgctaaggatatcttttatagtatcacacataaaattttaatttgaatcataaagttaaataataaatttttgtaaaaagtattaataaatcatatgtatttgttaaataattatttagagttattttagtttttttatattagttgcctaaagctttcttattagttgtattcttttatttttgattttgcaattgaatgaaatcctagtttctatgtatctcttttattctttattgattattcttctcaaataattatcatggtatcacatctaggtttatgatagtgaatttcttaagtgtaatcacaacttttgcagtttttgtaggcgtccgtacaattcgacattctaatttatgtattgattttttccgagttttttcatgattcacataacagttgtgggtattcattttcgcagcacaattttgaatttttatcatttttgtatttgcaaatatttgcaatttgttttatttctacaatggctaccaatgaagatgattcccttcaagcgatcagtgtgagattagatagaaagaattattcaaaaaaaggacgcggggttatatttctggaacaaagagaaaaccagcagatgataatacaaatctattagaaaataggaagtagacaattcaaaattctcacatggataaataactctgttgaataatctattagtacctagttagcaaagtatgagacaacaaaagaagtatgtgaccatcttgcgagattgtatacattctaattttgcaaaacagtttcagttggaaactgatattaaagctattgaatcgaaatatatgagcattcaagagttttactttgtaatgacacatctttgagatcaattggaacttaccgaatcagtagagaactatgtgcttttgcatcgtatattgcttgtagagaggaataatgattggtttaatatttaatggctcttcatagtgattttgagggactttgtggttctatattacattgttctttgctccttcgattgattcagtagtcagtgacttgttaccagatgaaattcatctcaagtcttagttagggaaaggcattctctcaacc

SEQ ID NO: 299478 - DNA, 2242 bp, Cannabis indica
attttttttattattattattgacagggaatgtttgtgctgactctatcagtttcaattccaacgctaaaacctccaacttgcctagactctaacccaaacaactgcaagaagccctctaccttacaagtagcagtgttttttggtgcactctacactctagccctcggaactgggggcactaaaccgaacatttcgacgattggtgcagaccaattcgacgattttgaaccgaaggagaagaagcaaaagatttccttcttcaattggtggatgtttagcatcttctttggtatattttttgctaacacagttcttgtttggttacaagataatattggttggacacttggatatgctcttccaactcttgggcttgctatttctattggcatatttttggctggtacaccattctatagacataaaatgccaaaaggaagcccttttgttgaaatggcccaagttatttttgtggccatgaggaataggaaggcacctcttcctcatgatcctaatgacctttatgagcttgattctcaagtgtatgagaagaagggagtttatagaatttatcccacaccaaccttaaggttagaatcaccttattacttattttcttggatatatatagcaactagtattactcctatccatgttttactcctatttatattcattctattaataattaaagttatggaaaccacaaatttattgagattaattcatgtgaaaattaaaattattgtgtagtgattgttttataattactatttataagtatttttagtattttggtacgtaagcgatttgcataatgtagttagactttatataaaacttaattatagttaaacaatctatgaaattataattttgacatttaaattattcaaaacagtttaaactttgttgtaaaagaaaaacaaaattacaacattatcttaaaataaagtacatatttactttggatatttttaagacattaatataactaatatatatataatatatttctatatacaatttaatgaatatgagatgtgggattttttaggttccttagcaaagcttcagttaaaacaggctcaagtagtactacaagtccatggaaactatgttcagtgactaaagtggaagaaaccaaacaaatggtaaggatgctaccaatatgggtagcaacttttgttccaagtattgtgcttgctcaaatcaacaccttgttcatcaaacaaggaaccactctacaaagaggcataggcaatttcgaaatcccacccgcaagtctcagcgcattcgtaaccctaaccatgctcatcagcgttgttctctacgattggtactttgtcaagatcatccaaaaatggaccaaaaaccctagaggaataacactcctccaaagaatgggaatcggaatgattttccacatcatagttatgtttgttgcttttcttactgagcgacacagactaagtgttgcaagggaacaagggcttgtcaagagtggtggacaagttccactctcaatctttattttgcttccccaatttattttcatgggaatcgccgacgccttcatggaggtcgcgaaaatcgattttttctatgatcaagcacctgaaaatatgaagagccttgggagttcttataacatgacaactgtagctgttggagggtttcttagtagttttcttctttctacagtttctaatataaccaaaagaaatggtcatggttggattctcaacaacctaaatgattcacatcttgactattactatgcttttttagcattgttgagctttgttaacctcatttgcttcttgtttatttctaagtattatgtgtatagggctgaagtgtcggattccatttatgtactaacagaagaattgaaaggggctaataatggagttgcacccaaatcatgaataaataattaaagtcaactattgtgtttgtactttgtattcatgtttgtatgttacactattaaatgactataaaactactcaagtcaacctatatgtttacaaatcactcgtatattttaagttgtatttattatgtaaatttccaagtctaaagatacatttgtctatcaatcttattatttagattactccttgatgaaaatgtttataaaaaaattgaattgttagaacatttttacgaattattaaaaaatgatgaaaatgtgcattttgtgaacacttatttataagtgtatatatagtgta

SEQ ID NO: 299479 - DNA, 2705 bp, Cannabis indica
ctctcataaagtttttgtttttcacacttaagcttattttttttttaaaaaaaaaaaaagctgagctcgtcaatgaaaaaaatatttgtgctataaatattttatatatgttttcagttttatgcacttatatattattttttttcgacacattattacatttttcattacttctctcactaccagtttattacatcattttcaaacataataatatttgcagcataaataatattttttattgcatacatttatataccacatttttttcctgacaaattaataaattaaatattagtaatacatttatattactttcgtcactaccaattcattaaatttattaaaaaaacactaagttgacacgtggtaacatattagtgatctacacatatttttaataaaaaaaacttattaaataattttaaaatttataaaattgtaaagtttatttaattaagaaaaaaaaaatactatttacatatatatctctctttcttcttcttctcttagaatgtaattgttttaatattgtttagttattttttattttattatttaacaaagtttttttttttttattgaaagtatgaataaactactaatatgttgacatgtgttaatttagtttttttaagaagatttatctgacaaaaatatcatcgtaactagaattttaagtatttaatatatatgtatgaaatcgaaaaacattagatatatatatgccataaatactcttttgtttgtaacttaaggtaattaattcgctgaattgataaaaatatttaatgtatgagaaatgctaaaaggtaacagtagtactacctcactttcgtcaatattattattggttcaattaagtatcgaatttcatataatttgatgtaataacgagtatcactagccaattacaaaataatatgtctataaatgtatgaaactgaaaatataaaatatttatgccctaaatatttcaaaccaaaaaagctaatatatatgtgatggttgacgagctcaacgttaattcaacataagagaaggtggaccgtggactaattaaggtgaaaggattcaaaaatggacacctataggctctatctgtcatacaatttattagttggattaggtttacgaagagctctgggttaggtagatatatatttggaagattggtcattaaaaactagttattttgaaaacgatccaaagaaaagatgttgtataaccaataatccaccattatctttctactttaacgtcattaatatgaacgttgagctggtcaaggaataaaaagtaaattaactttaattttatctttaaatgaagtgatgatcaaatgatggatcaaacgcgtaattaattagttgcctttacagacaacgtcaaagatgatattgttacatgcatgacaacgtaatatatatgtaactgtggccctaattggtcaaattatataattcaaattgttttatatgatgttacattcatattaattatatataacagacattttttaattaccacatattgctacttaatttattattttttagatatatttttccagtaggagtgatgtttctatcatgaggtgttatatctaattaataaagtttgatgaaatttttcaaaaaaaattaattatcatgtaataatatcataagagacaatattttttaagtttcttaaatttttaaataataaaaatagagctaaaacattcatcaattgtacaactatatatttttctttacatatgcgtataactattttaaactcaattttcaaaatcatattataattaattttttcaaaattatatgaaaagtgttggaatgctttttataattacaataatatagacaactaaataaacaaattgaattataatttcttcaaatactaaacatttattacttttgggtgcaattacaatagaggtgcattttcgacctaccggtaaaggtatcactgttttaggaatttagagaaattataacttaatttttatcttatatgattgtttataatataattatagcagacattctaccactagttttcaaaattttttgaataatttactactgaaaaaagtcactacaaaaaaaaactgtcgtgataatgttttagtcacaatataaatttttgtgactaaatgtgacttttagtcacaacaaaaagttacttgtgactaaaacatagtgttaactcaaaaaatttccctggtagtgtggacatcaatatttgacacgtggcaagaaggatgacgtcaaagagttgagtagacccgagtcataacagtcgacctgggaggggaccctagccctgcacccaggttgacatcaggagctctgaaatggaagttcagacttcaataacttgaattcaactcattatctttcaatattttgtaccatgaagacatggaaggggtgaaaattcgtgtccgggggtcgtgttcgtgacttgtcgagacccatgtataataggtatatgctcgacctgaacacgacccgtttaataaccgtgttaaaaataaaaccagaacacgacccatttataaacgggttgacacgacacgacccgtgtaacccgtttatatgcatatttcacttaaagatgttaaccaataacacgtttatgaagtattcaacacgtttataacctatttatgatatgttgttggaaattatttt

SEQ ID NO: 299480 - DNA, 8379 bp, Cannabis indica
ttactctaaaattttatattagtgttctaagtaatttaaaaaatataaaaaattattttaaaataattccaaaattaaattaaataaaataaataaaatatggggttgatcttcttcaacccatcatcatcatttcagtcacaggtaactaactaactaaccctagctttctttgaatttaaaaatttcaatatcatccattttcgaatcttattatttacagattttcatttctgtgtttgtggatttatcagggccaaccttagcttcttcttcatgattttgattaatggttataattagccacaagtcttattaaacagttccaagctcagctatggctttctcctcagctcctcgctccaatattcctaccgcttcttcttcttgccaccactctaaggtttgtacatatatatatttatatatttaataatagttgataatttttgcatataaggatcatatcactgagaatggagtcttatctagatagttgaaattttgagtctttttatgttttgagaaatgctaagttcgttatcggttcgcatttttgtttaataaataatataaaaaatctctaacctgagacgatatcagtgtcgtgttgaatatcttaaggtgtcaaatacaatggttttatggaggattgataaaacacggcttgtaaccgtggtttttcatttttatttaatatgtaatatgaaaaatcgctaatcaattctgatatcggtgtggtgttgaacatcttaaggtatcaaataataatatttttatgttttattgggcgattgataaaacatagcttgtaaccacggttttcttcgaccataagcgagactcccgaataaagtttgggaggaggtgagtctaagacaagtgaacaacaacttaggctccttacagagaaaaggaaggaacaaaatttggggtttggataagttttcctgggaactaattaagcttattcccttttgatttgattcttaattagctatgaatattgaagctatttgttgatttatttttgttaatttaagttctcatctggttatttgtcaagcaaaaaatctttagtgtttataaatatgtaatacattgtgtttttgtactaatatcaatacagaaatctaattactgattttaagaaatgagtgattgactactaataattgtatgtgtgatgctaatttgtgcagtttttctctttgaggctcaattcaaagcaaaataaagtaagttttgtgtcgaaacttataagagaagacacttctttgaagattgttaagtcagtcttaaataacaaaaggttaaatattagtgacaatggagctactgagcctgctaggattcttctggagagattgtttgcacagacccgaaaactggagaaacaaatgagtagatattctcaactcccggatcaagatgttcaactcggtcttaatcttgaaacattggaggctgatcttgtggctgcattggttgcattgaaggaaaaggaagatgagttacatgatgcagagaaggcggttttttttggaacacagtgaattagaccgagcaaagaaggagttggagaagcaggagaaagaaattgctgatgctcgttgtaagtatgaaaaaatcgaagaggaattgaagcaagctaattatagtttaacttctcaagctagggagattgaagatcttaaacgtcggctttgggagagggactcaggcattactactttgcgttctgcattgtctttgaaagaaggtgaaattgttagaatgagaaatgaagtgatgacaaagggtgaagaagttgctgtgattgattctaatctaaaatctaaggctcagcttcttaatcaagctaatgaagtagtgaaggagcaagaaattgaaatccaaggacttcgaaaagctttacaaaagaaagatgaagagctaagggcttctatggcactgagggagattgaagaggagaagctgaaagttgcagaatcgaatttagagaagaagacgatggagtggttacaagccaagggagaattaaagaaacttgcagagaaagcttccaaacatgttgaagaaactaatgagacattggatgactttaggagagtgaagaaacttcttgttgatgttcggtctgagttggttttctctcagaaagctctggcatcttcccgaaaaaagatggaagaacaagaccaggtgttgggaaagcagatggaagaacttgaagaacagaagagaagtgtcatgtcttatatgactagtttgaaagatgcccaaatagagatagaaagtgaaagagtaaagctaagggttgcagaggctcgaaataaggagctcgagcgggatttgtcattagagagggagttgataaaggggttacaagaggagttgaagaaagagagatcttcattgcagcaggcaatgcaggaaatgtcttctctccaacagaagctagaccgaaaaagttctcaattcgaggaaacacaaagtcttcttcgggttaaagagtcagaattggtggaggctaagctggaaattcaacatttgaaatctgagcaggctacacttatggttgtatttgggtgaaaaggattcggaactcctgatttcgaagaagaaacttgaagaggtgagcaaggaaatcgctgacctgaagatgcttttgaacagtagagagaaccagcttattcaagcaactgcattgttaaaagagaaagatgaacaagttggcataattcaaaatgaactgaatcagacgatgcagaaaacggttgaagctgaaaatgtggtagaaaggattgctgagcttacaaacaaattggttatttctataaaggatgaaagcagccatgggattttcgagcaaccatgggaaaaccaactagaaaatgagcttgagttaacgagacagaccttacgaagaaaagaaatggatgttgtagctgctcagaggtctcttgcaatgaaagatgaagagcttaaggccattgaagaagaaacgaaacaagatgctaatgatctaagaaagctttactctttagcgcaagagagaaatataggcgaggaaagtttcggggacttggcaattgagaagcttcaactcgaggcgtctcaactagaagttgaagctgcaaccagtgctcttcataaacttgtggaaatgagtcgagaacttttgaataaaactacaccaagcatcgaggttgatgatagctttgatcattggaagagcacgggggagaacaacgaatgtttcgctaaggttacaactgaagtttttcggctttctgctttgacagaagagctagtgaaggaggctgctgtttcaggcaagaaagtaaatgcttagctttcgactaggatttgtataaatcattcctttgttagtacaagtgaaaatgtgtatcttccatttctgtgttgatttcttttcttttacaatctatgaagggccaataattaatgagcttgatatattcatgaattttagtgtacaatgcctatttatttcccattgaccactcaaaaaagtgcaggagtacaaatagtaattaccttgcttgctcaactaagaaagttgcagcaagataagtaggataggaatgagcttgataggagctaagtgctcgattgatcggtgcacaatgatggctcacaatgtatcttaggaatgagctcgataagagcttaagtgttgctcaatcattctatgacatgcgctcgatatctactcgatgaattgttaaccgtgcttgatagttctcgataggtgttcgatgacagtgaatttattttcgattttttcttgaattctttttcattatctttaacacaagtgcgattgttcacaatgatggtcaaaagcataacctagtagttccacacttctcacaaagagaatgttccaagttcgaatccccttccttcgaaataagagattgaaacggaacaaataatccaaaaatatattaatttattacttccattgtattgtgttcgagcagcaagcagtgatattcatatatatatatatatatatataaataaatatgtattgtattttgtttatagcactctgagaaggatgttagaaaggtaagtgccttctgggtaagctgggtcaataggatggtcacatgctgccccagcctgtctaaccaacgtaatctttcttcccgccattgctgcagcaccctgttcagaagttaaaaaagaacattattttctgtgttatgtacagaacatcgcaccattataaggtggcgctctataaatagttggcgctggttctctatattattaaattaaaatatatttgaccctgtattgaattggaccaacttattatttacccaaaaaaaaaagaattggacgagcaacaatatgacaccttattatggtgcttgacactataggtgccctttgagtctattggtctatttgagtttcgccttttgttcgatgtatggaaattgtttttcgtacaagatcgattcttttgtgctcgtaagcaaaacgtgattacgtttttggataagttacctggagaatctttaagaacatcccgctttgtgtcatggctcccgaacacgaacaagtcataagaagaccacccttctttgtcaacttcattgccaagcaatttagatttctatacatgcctgttgcgctttgtaaaacctggattcagaacccgttgattatgtggcgaaaacaagacgagtcatatcatgagaagcacaaaccagatgatggaaagttataccttttttcgcggtgctagtttaggaggatctaaaatgacaatatcccatgattcatttctagagagagcacccttcatgaattcagttgcatcttctcttaggaaacatattcgttctcgatccatgttgttgagaacaatattttctgttgctaactctagagctggcaatgatgaatcgatacctgaaaacagatgtcgtaagaataatcttgtttcgctgtaaaacgagcatctaatttcattctgttttatgtaaaatccagaatacctcaggttgttcctatattttattatgaataatgaataaaagtaaacatgtttatgttaggatctcgcatgcatgagattgattaatagtatataattacttgggtagctttttctcttcggttagctttcgtgagtgagttttacccaaatagttgtatcaagtagtatcagagtcatgctcgtgagatcgacgtcacggaaggggtaacttatagattaggctcagagtaggccatcaaagagtgagccactggttgtatcagcttactgataaaatcttaacattgctgatcaattccatactagtaaagtcatattttagcataactaatttcttagcaacataatctatgaaataaggagcaatcaggaggaattgtaagagcaaaacaaataggaattagtaccagtgacagcaatggcgcctcctcgtgctgcattcaaagcaaaaccaccactatagcagcaaatatcaagcactttctgaccaccggagattgttgatatgaaatgacgattctcccgctgatcagcataaaacccggttttctggccttcaagtgaaattgcataacaaatcccattttcaacaacctaaatgaatagcaacacggcattaaaagtcaagccatcttaacttacgggtacaaaagaacagatttgatagaacaacataggcgatttgtagttatatggcaagaatctacatagttgagtttggagcaccatgcatgaactgagacaataataataagattttctcacctttgttctgcaaggacaagtagatgaattcatttgcttcaaatttgacacatccaatccttcttcttttaaaatatctacagatggtctccagtttatgtgattaacttcactaattctactgatgcaggcctctatttgtggtttgtacttttccacccaagcagctgatgatgctattacagctatatccccaaacacatcaacaattagtcctgacaacctgtgtaaagtaatatgacattgtaagtaaaggtggtgaaaagataaactaaggttccaacttttcgagacagttcggtatctccctgtgtcatgcctcctagccctctatttataccaagtcaccttaggactataggatagctcaattaaagccactaagaatttgacaactcagtctctaaaatcctaatcagttatactaaatgagactaatattaaggtttaacatatgaattaaggatttcccacacagtataatagcatcatcaaactaaccttactaaaactaagaaccccaacaagttataactcatcatctataattttgacaaggcttaacatttggcatatctaaccaggatgtgatatttaacaagaaatccaatatgtcctaaaataactgtacaactcattcaacaccaattggatcctcatttcatcatcaatatgaatggatttgcaataactgtttgtaaacatgaaactactgggcagaaattattacctgtcgccttcactattcacaagtcgataagcatttgtattggctgaaggaagccccaagcttttacgcaattctattgctgcatcgatccttgcttcgagtagtttcatcatgtccaatgcacatgaagggtctctaaatcaagaatggaatgtcattgcgacgaaaatgtattagcaagctcttaaagcttaaaataaagtatcaccttttcgcttcttcttctagctgcatcaatcgaacacaaaacattgaggaagaattatacatgccccaaccaatcggtttttcttcaccatcagcaaccagcaccatatcaccagtccccggtggcggtctaccaattattctatcaacggctccactgtaaaccattggacttccatccttgaagagttgtgtcttccctttcttcaacacaacttttgccaaacctaccttacccgaaaaacataaaagtttaggaaatctagaaaatgttgactaattaactatgaattttaccaaaagccatttttgtgaagttgaacataaagaaaacaacactaacaacactaattagtaaacctacaacatcaggcatctattcagtccattcaataattgggattcaaatgaaattgtcaagacaagttttttttcttttttttgaaaaagggacagaggtcacttgtcttagactgaccccacttaagtttattgagaaacctcactagtggcggagaaaaaacgtggtgacaaatatattttaatacaaaacataacatatctactatcagaactgaaacaactccttcataggataaatctagttatacaaaatgttaccccaatcactgcataaagcacattttctcccatatcctcagccacatactataagattggcttggcttttggtgttaccatgttactatgacatgattaagcatgagagtatcttacgaggattccatagttttgacaattattaagcatacaataatcaaaagatgtactaaatgaaagttacatgatgttatgaagttgctgtatctatcctcattgatgattataaccaagttaatccaagggctggcagtagttttatctatccgcatttcgggttatgttctcttattacatttcttagataaaatagggagcgaatcttaaaaactgagctccaactatacaaaaaataactctcagtaatagagaatggttagggagctcattacttttgtatacatctactttcagaactgaaacaactcccccataggataaatctaattatacaaaatgtttccccaatccctggataaatctaaataggagaaatccttaaaatattttgatattaaaatccaagttgccaatcaaaaaatttttgttttctcccatacttccactaatgaactctctttttcttcaaaaattctgaaatttctctcaattaaatgtgggtgcaactacaaaatcctcagccacatactataaaagaatgagagtatatcaagttgctctctctatctgcattgataattataaccaagatacaagtgtatgtatctctacttggagtcctttccattcccaaattaatatatatttggaaaaacattcttcttttcttgcagcatttggagaacattcttgaatgaactaattcactcataaatgagactacaaaaaagcattgaaaaataaatatagaaattagcataagtagaacaggagtttggctgaaaaagaagaatgaattttccaatactctcagcatccaagaataagtaaacttcatacatacataacattcattacatccaaaaaaaaaaaaaaaacaaaaaaccac

SEQ ID NO: 299481 - DNA, 3041 bp, Cannabis indica
acgtacacttgcgtaataaacagaattttcgtaacacctgtcgaagaaaataatcaggttaatcccaaaaaatccaggaccaacaactaaggaataccaaggtgattgttgttgatagggaaaatctctcaaaaccctaagaatgtgaattcaagtcaaacatgacctaaagctccaaaaccttctcataggaatgtaatgtcttcaccagaacagaattatccttgactagaaggtccacaaagggctggttgaagctacatgtcttatctatttgaacgacgcatgccaaggcgagaagtgcagtcttaaagaactgaaacaaacatttttgcaagtgaattgaggagaagccaaacacaaggccaatccttgcgatctcagacatgggaagtttcctaacatgggaggcataacactcatcataataatcgagatgctcaggtcagtgttagtgacttgtaaagttaccaatctgagagtgtctagaccacaaggtcggtgagaaattatgatacaaggtgagagcgacaccttgaacatcatgatgaacttggtctgtgggcacatctaaattaaagacaacccgatttgcacgaatgcctgaatcgtaagctccagaccttaatgagaaattgaacagaaatgctcttgatttgcacgagcagtttaataatggaccagctgatgaccccatccaattatggatcatacagttacaagaacaatttcatagatattgagatggagaacaagggaaatttcttggatatgattaagacaaagaatttgaacaatttcatcccaatataactaatttacaatttccaaaagggttcaaaaatcctcatgtcgctccatatgatggaacaaccgatcatgtgggacatccgagtaattttaatacatcatgcgagcaagtaatgttggatagaacttgtgatgtatattgttaccaacttacaaaggtggcaaaaattttgtttgataagttcccacaatattctataatttcgtgggaataattgtctaaagaattcaagtaacaatttcaggcatcaagaagcagaaggcctaaagcttcttcattaactaacatgaagcaacaacctagtgagtagttgaaggcatttttaagtcatgtcaacactgtagtggctaaggctaggaacctgagtgatagtatttagttaaccgccttgcaagttgggatcattgtaagagaaaagttatgggatgatttccaaggaagaccagtaaggtccattagttaatatgagcgagcactcatatatgttcaaaaagaggaggctcgatcagaattaaaattactcaaaattggtaatgaagcaacaccaaattcgagtaatgtagcaaccaataccacgatagcaaatacaaaaaagtcaaataatgcaagtgagccctttggaaagagaaaatatggatctaaagatttgaacaaggatcaaaagaaataaaagaagcacgagaaatatgtgtcaatttactcagtatacactgagttaacgagacttgagaaacatattcttgatcaatgaaaacaaggatgcattttgaaagccacaccccatgcaaaatgctatgaacaaacgtgatcatgaaaagtattgtcgttttcataaggatattggacacacaactgaataatgccgacaacttaaggacaatattgaaagtctgatatcacgaggatatttctaatagtttgtgtaaaattgagaaaatgaccaaaattagcctaatagccaaaattgaaatcaagatgttcagcctcctcgagtaaaaggtgaggatattatgataattacaagagggaagcacatcacatgaactagtaataatgcacataaaaggtatattaattaagtgaagaatcaaaattctgtctttgcacctcagaaggtgaagcgaatgaatcatgcgaatcctccagtaatatttattgatgaagatacaccacacgtgtaatttccacacacagatccattagtgatcacgataaaacacacaaataagaggataaaaaaggtgttagttgataatggtagttcggtcaacatcttatacaaagaaactttgaaaaagatgggactggaacatgttagattaaacccttgctctattaatttgtgtggttttactggagacacattgcaacccttgggacaatcgagctcccattgataaagggggaagtcaccgcttgcaataacacaattgcaataatttttaatagtagatctcccctcagtaaacaacatgttgatgggttgtccagtgttaacaggattggggccaataaattcaataaaacatttgtctctaaaattcctaacacagttaggggttagaactgtcaaagtggatcaatttttggcgagacagtattatagcattgaactgagaagtaaagttttagctcatcagacaccagtaataattttgaagtgaatcccaagaagaagacataggatagatcctagaatagctgacgatcattcacacctcgggccaattaaggaacttgaataagttgtcctcaattcttttgatcccaccaaaaccacaaaaattaggaagggattagaagaataattaaaatagaaattaatttgctttttaaaggcaaactaggatcagttcacctgaagccattttgatatggccgggattgacccgaatgtcatttgccaccatttgaatatagatccgctttatcccccgaaacagcaaaaaaggcgtttccttaatcctgaaagacaaagtggttgaagaggagttcgacaaacttttgactaattactttatccaagagacattttatctgaattaaataaggcatgtctaaaagactattttcttttgccaagaattgatcaactcgttgattccaccgtgggacacgagctcatgactttcatgaatacctattctagatataactgttaactcaaacttttaggtctccttattttgatgattaacaaatatttgattattatttgttactaatgatt

SEQ ID NO: 299482 - DNA, 1506 bp, Cannabis indica
tcatttaacaaaacagagggtttaattgataatttttgcaaaacacaagatccaaaatagtatatatccaatttttaatgtaatttattttatgattatatatgttatattgttttataattgcctttaaatttttagaaaattttgaatacaatgaagagaataagatttaatttttttgttgtaagcgtgattcttttttttttttttgatttgaaaaaaccttcattgaaacaaaacgcaagaaacgaaaacaaagtctcaaatgtcaaccacaacaggggttgactccctaaccttaaagcaatatggaaaacgtgatgcactctagcttgagaagtcatgtgatatgccaaagtattattctcacgatggataaacttaaaagtaacagaaaacatagaagcaaacttaagacatttcttgaaaactataaatgaaccccaagccagaggaagctcccccaaccgcagggcctctattgccacttttgagttagattcgataagcatagaatggtactgatcttcccacgcgcgttccaaagcagtgagaattgccactaatttcgcttcaagaacactcgaaaccaaacattgagattggatagtaattgtctcccctcctccagatcgattcaggactaccccaattcctgcagcatcatccacggcagaggcatccacaaggaaacatgcatcaaatgaagtatcagaactgacatgtgtaggattcataatcaagttttcactagcagggtgaggtacatcaccattactgctatgaatttcctggaattctgcagctcttagagcaatttgagtcagagttgttggagttgaaggagcttttccattgaaaattagatcctttctgtatctccatattgcctcaacaacgcacgcagtaatttgcatcagccaatcattttgagttttacatagccacaagaaaaagtcttcaaaattatccattgcaattgaatcagttctcaaaccccacgggcaaagaaaccatattccacgagcaaaaggacatttgtagaaaatatgaagttcaatttccgcttcttccccacaaaaaatgcgttgatggtcatcctcactcacaaatcccagctgagttttgaggggtaggcaggcagttagaattttccaaatgaaaagcatttgtcgaggatggagtttcaattgccataaaattttccaaactggtttttcctcatgaaatcgagcctcctgtgagagccagtatgcatttttgactgaaaatctcccctttgaaccaaacttccaaaaaagagtgtcaccatcttcatccaaacgccttatggataagattgttgctgctacaccagggtcgaaacactagtttatgagatctgcatcctaggtgcgtgttccattgacaaataagtctgcaacaatagagaaagcatgagttgtgttataagagaaactttgttggacctcttggggacaataccctattggaaatattttacca

SEQ ID NO: 299483 - DNA, 2819 bp, Cannabis indica
aaaaaaaaattcataaccctatagtattatttatttataccatgaaaaaataaactcttgtaatttttccatatttttttctatttatttacattaatgaaattgaaaatattaccacctatattattaaatataaaaaatgatttacttcttttgtttgttgttatttcatttatagaactttctcactttttcaacaaaaataaaggaattttctcgtaacctagtccaacttagcatttttgtttgtaaggctagtcaaactcaacatcttatttacattacaatgcaactttttttttttggtcagtatcctactgatttataaaaatattaggaagatattaggaagatcttgtcgcttgatatagtttgatagtttctctggtttcatttgtggtctctatttgttggttttttttttttgattgttatggcttctagtagtaagcagataagtgagttggaggcacagtatggtgggatcgagatagaagtagaaaaagacgttgttctgtcttatgataatatcgaaaagtagaataaaggcgaaaacgagcaattatatcttgtaattcctaacgtctcgggctatagacttcgatgtgatgaggtatatgatggcctttttatttcatccaattaaaggaatgtatgttaaagagttggagcataatcggtacatattccaattttactatgagttagatcttaaacgtgttattgatagtagcccttggactttcaataagtttcagtttgttttcgatcatctgaaaccaggggttgatcctcgtacagtaatgatcaaccatcttgatatatgggtgcaagttcatcgactccaatttggttttaagtcagatcaagtgcttaaggatctagggaactatatttgatcttttgtcgaaacttatccaaaaaacttttagggtttatggagagattacctacgggttcgtgtgaaagtggatatcacagtgcccctgaaacgtcatatgaaaatcagacgtactggcaacgagtggttctaggaaaatttcaagtacgtatacgttttgactttttattttgtctctggcattataggccattcaaaacgttttttttccgaaagtctttgacatcccattggagttggtcgttatgccgtatgggatatggatgcatgcccaaccttgtcagaaaaatcatcttatcggtgcctagtggttgcgtacaggctccaacgatgaagcttttcttgatgatgctgtccctcttggagtcaagatagctggcatgattggtgtgtctcctattattacggatgttaataataggaatccaagccataaaagcatagctatggatatggtggaaggacatttaagaaaagatttaggttctaatttgttggagggtttaatggactatgatagtggttttgactctggtctaaaatctaaagattataatgactaagatatttatgatatcgatggtcaattatcatatgttttgttcacatgtttttacatgattataggtttaatgtataagttttattaaattttgaacatatacttattcatcattaccgtgatgtcatcacaataaaaagtaattgtgattatatgcttcaaattatttagtcgcacaatttaccagtgcattagatttatactgacgtgataatcaacgatgagatttacttacacatggataagtggaatttcttttccaattaattagtaaagtaaactagcataggatgtattggacatacatcccgctagacacatatttaaagtagaaatgatatcgtaaacttaccgtaatatattttctaagtaaatgttaaaagttgatcttagatcaaagatcttaatcctaacatggttaggttctggcttaaatgtattgcatgtattttttgacttgtttgttacatttgaccagtaggattggcctaatacgtatatcttgagaacatggtaattatggagcgctaatcatatatatagaatttataggttttataaatacttagaagtgaaacaatgatttctttagagctgggctaaacaaatttaaatagttgaagcctcatttcggtaattatattagtttctcgaatatcatttacaagtagctagtattttaaggataaaatacattgaagagtaaaatgataattctatccctactcaatgtaaaccgtctgtagaggatctttaattatttagattgaaataatggatattacatagcgtatctattcttggtgaatagtatgcaatcaagagtgaaatattgaatttatagtagaatcaagatgaattaataagataaataatttatttggtaaattctagaactacttattaggagcttgattatataagtcatggtccccacactacctgagatcatactcccttgaagactcaattaattgattttaattaatcaattaaaatcctaaataagactatgtcttgtttatgagttccactaagcaaaggtaaatttgagaagaaaagaagatttaaggtttatttattaattaaaagactttataaagtataagttactaaatagttaaatggtaattttatttgataatttgtcataattattaaatagataaaattaatatttaaaggtttagaactaaaaaaatagtatttttgaaaaaagataagtcaagacataaaatgacatttttgaaactcattgggcctctataggttcggctatgggatttcaaaaaaacgggcaagtttattttagagaaaattacgtggggagactatttttgaaattaaatactgtat

SEQ ID NO: 299484 - DNA, 887 bp, Cannabis indica
gtttacatctgagacatctacttctggtgactttttcagtgatttttccggtagcttttccgacgacggtaatttttctggcgacactaactttttctgcaccaatgacttttttggcaccggtgactttttcggcaaaactttttattgttttaaaaatatgggattttcatccttttttacaaaaatatggtacaaaaaatctcatataaatgtacaaaaaaaaaaaaacaaaacaaaaacaaaaaaaactatatcctcatggtattatttatttatgtaataaaaaaataaactcttgtaatttttccgattatagtttctacaatttgtaatctagatccagagaagatcaaacatcctaaaaattaagtttagggttttcaattaataaatctcaatccttacaaactttctcacaaaatgtttaaattaatcaattacaaactaataatccgcaattgaaatgatgaaaataaatttggaaaaacgaaatatgccttcaaatgaccaaaaaaaaaatagtggtggaaataaatcattggccaacgaaaacatttaaaaaaaaaaaaaaaaaagaaatacacccgaggaacgaagagagaggatcgtgaagagtgaggcgcagagagagaaagtgacagttgagcgaaatgagtgtgaggttgagataagagtgaaagagatgagagtggtaaagcgagagacatatttgggcttttaccaatcttggtagttctaaatgggtttattgagaatgccttattttgaagggaaacttataaaaatactgttcttttaccaaatgttttcaaaaatactgagacacggtaaactttacatttttactgtccgagtcccatttttatttcttttatactgcccag

SEQ ID NO: 299485 - DNA, 2105 bp, Cannabis indica
gagattaatttttatattttttttcttttttatcttacacacatttaaattatattttcttataagtatttgaacatctatttttagtttatttttggattaacttaagaacatatttaaattatcaagcttttgtaaactaataatgttttttctttagactcacctaaaaactaataatgttttttctttaatttttaattgtattacttttaaataaagaagaaaacacctagcataaaatttagtatacgtgcctcgcatgtagcattttactagtatatatatatatatatatataaatatatacttctcttctttgtggcaataatgctttggcccacctctaatataccttttgtttctcaattactagacctacttccatacttaattcttttttgaatgcaaaaagaatatcactacaacatatgcatctgttacgaattatattgacttcacttcgattctcttccatttatttgggaatttttctaatatataaatatacactatttaagaataaaattataatttattataacaaaatttaaattatttagaataaaaatcatctttaaattatgattagttattattaagtgttgtattgagttagttacaaattcgattagtagttagagtggttggttaggtaattagagtgttatctctcactgaaatcagtgtataaaagcttgttgtattgctttgtttctatataaatgaaattagttttgattcatgctcatctttctctctttctctttctgaaactaaaatggtatatgagccaaccgattattgagctcttccttccgcttatcttcttcttcttcttctttgattcctctacttctccatggctcgaggaggaggaacttagactcgaagtaatagcaacaacggagttgctagaggttcaaatcatttttctactttggatgaaaacaaccagcttcctactaccgatccacgaagtccttactttctattgaatggagataatgcatctgcttcattagttcttaaaattctcactggtgttgagaattatacctcctggcgcaaatcgattatggttactttaatggcgagaaacaagataaagttcattaatggaaagttgattgaacctgatgaagacaatgaggattacgaatcgtggatcagatgcaacagtcttgctatgtcatggatcctcaactatatatctcccaccattgctgatagtatcatgtacatggaagatgcatcacagatttggcccgagttgcagaaaatgtttcatcaaaagaatgctcccagaattttctaagtgaagagaactatgcagactttaactcaaggatctagtgatgttacagcttattacactcgacttaagggactttgggatttgctttaagaatacaagccacaaccggtttgtacctgtggagcaatgaaaataattcaggagtatcaggacgaagacaaggtactcgagttcttgattggactcaatgagttgtatttgaatatctcaaattctgcttcaagatcctcttccaaatgtaaatgaggcctttccttgcaaaattcaagaagagaaacagagaggaatcattatccatcaagttgaaaataatcaatctaccaatgagcattctaatcaatttgctggaaatactcaagggaattgtggtaacaattgatctggacacactatagctaaatgctatgaaatcaatggttatccacctggtcatcacttatatggtagatttcctagagaaatacctaactaatctgctaaccagcaaggaaattccacttccaatttcacagtaggaaatgacaacaatgaaaaccccaatggagagctggatcttgctactcaatgtcaaagattgatgaatatgctagcttagagaatgcaagagacaattccaccagatccacaaactgatcagcctgctgtgtcaaatatttctggtaagaccacatctattcccaattctagttggatcatagatactggtgccacacatcatgttgttgggttttatgccctaaataaaactcatttcaatataatcagatttccttattaataaagatca

SEQ ID NO: 299486 - DNA, 3446 bp, Cannabis indica
ttttcataatgatacttaaatattgttattttcgcatgcaagcccttgcctcgctgcccctcgttgcaccacactcgcaaccgagcctctgcgcatgcgagcccccatctcgtcacatgaagcctcgtgtcgcctcatgtacacacatgcaagctcgcgtgcgagccccttatgggctcgcacgtgagccctcttctagccacttgtagcctcgcatatgcacatgtgcacgctcgcatgcgagcccccatctcgtcgtcttgcacccgcacgcatgtgaccgcactttcatgcattcttgcatgcgagcctccattacatactcccgcacacgaatgttaatcacgaggcaatgctaagatttgctcatgtgtttccgagagctagcaacattgtgggtgacttcgagagttgtatgtcaatagagtagaggagtcagattccccctcattaatccttggttatgaggcgtctaatcctgagagttagtagcgctaatttttgaggttaacaatattgttgttaattttagttcttcagacttttgtttgtatgttttaagtttttagctgcgtggaactattttgtgttgcaacttattttttttttattttttttgtcattgactacaatttgtcaagtgggtgaatgtagggtccagtattttgtgatgacaaattatgtccagttatgtctagagtcttaagttgttatgtctgcagtttattatttagtcattgtacacgtcagcttattttaggtcaagtttgttacaactgtctgttatttggtatttcacctaatacatctaggtatatatatcgtgttcttgattctattgttgctagcacttttttatcatagttgatatcatgttttttctttccactctttcattcttgtgttcttacagattgaagcttgatgctttgttaataaagtttctgaatagggcccatagtcaattagtgtgagctaaaaggacttcagctttatcttcacaagcaaatctgaaggtgtttcgatctagagttttgttaaagtgatttcaatgttgaagaagtaagggaatcttgctgggttttcaagggagttggtatttggggtgatttcattactgtaagtgatttgacaatttgtataaaattggtgtttgtaaatttgcaaatcatataatgagattacttatcctagttcatggaacttaagcaatactcaactagaatttgtttccactgtctagggaaacttataaattgattatgttttttattttagcttcatcaatttatagttataacatttgaatcaaagtgaacagatgaataaagtaataatcgttaattaaacttagtaactaagttaggtctttcactgtctatacaaattgtcagaatattcttattaatgtctatacaatttaaagttttttgcagttaaaccctctcaactatcattctacttgcacataactctctaagctcaagttttgacggtaaaactcttcaaaatactgaactgcttgtaaatttaatgtatcattaacttttttacaattaactgccaatatagactgcttatatacacacttttatacatgtgtcaaatttatagtggtatgcctaatattattattttaaaaatataaaaattattttaaatttataatatttttatttttaaatatttaatttaattttatttaattttaatatgaattttgaaaataatttttaaataataatattagttgtacaatataaatgtgtcatgtatataagagtgtacaaataaacagcttatagtggcagttaatcgaatgacatcttaaatttgctacttgttcagtagtttgaagagttttactgctaatatttatacttggaagatcaaatacaagtgaaacgacagttgggagagtttagccgaaaaaaactctacaatttatcaccttattgaacatcgttgcattcattgcatagtttacgctgaattttttgtgtagttttccactattttttaaatcagaagaactacatggggaagacattttacaatatacatcataacataagaatttctaaatcttattattatgttttctttattattatcttttatggatattattttttgttggtgggcggggcgaaataattggttgatcttgcttttttacttactcgatcggtagacaatagtgaatggtggcttttggggatatgccgatatcaacaaaaaaaatttgttttgtagctacggattcaatcatatgaaaggctgaaggggtggtccttagaaagtggtaattgttggcaatagatgttggatggccaagtggctcctctttctccgttgttggtatcaaatgtatacgtattattcatctttggacacgtgtcattcagcatagtagaggagctttgtgattcttttaagtcacgtttggttagataataaaattgattagaatgaaaagaaaacaattttcattttattattttgtttggttacattttaaagtattggaattattattttagtggaatgactattctattttaaatagaaaggaaagatcattccaatataacaagaaaaaatatttaatggtttttttattaatttttttttaagcattttaaattttattctgtgtttattcttattcctattctcatttctattcctatattttcattcatcctaagtaaacatcacccttattctctcattagtacttttaattatttcaaagtaaactttctttaaaatatttgcataattaaattaaaagcattgtccaataaataaataaataaataaaatcacgacattctaaattgtttataaattttaaagttttttttaaaatttataattttatttgttattatctatataaattaatatttttttttcttttattcaaaaaaaaatattttttctttaatattatatatttaaaataaatttttatgtagaaccttatttgaatttgaaatttttaacctctctcgacaagaatcaatatattatctacacaggttgcaatacttcctctaaccttttattacctaaaagtacacagttttgtatcagaaaaaaaaattaaaattttttttatttaattttgaaaattatatatatatatgatataaatgtattttttgttgaatatattgtgttttcttttgaaagaatatctattactgttggtgatcttctttcaattgggtgagtagcttccatgataaaaataaaataaacaatattacaaaagtagatggattaattgggtgagcttcttttttacttttggattttgatgagattaattgcttttttaaattcagttgattgcccacataatttttccattatttgcatttttcacgtgcacagtatgaatattgtaaagtccttttttggcaagttaggtgaca

SEQ ID NO: 299487 - DNA, 1947 bp, Cannabis indica
ttgtagtttttagttttttttttttttttttttttggatgaattagtttttattcaatattttaaaaatttacaaaatatcttaagaactcatgcaattttccaaaaaaaatatagatattaagaaaaagaaattctttaggatattttattttatgagaaaagaatatgtaatatcatcctaagaggtaggactgaatattgggcatgttgaccgaatttcaagtgaaaaaaaggtgaactcgaacctccctggtcacatgtcgtgggttggcgaatttaggtcagtcaagttgggcaggttaactattttttttagcattactaaattattaaatttaataaattatatgttcttataataaaagaaatgtataatcatataatatataatatatattgtattatgtaattttattttttagaaatagttaatattattacatttgaagtctaaagtgtaaaaatttgtattattattaaagtaatttaggtaagagtaaaaagaaaaaaaaatcgagtttacgagcgagtccaagttcaacccgaaacctgatcacctaaaatatcaaacccaaatttgtctgaaaggtccaccaggttgaacccgacccgcccgaccgaatggtctaccagattggcgggttggttgggtcggggtttatgttcaatcttacttaatagtcactttaaaatagctaaattttaaaattttagcaaaaaagtaataaaagagaggtccaataaatgagctatatattttacaaaaaatttaaagtagggctgcacatttagacccgcgaacccgaaaactccgaccacccgccccaacccgctgccaaaaaaaccaaaaaccaaaaaaacccgtgtggtcgagtcgggttcaacccgaaaatacctccaaacgggtttcgggttcgggtatggttaattgatttttttttggtcgggttgtaacccgtaacccgaaaaaatatatatattttttatttaaaagttaatacttaataatattaattttattttatcatcacattcaaaaaaaagtttgtttattcacggctcacccacgaagccacgaaccaaactagacagaccaagaagagtcaccctcaaaaattcctaaaagtcaagaaagcttcttcttctctaagggcggcgacggcgacggcgacgacgactgctctcttctccggcggggtcgcatcgcaaaggtcgactactcgactcacgggctatgtataccttgttacataagtatctatattaatttatatatataattatataaaagtatatttctcaactatattttatatagagagatgatgtatctaattaaaaaaagatggttttaaatatctaaataaatcatcacctcccccatcaaattcctgtaagacaattctgaccttctccgtctaggagggagtactgaataactacacacccaacccaaaatatgttagaaataaaataaaatagcatttttaaaaatttaatttcatttgagcccataaattaaaataagacctgaacccgaccatgcccaacccgactacacccgactcgatacccgacatacccgaacacccgaaaatcgggttcagttgtgtatttccaaaacccgaaacccgactacccgaaaactcgaaacccgactacctaaaaacccgatccgtgtgcagccctaatttaaagcatgttgtagcttagctacatttaacttatactatttatctttcaaactattattttattgatttatttatctttctatcttttcttttctcattttatttgtatttaatttgaaagtaataaaaatataatttaaatttttggcaaaaatataatattaaatattatagaaaaaaaaaattaatgtttggtgtaatataaaagttaaaagtaaaattaaaaaaataatattttagtgatatatttt

SEQ ID NO: 299488 - DNA, 1161 bp, Cannabis indica
aacatacttgtgagtagatctaagatcctggtaaaataaattccaacaggacatacccgtctaccacttacagtggggaaaactctgacaaccacaactataatggcccaagtcctggtaattgatgttccctctactttcaatgttatgttaggtcatctagctctatatgacttgaaggtaattatctctgtatatcacttatgcttgaaatttacaacaaggaatgtggtaggttgtttgagaggcaattaagaaattgcacgggaatgttacaaccttgctttaactaaggccaaaaaaaagaagaaacatccggttagagtttagaaaagggttaaaaacattgacaaatgagaatctgcccaaggcggggataaagatatggatctcttccttagggaaccaagtgcaaatgttaggccagttgaagaattagaagaagctgagattgatcccactatatcaaccagaaaactcaaaattggcaaatgtttgttacttgaaataaaatcagctctgataaaatttcaaagagcaaatcttaatatttttgcttggtcacatgaagacatggtcgggattgatccaaaaatcatgtctcccgtccttaacattaatcccaactctcgtcgtgaccagcaaataagaaaattgctaggtaaagagcgtgcacaagcgttaaaagaagaggtataaagactttgagtaaataaattaaaaattcaggccttatacccgacataggtagctaaacctgtaccggtacccaagttaaacgagaaatagtgagtgtgcattaattttaatgaccttaacaaggcatgcccaaatgagtatttttcacttccaaagattgaccaactggtagatgctacaccaggctatgaaatcctaattttcatggacgcctactcagggtataatcaaataagaatgcaaccattcgaccaagaatacactagcttccggatagattttggccggtgctgctataaagttatgctatttggactcaaaaatactggggctacctaccaaaggctagtgaacatgatgtttacttgtaatttttcaaaaaggaaaaaaaattagtgtacactaatattaatttaaaataattttaattatttaattaaataacatgaaaataataatatt

SEQ ID NO: 299489 - DNA, 5758 bp, Cannabis indica
ctcacattgagggaaatcacttcaagagtgatactccctttttacatccctccacacacactcactatgatcttggactctctctctctaaactgaatctaaagcatgagcattggagattagagatcagaactctcccctcagacctcttttttgtgaatagagaaacccctatatatagttgctggtgggtcccctttaagttggtattaaacccaactgttataaattgcagcagctttcttcagattcatctgatgagcaaatggatggacatattgacttgagaggttaagtgagtttaatcccaactaaagggtttatggtggtcatgaagcgggaatacatgaatggtttgtattttcttaaaggtgaaattgttgttggtaatgcaaaaatagttgcatctgtgaagagttctaatgagactaagctgtggcacctaagacttgagcataccagtgacagagggttcaaagagctagagaaataaggtattctagagggtaagctggatgggaatctagacttctgtgaagaatgtgtgtatgggaagagtcgcagactgaacagtaaaggaagacacacaactaaagagccttttggatacattcattcaaatctatgcgaaacaacaatgatatccaatataggtggtgctaattattttttgaagtataattgatggctaatcaataaaagtttgggttcactttttaaaatcaaaagatgaggtattcaagacttttattgaatggaagaaattggttgaaaatcaaacagggaaaaaaattaagaaacttagaacatacaatggtctagagtactattctaaccaattcaaaaactattgcaagcgaaatgatcttgagagacacaaatcaacaccttaaaccttcaacaaaatagtttagctgagaggatgaatataatcattctggagagagtaaaatgcatgctaaaaggtgctagttttgaaagaaagttttggagagaagcttttaaaacaacttgctaacttaataaacaacttgattgaatacctctattttttttttcaattagttattattttttttagttgattgaatttatataaatatgtaaaaacttagttttttttttttttcatacacacacatttgattgtttttactaatcattttaatttttttatttcataattatttttaatatatattttaattagtgtatgtataatgtaccatttaattgagtatataattagaaaatgataagttttattagttttaaatttcattcataattaagaaattaattttttaaaaatatataatttaaaaattaaaattagtaatttgtccaaattaatcattttatctaaatacttatataaaaaaaattcaatcactaacattattatatagtccctcattttttagttttcaaaagcaaaaactattgtgtgatcccttttataataattattctacattcatatatggagaaaatatttaacttttatttgcacgccttatttattaaacttagaaacgtttattattttaatttattttattataaagacataattttatttaatttcataatttcaccacattcctacctatttaaaaatagtaaataatgtttccaatttaaaaaattttactttattaatgatacacacatcaaaatattacattttaaattatatcccttaatccataaaaaatatatattaaaagtaaggtccaaggcagcttagttcctagttttattccaataagaatcttctcttatttggtcttcatgttgtatctccatgccattgatggttgacacttcaacttttcctataaacatgaaaaaaattacactaatcaaatctttaatcggtttaatggccatgaagtactacatatatgcataatcattttccaaagaaagacaaagaatatatactaaccatttagtggaagtagtcatcttcttaatcttgaaattctaatactaatcatcacgtaaagattatcagctagctcactgaagcatcgaaaataagaaaatccccaataagaaccgagaatcaaaaccacacaaatttcaagaaaaccaagcccaaatccaactccaattcccatgtgaaaccatgccatgtcataccattcttcatcactttcaatgtagccttctttgtcgatcaaattcggatcaagatctttgaagatcacctctcccggacatcttggcgaaagaggaggaccacaaagtccaagattttcaacataccatgaaataggaaagctttgtaattgagtgcttgtagggattcttcctaacaattgattgtaggagatgtccatgtatgctagagttgagatttcggccaaactcattggaatttgtccacaaagattgttgtgagacaaatctaatgattctagtttactcaagttcccaatttgattagggatagctccactcaaattattccttgacaagtttagttgaattagttccacaagatttgttaattcttttggaatatctccaaccaatctattacttgaaaaatcgatgattcttaataactcaagaagttctttatatttatattctcttcctttccaccatatcatagcattatcttgataaatttcaaatgtgttctcatcttgaccatagtaatgatcgaaaattattgcaggttccaataaatattgtatctcaaccaataaagtaaaattgttaatgcatgatggaacatttccagataaataattttgggagagatctaaaatttgaatgtatttcaaatgacatagacttgttggtattgctccatggaatttgtttgcttttagtacaagaatcttcaaatttgtcagtgattccccaatccatgttggtatatttccttctaacttgttctctccaacatcaagatattgtagttgagtacaacttttcaaggatggaagatctccccaaagattattattccttaagctcaatgttttaatcttatacattgataccattgaagtagggattggaccaaacaatttgttgttgtctaatttgagaacttccaaattatttagactaagccaacaatcaggaatatttccaaataacaaattgttagaaaggtcaagaatgattaattttgccatatcaagtctagtagtagtgcaaaagaaaggcccaaattctgtgaggaagttattggaaagatccaagtattttgcatttaaaagagaatttgggatagaaccatgaatattgttggagctcaagtcaatgaatgaagaatgcttggatctcaatgaaacatttggcaatgttccattaatgaggttgaaagatagatctaagtactctaatccagaagatattttaggaaaccaactagggatgacattagaaattccagaactagataaattaagaaaagaaatattcatctgagtttggagccaagaagggaattgaggacctaacttgcaagatcctaagttaatatattgtaattgaaaagatggagcccaatttggtgagaaattcaatgaaagagaggtagaagataagtcaattttcaacaatttggaaagtttgcccaagtgtttattagatatatctccaacaaatgaattcatggaaatatccaagatttcaagactagaaagctccccaacactttttggtaaattcccacttaatttgttgtaagacaaatctaattctctcaaggatgatagtttgatgagattatgaggcaatgatccttctagttggttagaacttagatccaaaacctctagagaatccttattaccacaatttttgtggctttgtaagaaatcaatcagctgtgtcccattcaatccattttccctcaaaattatttgttggatgttgcaaagattgcctaaatattttagtatttcaccttcaaaaccataaagtctattctctgacacatcaatatgtgtaagaaattttagattttcaaatgaatttgggagaaaatgtagaggtgattgagattgctttagggtgaaatcaacaagattattgctcaaattaagcaacttagagaaagttttaggctgcactgaataacaagcctcaactagaatttttgtaagagaattggaagaattaatatgagaaagagaatgagcaatatctaatataggaaagtaacaaaagttaaactccaatatagataaggaaggagctgctttaaaggattgaaaccaatccatggctttggagaattttgtgccacctagtctaagaagccttagattaggaagattagaaagccaatgaaaattgtcaacaatcaaaccaattgtaagactattaagatcaagaaaactcaatttggtaagattcccaagttgtgaaggaatatttccaacagtaggatttcctgaaagattgagatatttgagtcttgtaatggcacctatgaacttggggattgtaacaaagtcattgttactaagatccaagtgctctaaatgttgaagatcaaccaaagaggatccaatttgaccacttataggataccccattaaaccaagatgatgaaagtaattataatcgaaatgaagatcaagtttgataatatgattagttaagttattgcacctgattcctctccatgcacaacaatctttgcttttgtttttccaagaccataagaggtttccatcatcaacaaggccttctttgaaattgagaagagcatttctctccctttctatgcactttgcttgggaattttcactactcaataaatgagtagcagctagtaagaaaaataaccctgcaactttcatatttaaaaatacacaaaagtacatagtgagaggataaatatattactgagttagttggctgcctatatatatactaaaagaatttctttgttagggaaaaactggcattgttattggggccaagtgatctactactactattgttattatttttattttaagacagtctattaataattgttattttcaaaagtaaaatggcggtggaaattggttgagctagtatggtagtaatgcattaatgaatgaaaaaagaaaaagaccattgacttagtcggctagtggggtagactctaaatttaatttcttcaactaaatagaactctaataccaacccctacaccaagttctaattagtccaacttaaacagtgacacatggaaaaacttttgtccaatggcgtgcttcttttagtttggtcgggattcagtcttggttgtattaattaggcatgagtggtgttagagtttcttacacattgtagggatattataacagttattaaataaaagtaggaaaatttgcctagtatactaatttttgttatttttttataaaaatacagtgaggtggtattttttatttttttactatatatttttataagtttcatactgcagtatactgtgtttattttttagtcttttttggtttattttagtgttgttttagtgttgttttactgttgtttttcataatttattttttaacgtcgatttcactgttcttgctccaccttgttggaattaatgattattttctggattctctcgtggtgctatggtggttttatccgtggatgtgaaagatgaaggctataaaatatagtttttcttcattctctatggttattttgtggttattattttttttattttagttatcctaaaaatacagttaatgagttcactagaaaaaaa

SEQ ID NO: 299490 - DNA, 5896 bp, Cannabis indica
aaaaaaaaaagtgtcaaaaatattgtgaaaaagagataaaataaaataatatatttttaagtgatgtgaaaatttttgatactcttaaagaataccaccattggagatactcttaggtcttcaaattgcttgtttgtttaacttgaattttacttacctctttgttgttgatcctggttgtcaacctttgcgtactaagttgtttgtccttttttacttgcaaatcaaatggctagcagaatcctttcccaaatcatatataaactagcagtgactaccatcctagaggcctcagtggtagatgttatagtggccatggagaatcctttcataatcaaccccccctattttcccgtaggcgcctccaatagtcctggccaaggcttccacacctcagagtccaagtatgcccactcctttagacgaacaactagaagtggagagtaattcaagaaacttccctgtagatctccctgcgacttgaataagaacaagagttagcaggaagagaatcaactaaacaatggggatgatacttccggtggagtaattagggggacttgccacagaagaacccccaattgaatagtctgaagatgccactccctctaaaatcccaattaccccggctcaccttagcaagtctcaagcagaaaagcatgttagacggttcaaatttttggtggaccgagtcaaaaaaaggagggacatcatttgagaaggttaataagctaaaataaatttgggccaagaatcctataagaacacttgaggcttcccttgttgtgacagtcactcccaccctcattaacttcgtccaagactatacaggccaagtggctgtgccattatgcttcgagatgatctcggatatgttactttcttggctagacttctcgtttctagtatcattatttatcctactcaagatccaattttcctagctcaatgcctttgttttctcgatactgcattctagatttttctctttccccttattcttaccattacactttgctcttacatgttgctgctatggttggtcgtcaccaagatagtagtatgtgtgtatgtgtatacgtagagtttcaccaagatactaatatctagcatgttatgcagtattgaatagtatagatcaatgctaccaacattggtatgactagaattcttaagttaggttggcattatggttaatcatactatgaatgtacgaatatttggatctcagtttatgcactaaattcaattaattgatttatagtaactaagtgtatgggcgcttagttacatgtcaattatttatgttattatgtgtttacgcttttcttgttgcatgtcaactcacagttatttcgcaatgtgtaagttaaagccaacgaaagctgagtaggagtgagtggaggacttcgatgaagattgtacatatttagttgccttaatttggaggattgagatcaataggagatcagttggcgaaacttttggtttgtcatatagatgtatcttttggaattaatataatatgtatgtattttataactaaataacgggatcccaaattgtaaatgtttaacgaagtttatttttaagtaaagttttaaaatgaattttatttataatcacactttttattttaaaatcatttgattagcaaaggttaacataataattagaaatcacgtaacgtgcctcaaatattagggtgttacataacatcttcgtgaatggatctgccaggttctgttccaacgatatcttaaagactgtcacatcacctttttccacaatatctctgagcagatgatatttcctctcaatgtgcttgcctctcctatggtatctttatctttagaattagctactgctccattgttgtcacagtataaaactagtggattctctatttcttgagctacttacaaatcagtgtagagttttttcaactaaactgcttctttagctacctcacaagctgctatatattcggcttccatatgatcgaatctgcaatactggatttcttaatgcttctccagattacagttccaccactaagagtgaatactgacccaaacgccgatttctaactatctttatttaattgaaaatcaaaatcagtatattcattagggttcaacgcccaacctgaataaacaagcataagatctctcgttctccggagatacttaacaatgtgctttataactattcagtgtttcaaaactagatttgattaatactgactaaccattctcattgcatagtatatgtcgggctttgtacacaacattgcatacataagactcctaactattgatgcataggtgtactttctcatatcctcctgctcttgaggtgtcttagaacattgttccttacacagagtaattgcttggttggacggtaatcttttcttggatttttcatcgagaatccttccagcaccttattaatgtaagttgcttgagaaagtgctaatgttttgttctttctatctcgaatgatacgaatccccaacatagttggcttctcccaaattcttcagttggaacttttcaaccaaccacttcattatgttgggcgatgggcgatcttaatttatttataaaaaaaatatttaaaatttaatttgacatgatagttgtgacaatttgatatgactgtttattagaagttaaaccccaaaagaaactgaccctctctctcactcttctctttttcttttgatctggttacccctccaaccatagttataaatacgtgtgtgttgtgctattccgacccatatttttgaacttttaaaattaccgatcatgtcgtcctaggccataaaaaaatataagtcgtgtcatgctatgtcataaaaaaatatagatcatgttgtgtcgtgtaataattttataaggtaggcacgccacgacccgtaagtccaataattttatgtcgtgttcaaattcgtgtcgtgctttattcaaaccggcctatttttctaaatagactaacaagctttttcatacgaactcaaatttcatatttttgcatttttgttactatttataaactaaatactaaaatacatgcgtattttattatttaaattacttttacatattttgttaataataatcacacgcaatcatataataaaataattataattattataatttttttaaggtataattattagaatttgaattattattttaattgataaataaatatttatcatgttattattatcaaattattgggtttgtcaatgtgtcatgctttcgagttaattcgtgcttacgtgtcgtgcttttgaatttatcgtgctatgtcgtgtctaagcccatattttttatatcgtgtcttacctaaatacatttttttgcagatcgtgcttgtatctctcaaactcatgtcagttttgtactatgtcaaaaaatccaactcatatttacagcactatctccaaccatcacagggttattagaaaaaactacaatccctctctatcgattacttgaaagatttaaccaacgccgaaagaaatagattttcttggtgcatttgttccattaaagtccctttctcatgttgggttagattggattggcaggtttggactatttatgcccagcgctctccctactcccacctagaaatgtccagttaaactattacgagttttttttttttttctcgccaattagttcgaacctgcaacatacatgtgaaatttaactcaaacaccactaagctacaaaaaattaagagcgaaattaaaataagtattctggctttcacccaaatcaggagcaggcttcgaccttaatacttctctaccattatttcgttatgttattcattacaatgccatccaataaaatattatatgtttttccgaatccttgtaactagctcataccctatttcctacaataaaattacccttttctggaaaaggaaaaataaaatctaccaaatatatttcaaacctttacggggaggaaactgggttcagttaccagcacagtagtgcaaatatggcctttataatctccagaggttgatgtttaccattcgaagcctgagactgaggacgaacaaagtctactatgtttgtttcaagaatgctacagaataatagaagttagaaagttagaactgtcaccagacgtccctaagatatcgcccatccatctgtagtttcttcactagagactcggcctttgatgagtccacacattcctgaaatcataacaaaaagtttttgatatcattctttctcacaatggtagatttacagcgatactgggtaaaaaattaaaaattatcaactaaaatgctcaaaattaaatactagccaaaagttatcattttcggacaaataccagcctaaaagtaacttcgtttctaatttagtcatttaatgacactcaatgctcttaagtaacagattatttaacagtaaataatcgttggtaattgtcattaaatgcatgacgatgtgaacactacatcaatcgtcatggagatatttagattagccccatgaatgaataagaataagaacattgcagcatatgctatcgtaaagcaatgtctgtcattattgttagtcgcggatcaccggatcactgatatataagaattgtacatcgatgatgaaaaggttctagctattacttacgggtaattattatatgaatatttgtcttatacattggatatatatgtgtattatactattatataagtgatgaaagagtgactatttatacagtgacttacaatgatgtgcaccaaaacattacacacaatgacataacagtttggttcaactaatcatatttggttcgtatgaaacccactattttaagcagtgtcactgtaatttttagtccacaattttaatgcacatattattcttgatgaaatatggcagagacagaattatcacctgttcttgtaccatggtatgcaaagttcgatgaacatctctagccatgcctttggcgtcaccacatacatagaggtatcccccttgcgaaatcaagctccaaacttgagatgcctgatcatgaagcttaattaaatgcatgttaaaattgtgtgaacctcgtgaacagtagccactgtttttcagatgctaatacttactttatcaatgatcttatgttgtacatactccttttgtggcccttctcgtgagaatgcaacaatcaactctgacattgcaccttgttctacaaaattgttcaactcatcctcgtagataaaatcctacaaaagcaaagacaaattggaaaacaaaaggcgtacgagtacgatgctttcaaaagatataaacaacccaagaaccagagttactaccattctacgatttctacatccaaaaaatagaagtgcaggaccaagttgagcaccttcccctttaagagccagcctttcctgaagaatgataagaagaatactgaaactactctcttcctcgtatatgtgtacaaagaaaatataaggaattgaagtaatttcaaacctgcagaaatcctctgaatggtgctaaaccagttccaggtcccaccatgataatcgggattgaaggatcgtcaggtaacttgaaattagattgcctaataaaaataggagcccagctacatttttgactcttctcgagaggcactgcattctgagttaatccaaagaatgatgggtttagatgcctaaattgtctaatatgagatcctaccatgttttttgcattctacaaagcaaaactttttttaaggacaaacagattattttgacaccataactaaaaaactgttttatgaacaaaaatacaggtgtttggcattgtttttagaaaataatttttaaaaataaagttacaaaaaacaga

SEQ ID NO: 299491 - DNA, 658 bp, Cannabis indica
agtaaatggatatttaggtgtaagttgtgggagaaaatattaaaaatttggcattttctaagtgattttcggatgagaaataaacaattaatcgaatttttctcctctttttattttctactcagaaggacacttggcgcgttgctattggaggggaggttgacggtctcgttgcgtggcgcgggcgaatggtgctgattgttgactgggcgctcacgtggcagaaggaaaggctctaggcgggtcccacagatgctgacatgcggcaaaaaaagttggagctcactctcggctatctagggtgaagcacatgctccaagttgagtcgttggatgagaacatggacggttcgaattgagtccaacgtctaactgagattggggttcttttgggctgttatgatttttttttgtaaaattgcattcttgaccccatttcttcaagctctcttcattttagtcccatattttgctccaacaacacacctaaaaataaagataataaattagaaaattaatataatattataaataaatcacacataacaaattataacaaaataattataaaaacacataacaaactaaaaaaataaaataaagctaataaattcaaaaataattaaaaaaaactcactaaattaattaaaaacttaaga

SEQ ID NO: 299492 - DNA, 2349 bp, Cannabis indica
tgctgatttatttcggctcattgagctagggatattgagatacaagtttccatcatgcgcaatacccatgcccagcaatgcaacaagtctttccttaaaatccacactggtattggagctaaaaaagatggatgacttagtgagattaacctttttccccgatgctaattaaaacttgcgaagaacttcttgaacccgaaccgcttcctcatgagtagctttacaatacaaatagctgtcatcagcgaagacaatgtgggctattctaggggcaccgtcggccactttacacccatgaggccaacctcgttgttcatatttcctaagcagcgctaagagaccctccacacataagataaagagatatggagacaaaggatttccttgacgaatacctctagtaggaacgataggaccggtctcatggctcccatggataacttggtacttggccgatgtcacacatttgaggatgaaccgggtccaatgattagtaaaaccatgctttctcaacatagcttcaagaaacctccactcaatgcagtcataagctttactcatatcaagcttgagggccatgtaaccatctttacctttccttttcctattcaaatagtggagaattttgaacgaaaccaaaatattgtccaagattagtcttcccagaataaaagcactttaatttgcagaaataaaagaatccatgaaaggcttcattctgttgaccataactttagtaatgattttatacagaacattacataaagctataggtcgaagatcagacatatgctctggagttttcttttttgggattaagatcacattagcatcacgacatccattctcaaatgagccgctctcaaagaactttctgacactactaataacatcctgacccacaatattccaacatttttgataaaaagtcagggtcataccatccggccccgaactcttatcatggtgcatttgtaaaaaaggcctttctaatttcatcatcaagtattggcaagcataattcctcattaccaaaaccagacacaattgtatcaacacaatccacgatctcatcacaggatacaccagtagaagtaaacagctaatggaagtagttatacacttccttagaagacccaaatcccacgagacccaaaggccatgctcattctaaagttgcacaagttggttattacgtttcctaacactagatgcctgtgggaaaagctactattgaaatcaccttcttttaaccattgttgctttgcacattgtttccaataacattcctggtgatccagagactcaaacaacttctttttaatctcttggtaccattgcacagagacactatcacgcttagtttggagtgatttcagatcagccttgtaacatttgatatgatggttcaacgttccggttatctttttactccaacgagaatttatcatcacaaggattaagcgtattgcccatgtctaacaaatggttattatcctagcaatccttgacaatttcaaaacatagagggtccttcaatcaaacattttcagataaaaaacagcggctagaggcaaaattatacaacactttcggttcaaggaaaatgggtgagtgatcagaaggtgaaaactccaaattagttggggatgcatttagaaacacctggttccaagtagctaacaccagagccatgtctagacgaacctcaatccaagtgctcgagcctctacctttctcccaagtgaacggatgaccttgaagctcaagatcaaataagccacattatcgtagtgtgtcattgaagccgtttatcaaccactggggataaggtctacccccacatttatcttctgtgtgaattgtattattaatatctctaataacacagaaagggaggtccgatttgctggttagtgagtggagaaaattccaagtattctgtcaccaattccggtctagttcaccataaagcccagttaatgtataatctcttgaatgagaagaagagatagcaaatcaatatgattatttgagaaacccaacaacgaaccttcatatttacttttccaaaggaccgcgagcccaccagcaagcccaatagcttccactacaaaaacacccccaaaattgaagagacaggccagaccatctattgacctcgcttttagccaacgacagtgagtctaatttagtaagtgattagtagtttatagtgattgatatatagtaaggcaatgtaaagacacaagaattttatagaggttcagccccgagcagttcggtaatagtctaatcttcattatttgtataaactcaagaacaaggagaaaggttccttttcttata

SEQ ID NO: 299493 - DNA, 4426 bp, Cannabis indica
ctttaaaaggattaaaatgcaaaatgaaaataaattaagggttacaaagtaatagtaacaataataataaaaaaattaataataatcatgattataataataataaaaagaatgatagcttttgatttctcagctatggttccactctaatcattatatattattattattattattattattattattattattatgtttggtttttttttttttgtaataaaataagacctgtaacaaagagagaaaaaataaaggggacaagttataaggtctagagagagagagaggaacacaattgttccactgacactctttataagttcctaatgcagcctgggccaagttgtgagcaagcttgttcttttcccttggaatgtggtgcactaagacataaggaaagagggataaggagtctttaatctttctgaccaagttagacaaacccgagcgatctgtagcaatcttatttatcttggaagtgagaatttgacagtcattaaccaccagcctgatagggaaatggactgcctagcaccaaagaagagcacggtgaagtgccacggcttcagcaaaaacaggaagcagatcagagatagatgaggaatgaaaaccagcaataaccctgtcatccgcatctttaacaacagccccataaccatgaatggtatcctgacttcttacagcagcatccacactcagtttgtaaaaaccaggctatgggagaaaacttccatcgatcaaactgctatccgagtgcccttggaaattgttgtggggttggggaaggaattttgcttgagcttccttataatcctgcaagaaagaaatagtgacatgctctatctccttgtagttagcgttctcattttgaaaaagagacttgtttcgatgattccaaatagcccataaataccaaataaagtagtcaagttatccttgttaaaagtttcatacccacgcaaaagaaattctttaatgtcacaatgtttattagtaaagtaaaaggaggagaaagaagtgtgcttccaatacttactagctctggaacactctaagagggaatgtgagtttgagtcaacacggctgaagtagaaaggacagtggggatcctagagaattttcctggaaaagaggttaagcttggagggaagaaagtggtgaaaagctttccaaatgaaatgcttaatttttggagggatatttaaggaccaacccgatttccaccacttcttaaaaatgtcaacatttgaataactggggcttgagtgggttgtgtcagcaaggtggtaggcagagctgacagtgacagaacctgaaggatcatgcccctaaatgaggcagtccttagagctggtgttaataggaacactaaggataagcttaacaaagtcattgtcaaaataggtagtaattttctgaacatcccaaaaaccctcctcagtaataaaataggaaactgaaacattaggaggggtgagattactcttcaagaaaatagagttacttcctagaatcctattaggactagtgatgtgaatagatttgacattcccaatcttccaaattaaacctttaaggagaaaatctcttccccaaaggagacttcgccaagaaaaggaaggaagatgaccagttttggctttaaggaagttgttatttttgaaatatttggttttgaggagggaagcaacaagggagtccgaatttgtaaaaatacgccgagcttgtttagctaacatagcttagttatgaagaataatatctcgaaaaccaagacccccataaaatttagacttacaaagggaagaccattttttccagtgtattttgtgttgattttgacccaaagaaccccaccaaaagtcagccatcaatttccccagccgtctacaagttgagatagggattttatagcaagacatggcatatgaaggaatggcttggataatagccttgagtaaggtttctttaccggctttagagaaaagcttttggttccagaccaagagtttattgcagggttttttggtggatgtaatgaaaggaaaaaaatttagaacgagaaaaacattgggggacaaccaaatatttgtcaataaagggtttatcctccatttgaagagaatgaaggaatgaggttttgtcaacaagggtggtgttaagggagaagaggacggaagatttggcaaggttgacagactaacatgtggccttattatagacagtaagaatgtcctgtatggttcgactatgttggttattgacatgggtgaagagcagactattgtttgcaaataaaagatgagaaataggaggggcagcacgacaaatggatatacccttgaagaggttggcatgagttgtggaagtaatgagaccagacagcccttcaccaacaaggaggaacaagtagggagagagggggtcaccttgccttattcccctggaaggaataatgagagaagagagactattgttaatacaaagtttgaaagaaacagttgaaacacggttaataatgagagagacaattttagcaggaaagccaaagtgagagagaatttggtggatatagttccattccaccttatcaaaagctttctccatatccagtttcaaagcagaccagcccactttacctttctttctagtggtgatggcattaatgatctcattggcaatgataatgttatcatgaataaattgattgctaagaaaggccccttgattgtgggaaatgagatcagtgagaacaaccttcagtctgttagttagggatttaacaacaactttataaatggtcgagcaaagactaataggtctaaaatctcgagctttagaagcttgagttttctttagaataagtacaacaaaagttttgttgatcgaagtcaaatcaacgtcgtggttcaaaacatcaagaacagcgtggcaaaggtcagtaccaaccgtggaccaatttttttggtaaaagaggggattaatgccatcgggtctaggaaccatatcactagataattgaaaaagagcactcttgacttccaaaaaggtgaaagggctgtcaaggaaactgaattggtcgcggttgatatgttttgaaatgcccctgaggaccatgttgatgaaatcaacattggtgccattagaggtaaagagagtggaataaaactggacaaagttgttggtaatgtcagtgaggttatggacaatggaattatcatcaagagtgagactatgaatgatattattttgtttccttgtggaggctttattatggaagtacttagtgttctatcacccgctttgagccagttaaccctaactttttacttccagaaaacttcctctttaaacaaaatggcatcaagagaggattgaagagagtggatatgatcggagtcacacctggaaatagagggcttggaaagaacactattgatagccgattgaatattatttatttggaacttgatactttgtttggtttttgaccaggttttcatggagttgatatagttattttgcttacaaaaaaataaatgaaaagtagtggaagaggtattagaagattggttagaggtccaactttcatttatgagcttgaaaaaatcaggttccaaaagccagtggttttcaaagaaaaacgacggctattcttgtgagttatgatatgaaagtggtatatcagtataatagcacggtgatccgaaccataaaagggaagatgaacaatgctagctgtgggatagagattggaccaatactgattaataataccctaatcaagccgtttaagaagatcgccatgcctccaagtgaaacggttgccagtaaatggtaaaggtgacaaattgtgtttgccaagaaaatgctgaaaattatgcatggcgtgggaggggtaagctggtgcttttacgatcattataacgtaaataatcattgaaatcacctaagataatccaaggggagaggggactagaatcaaaaagacgatccattaaaatccaagagtgatttttatcattaacatatggagaaccatagacataagaaagatgataattaatatgggagttaacatgcaccatacagtcaatatgattagaggaatacgacaaaatattaatatttacaatatcattccacaaaagtaataaaccacccctaaaccttgcctatgaacctcaaaaaccttatcaaaaaacaaattagctctaagagaagaaccagaattggccgccagctatatttcgatcacaaaaagaacatgagattgatgttgcttgaccaaaaggaagaggttttggaatgctcgggaactccctaatccagaagcattccaactagggatgcacattttccccatggggatgggccccgcggggacctgcccctaatggggcagggattctccgtctaaatg

SEQ ID NO: 299494 - DNA, 5650 bp, Cannabis indica
ttatttaatattagttttttgttattgtattttgtattttctaatatgttagtattttaaattaatcattaatttaataaattttaatttgatgactcaaatgtaagattaattttaaaataaattaaaataaggactaaaatttaccaaattagtgtagactcaaaattgtacactattaatgatgtaaaatttggtgcacactaatttagtgcataatttaatgtgtcaatgaagtaaattaatgtgaaaattctacactaatttaatgaaatgatacaccactagagatactctaaccaacaagaacacaagaaaaataatatttgttttctgatattcccatgaaatttgtataacctaacttgagggttttcatttcatatattattatattcctaatcatctccacaggaaaattatacttgtacctaaatttgtaagagtaaaactagtttgatcgtttatttaaatgaaacaaagatacttaatatagtaatgagaaatgacattgacatgtcttaaaatttctcagtattattagaagaagaggaacgtgtgtacttacgacaagtggaatgaagcatctctataaaatagtactagctttgtaactcaaacttccacaatcttggacaactcttcacgtgtcccaaatagtgtttggaagcatgtaatttaattttggcattttgtgtctattggtttttggctaagatatagtttgtaaaagccatataatgagacaaatagtcaataaatgcctcagctctggcatcactggttacttacttgtgaatggtaactcagtctagttaaacaccggtttaacttcaaaaacaaaaatggtaataatatgaaactctcttcaagatttgaaattgtataattaaaaagaaaagtgaagtaaaacaaccccacttcttacaatatagtagtagtagtagcagtatttagccaaccttaattaaccgtctaagatgagatttagtcctacaaattacaaatccagatcagtcattaatagtagttaagaggtcctccattgcagttcaatttgtatctttccattcttggaatcaatgagatggtacttctcattaattcttctgttgctaaccacatcagctagttttatatccacataccccagaacttcctgtttgaaaaaaagaaagaaaagtatagaaactaataagagggcttcacattatcataaaatacagatagaacaaattgtatttatttaccttgggatggagcaaacccattcttgaagaaacactaacaacttcaacatgaagcttatcattggtaggaggttcatccagtggaaactgaaactcttcatcccatcttggatcccggttcttcttcacatactacattataattattattattattattattgttataaaacatgaaactcagttcaaaacaatacttagttccacatttgagctttcataaatatatgacaagtaacaagtaacaacatacataccttagtttttctttcctctcctctgaaaagcaatctggcatatggattggtgtggtactttccttcaacatcttcagcttcatgaactataattacaagtaaaccaccacctgcaggtgttccttcaggtgccttttgtacatcatttgaatcttcaacattatcaggcatttcatcttccttgaaaggtttgtatgtcatctccaaaacaatctgcccacgaaacttgtcgttctgagcatcatcttcgttcatgtttttaagtagatccaatgtgagaaccttagactcatccggcgtgaggtctttcaatggaacggtattcaaacccatcttatcatgcttcccaaccttagaattaaaaacacaaaaacatcacttgaaaaacaaccagtattgctagcattccacatatccaaacaatgcaaacaagaaaaaactcaaacaaataatttacctgttcccagtcataaaccattatctctaatgcttgagtttgggggtctttgataaccatgttaaattcctcgttccattcgggactcaaagatttgtgcttcaccgtagttttctttccaggaagcacatcctcagttaacttaagtttaacataaggatctgctccccccaaaaagtctttctttttaagtttcaaggctctcacaacttttacattcagaattccaacaggtctccttgcagctctgccaaaattaagcaatgccatcaaattataggaataggtctaaggtatggatgaaattttatgatttaatcagggggtgaaaaagaaaaaaaaatctaacttcgttggatccataatttgcacttctagagctttgggccatagatacatttttgcaacttgatctttaatcatctcctgagaaaaaccaaaaaaattaatagaagaaaacagtgtcaaaaagcaaaatgaagcacctctgaataataaactaagcacaaagcaatgaaaaagagaagtaaaaaactgcaaggaatattcatttagttattatattaggagaaatatgtattctcagataattatgtttgtctatattagatggatgcatgttcaactaagtctaagcctctacctggacaaacccatagaggccaggaatggacatagcatctgcaccaagtacttttaatccaaagtcaacatgtggctgcaaaaaacattggaaacaatattgaatgaaggattccaagagaaataagaagacaagacaggaaaaagagtggcattctattaaaaaaaagtgccatcaaattgtagaacttgataagaaaatttaccaagaagaaacagcaccattcttataactctaccaagtaaacaaatgcccttttgccccaaaattaccttaacagaggaccggagatttttgacaaacatgacacgattacacgattcaaaaatgacacacaatttataggtttgggttaaatgtttaataattgtgtcgtgtttgagtttatgttttcaacatgttaaattaatcgtattgtatttgttgtttaccttaatagtattgtgtcataattgtgttgccatgataacacataagcttcttaaagttttacatacttatgtttaatcgtgtcaatttaacatattaatcgtatcataattgtgttatcgtgtgacatgctaagataattgcatcgtattcaagtttaatatttggacacgttcaataattgtgttatgttagtgtttactttcatcatgttgtgtcataatcatgtcaatacgacacaataatacgaatcgccaattctaccttaacattagcagtaaagatatatagatccgtaccttctccataagggaaacaagtattttcgcaaaacaaggaaattgtggaaccaaaggcttcagggtaacacgtggaagagcaaatacttgcagatcaacaacctagagcattgagaagaatcggtaattcagtactctaaaatgttgaatccagagctacatatggttgatcatagttaataagagaatttttttcaattccaaacaaatacctgaactgtggctctcaaaccaaatgctttaacagcaaccatgatgttaggatttccagcccatcttaatgctggttccattatcaactccttttcatcagttacatacactttcattcctgatatataaggagaccaagaatgagcagtgccacaatcagcaatataaaattaaaaacactggaaagtacagaaatcttattgtgtaagtgtaactgtgtctaccaaaaaacaccacaaacaacaaaagatatataatgaaccagcagggcccaaaataggctccaaagtatgccacatacagctccacttgactctagcttaagtagttaggtgtgtaccttagcaggtaatttcaaagaaattggttaactacaaattgaagaaagcatcattactcatatatggaagaaatcttttaaatgctgtttttgacaacatttagtttgaaacaccaagtgtaaactccatctattagtatgttgctatcagaactttgataaataaatgcaaatgaaccaagaaccaatggaggtctgatacaaccacttgggtagaactacttccaaaagctagtctaagagaggagggtggtgcccaagtagttatataccactagccaatcccattctcatacttggtctacatgggatcctaacaatacaccctcttttggagccaacattcacggcagtccactctacggtggcctaatttgggcctaatccacaggttgccccttttgtgacgtcaatcctacttgagagtgcatggttcttataccacttgatacaaccataactatttgggcaccttccttctcgaggctaacttttgggagtgagttccacccaagtggttgtatcaaggtcacccattatctattcacaactcagctaatgaacttctagtgataaactatcttttggttcattggtgtctatgagtcagtgctagaagtgtggaatctaaccttgaaatgtaggtggtagggagcccaaggtaagtgcctcgaattcaacagaatcaattttgtattttggaatctgttcttcaataatgggcttggctatagtctgtgcggttttgcagatggcctgaaacacataatatagggagaaaacaacaaaaagaataaaaggtctatcaatactccaaaacaacaatgaaacctatacttcatataccttgtccagataaggccacatgatttcaataaacctgttcagccagtcaaccttcacataaacaagcaaattagaaccttaacatatgagagtgggaacttaagcattttcgtatatcatcaaacatactcgatcataatcaggcattttgacccaaagtggtatcaatgaaagtaacccttgaaaagttttggaatcttgctcccccagaggctgaataacaggatcctggacacatatataacaataaacataagcaaaaatctaacaaacctacaaccaatagtagacagcataagttctacgaatttgtaaaatttgatcaagtaaatgatattaaggggaagagacaatagtaaaccatgaagtgaactttatgttaagctataatagaacctatgaattcaatttgattaatcaatagtaccatccaaaatgaccgtaaaaaatagcaagaaatggacaaatatcctaaagggtcttcttgaacaagcttaataaacactcttagcttcttgtttccattattgacactgccactgcgacacatcaccaaattcgaaaagtattctagtacaagtacataaatggcctaattgaaacaaactaaaaaagaaactatgaactcaagatgataacctaaagtaccaaccaaatgactgtaaatacaagcaatggacaaacaacctaaagggtcttcttcttcaacaagcttaacaaacataagcaactattctagtacgagcatatatacaactgcataatccagaaaattacgttcattaataaacacacacacacacacacacacacaaacacacaagtggagaacagaatactaaaaaaaaagtagtgacaacaaaccttagacatcagttggctgaaagtatatgaacaagtagtagccgatcacaag

SEQ ID NO: 299495 - DNA, 3665 bp, Cannabis indica
cgattaaatttggaagatttcaacaatctaaatttcttcagatctggtatccaaatttgaatttgaaatgtcgattaaaccaattctttcattctctggcaaaatcgaccaattgggagactgaactgctcttaaccatcgaaaatcatccacattggcccaatttccagtctcttcagcaaggctggcttcctgaagatctttatgaatcccttcatacctcaaacagtatggcgcaaacctcacaccactactgtcctcgattatgggcctgcttctgactctgagataaaaatcagtggctttggcatgatgaattcgaatctgatgagatgccattacgaaaacacacccctcaacttgctcaaacagaattgaattcataacaggaccaccatagactcgacaatgccgaagtctgtgaacaaataatgccctaacacaacctatcaatctcacctcgcacgaatcaaggtccgaaattgtgaactcgccaatctcagagccactgaatttcatcaccaagacctctctagtcttgtttcgaaatcctggcgaatccggaactgtgtaggccattttctctggttttacaatttcagtctctttcttctctctgtttgaatcaagggcatgatctttctttggagctttgttcttgaaagagaatttctttttgggaactagatcagcgctcaaactctcgagactctgtttcaaatcggagactgcttttagggatgaccgaacctcataagaaggcaaaaagtatgaattctcggcgacaagcttttcaagactggagatagaggctgaaatggcgtcaagttggggtttgagctgagttgtctcgggcatcggggtgagtcgggattgcgcaatttgggcctcaatggaccgtttggaatcagaaaagcgagtaaggaaggaggaagtggactcgaaagcaggagaggtggaggagtcatcggactctgctgatctacgagtgtgttgacgattggcaaggcgctcgagcatggcggcatgtttcctttggcgggcttgttctaaagcatcagaaggatttccaccattgttagcgtttgatgagagataatcctcttccattgttgacagagttgctgtccgcccggctggacctgaacagaatgtggagtgaaggctaacagtaaaggaaactagtgtgtgggcttaatcttgttcatagaaactgacctacacatgccttatttctcattctatctcattaactgaaaattcttaatcctcaaatctacatcacaactcagtgaactcacaccattccagaagaataatgttgaaaagaaagttgagaattctcaaagaaacagaaagatacagtattcttctagatgacaaaaagttgaacataaccaaatatgaccacaagacaattgactaagaaatactaaaaatcttaacaaggtttacaatctcctagagtaaagcagtaaacaaatatgttgaatggagtaaataaaaaaataccgcgctgttggttttcagtccccgtcccctttcccctgtaaatatagaatgatagagaactgagatgaaaacaaagaacagagaaagaacatcccaagcccggagttcgtccccgatgtcatggggcatccaatgccgtcgatcagagagagagagagagagaacgggagaaatgaggaatgagagagtacctctgcaacagattagctaaagcaaaggagcattaatttcctccagcctcctctcttcataggaaaagcattgaaattcttctaaattaagccacaaatccaagaatccattaacaaaaatacataatcaaatacacaaacaaaaactcttcaatatcaactatcatttatcaccataatagactctaagatacacattcaatttagcaatccttagtcctgttaacaaagcaattaaaccaataaaatctcaaaaaacaatgctgaaatttcatttagacattttaacaaacatcttgtgtgcgaaactcaaaatatcaatttctaactccaatttcaaacaatcagccccgagaaatcaaagaaaaggcaagaaatcagcggtagtagtctcagaatcgtctcagaacacccaaaactacaaaacccgaccacacacacttaatagttcaaatgtaattcaccattgtcagatttcataaaaccttttttttcaaaccagccttatattatatgttgaaatagtcaaccacccaagacaaaggcaaaggaattaacttacagagtttggttcatgaaaacacgctatagacaatggtgtcgtataaatcaagtctgagagtgacccaagttgagagccattgttgttcgttttggagcagtatagtgatttgtgtttgatttttttctgagattcggagaagagattgtgtttcagcttgtacggatttggggttttgaactgatcggggttagaatattttctgagtttgagttgattattgcgggtcaaatcggggttttgtttgtttggtgaagaaagatcacatagaagaaagagatttttataccatatgctcacattttttattttttttactttttttttcttttttattgtgtggcggaattttttttaaaagtaaataataaagtttttacttttcttactgttgttttttaatttttttattgttgttttaattattcgattttgttattttatggttgttttataaaaagacattatttttatatataaaaaattttgtatgacgaaaaaattgtaaattttttgtccaaagtttagtattttcgtaagaactccaaaaaaaatatatatgattttgagagattagaattgtttttgctctttctttggaggggtttgaaatcgtgaaagtaagagtttaatttttttttgggtttgtttcccctaggtaggaattaagttaggcttgggcgctcgggcagtggctgtagtgaagagaaaggttggccgcagcgttgtgaccctaccaaaaattggaggctctcactgcaaccaaggtatgagctcaacgcggtgaggcctcttgaagctttttatctaactcattttctcaattttttaacatttttcacggttccaataaaaaactaaaaactagaatttacccaaatctaaactaaatcaaaaataaaaattggaatgattaaagctacaaaataaaattaatttataattgtgctaaatttaacgtcgctagctcaatcttgacaatacatttggtgttgatgttggattatcatattaaatacattgaaatgtaattgatcactatcaaattccattgtttatgttcctaacttaacatctaatttcatactcgtcgtacacataaatggctacccaataacaccagtgtagtgcatggaatagagtcatcttccatgtctagaacataaacattagtcgaaaaaactaagtttttcaccttaacgagaacatcttccactactctttgaggatagacattagatccattagtcaattgaatgactattcctgtttcttttagtggcccgagatttaacgaagcataaatagaatagggcatgatattttgtttggttgtctaccctaaataaaactcatttcaatataatcagatttactaattaataaaaagatcagaaatc

SEQ ID NO: 299496 - DNA, 4541 bp, Cannabis indica
ttttgtttaatttgttgaggaagtatgaatttgatctgtctttttgaattttaaagagttgagattgcattaattttggtaactaagcagaatcattagcaatgatatagtatttgcttatgtttttaaaaaaaaaattgaagtttgaccggtttacccaaccaaaccgtcggtcgagttacacaatttttttttttgcttatttgggtgggttgcacttagacttttgcaacccgttttttgcattgggttggaaaatatgtagtcaaaactgaacaaaccgaccaatgtacaaccctattactaataggacaggtcaggatgttagtattgggaagaatccttctcctccaatactcggatctaacatagtgcataatctggaaagcagatttggaagctccaaatcgaagaatgaagaagatattcagagctcgaagagcaaagtgaagatagattttgctgatattgctgaggaggttaattactggcagccttctctaatctgctatgtaataggagccaatccccctatcagcatacttgaaggattgttagatgcatatggaatgattcagtggttaaagtaggtcttcttgctaaagggatcttcatcatttgtttccagaatatggagcaacaggacaaagtgatgcagcatggaaacatattttttaacaggaaacctatggttatgaaacgatggaattcgattgacgattttatttttaccaaagaagaagttattaatgtaccaacatggattcaacttaaaggtctggatattaagtattgggggagacctctttactcaaaatcgtaggccagctgggagagccattgcaagtggataccattactaagaacagggatcgactataatatctcagagtccttatccaggttagtttatcacaagaatttcctaattcgatatctttcactgatgaatttaaccatgatattgacctggaggttaagtacgaatggattcctcttgttagttaccattgctctagcattggacatgagactagtacatgtaggaaaaaagaaaaagtagaagaaaaggggaaacagatctaggttccatagcagaaaaagaatatggaagagaagatagtggatgaagatggatttcaaaaagtgattaaaggaaagaaagtggtgactgagggaagaatagaaggaactgttgtgaataatatgtttgagtctctaacaaagcaggagagtgtggataatattggagggggggagatccctctgctttcaatggatagactcctgtattggaatgtaagagggactaacatccaatagaagcatcaagagatcaagcaattgattcaatccagacgcatccagcttcgttatatattcattagttacaagatcccatgatatcaggacttaactctcaagatctcatctgatgatcatatcttcctagtataggaagataataattggtgatcaagcatttaatgtgtctttattatatccatgaaagtaagacactttattgacaagccacctcagcatacagtaagcgcctcatgggccgaactccaccaaatgggcctaagtcaatatatattatttgtatttactctattagtgagaaaagtctaacgaataagaaccttagcactataaatataagaagactcgttcatgcaagtgttggaatctcattcctcaattgttcaggtaaattctacggttcaaatactcgtgtaaattataagatttttacaatcttatcgtaatattgattcgtgaattaaaatttattaacacctcaatgtaaaaactctagtggtttcttttttttattattcatctatgtctttcgcatttacatatattttggttctctaaaaatctcagcaaagaacctcaactaaagtcataccccactagagcatttttactatagcccatcgtagacgctccttaaagatatatattttatataaaacatacattacttatctccagttatatatgaaattaattaatgaattttattatataaagaaattaattaattaattgatcactaaaagaagttatttgtttataaatgcgtagaaaagtctgatgtcgggggtttaaaaaaacttgatgacacacacatacatatatatgatatgtgatatgttggcatggcatgcatgataattaaattgggtataaataatatgtatgtaaatggtactctctgttagagtagtcgtgattgaccttgtttgaaaagtccctttgtttttcgaaagaccatatgttttgatgggttggaaaagaaaatactcagcttttcaggaagagaggctgccaaaaacagccactccacttttagaatcacatgttaactaaatatatatatatttatataataactgcatcggaacataaaactatattcaggtatagatgataaaaaaaaaaggaagaaattgatgaacttagaaatgtagatatatatataagagagtactagtgtgtgtttgtgcagggagggtgggaagcacatgggttttggtagaatcgaatcgaatgtcattaagaagacataaaagggcatatgaaagcccacgtcgctgtgttgttgtgttctccttcttgggttgtggggaaacatcatcatgcatgccaaactctcttctctattcatttctttataattaattaccccttaaccccgcttaataaatatttatatttatatatatatgtatatgtataactctccaatctctcctttacttctatatagttatatatccgtatatatatatatatatatatttatttatacactcttgacagataatctcatcatgcccgcccactttcccttttctccatttcagccttttcttaattatatataatcaactaccatatgtgtctacatatattttaattaattatatgtaacttatattaactcattaaactaatctttacgcaaaacaaagcaggcccctgcagtttgtcataacacatgtgtatatatatgttatatatatgaagtactataattaatatttttttatagtgttctattaaataattaatcacattaaggagaggagaggacactgttaatttaattattactgaaaaaattataatatatatctatccatatataattgtcgtttcttaattttggtaccactaataataaaaacttgttactttttattttcaaatgaattaaaaccgtctagaccttgacaaggggatattatcaaatattctagttttaaactattaaattatatactattctataaaaagaaaagcttctcttgtcttgttacttgtaattcgattgagcacgtaacagctcttctaatatttcttttttattttttcataacaaaaggtactatgttattgtcaagggttccaatttgtgacttcatatattggcaaaattaatgtgaaatcagttgctaactttccggaaatcatcattaattatcgtcatatatataattcaatataggtacatgtgcatgttacatttcagttttcggatcatgcatatgtaatactctgatctctatatataatatataaagatagcatactataattaattagttgtataaacagacatggatatgaatcaaaaatgaaacatttaaatcttctatataatatagtatactataattaaatagttgtataaacagaaatggatatatatgaatcaaaaatgacaaatttaaatcttctatatatataatatataaagatagtgtactgtaattacttagctgtataaatagacatggatatgaatcaaaaaggacaaatttaaaggattaagttacacattaatatggataatagtatatatataggtgtataagctataaatatagaacaaattagggagcagcatgagtctatggagggctaaaaggacctttttgaaatatcccaaaaagagagagcctttattgtcattttgtcttttaacacatatgccctatacaaaagttgttagctggactagtagtagtagtagtagtgtctagtaggagctcccatatttttttttctttttttttccttaaaacaaacaggtggaacttacatttcgtcttaataagttaaaaaatattactcatggacctgcttaatcaattattaattaactaaagaagagaagagaatgtacacacacatcatataataataataatatatttatgttttatatatttaatatgactgactgaccaccatctattttctctctctcattctctctcttctgcaacttatatttcatctccacaagcttccaaacaaagagaattaatggaaagtgagatttgcaacgtttattcttctggttcatgtgtagaagtaatattagttatattattattattatgtgttggttgatgcatatatagaacaaaaataataaaccttatctgtaagaagccgttaatgggtgtctctgattttccatcttcttcttcttcctttaacactattattattaataa

SEQ ID NO: 299497 - DNA, 3081 bp, Cannabis indica
gataatccatgaaccccctaggtttggggaagcgcaatttatcccaagcctttaatgatcccatgatttcctttttcgaacccccaccagaagtcacggacaatgccatcaattttaaaagcaagatgatttgacagtttggtagtttgcatggcatatgacgacatagtgaggcccacaaatttaatgagggtggcgcgaccagccttagaaagagtttttgctttccacccatgaagctttaaagagaggttatctaaaatgaaattaaaatctgcatccttttgtctcgacctgaaaaagggaaagcgccaggtatttaatgtctcttttaggggatccatttcccagagcttcgctgatgcccttctttaacccatcagaagtatttttactaaagaagattgaagtcttaagttttttgatttgttgaccagaccaagcacaaaagttctcaagacattgctaaaatcctttagcctcaaccattgtggccctcccaaccagaataagatcatccgtgaagaaaatgtgggaaagaattggaccggaccccctattgagcttaatgcctttgatactccctctaccaagagcatcttctagcagccttgataggatttctacagcccaaataaacaggtaaagggagagcgggtcaccctggtgtaaaccgcaagagggcacaatttttccaaccggaccaccatttaggtagacgtttaaagtggaggtagagatgcattgggaaacccaattgcaaaacttatctagggctccaaagcatgacatcacatgattaacaaatttccagctcagcttgtcataagctttcactaggtcaattttaatagcaaagaagccccctctacccttctttctattaaaagagtgaatgatctcttgaacaattacattattcattattgtgctggatgattttgcctggaacaaaagccacttgagtaggaaaaatgattccaggtaagataggtttgattctgttagctatgattttggagataaccttatatgacacattggatagggaaataagtctaaaatgatggattctctttgggttcaggatcttggggatgaacactagattcattgcattaatcccttgtgcatagacccagacttaaaaaattttgacacaacatcacaaaagtcatcacccacggaatcccaatagtgtttaaagaataaaactgacatcccatcaggcccaggggccttactgctgcccatggcaaagagcattttacgaatttcatcaaaggaaggaattctaactagatcctcattttccaaatcagagagcctatcgtgtatgaggctctcacaattcatcaccctaccagcatcatttccagagaagataccggtcaagaaatcagtgtactctttcccaattaggtcctgtcttgtaatccatgtatcctccctattcaaaatactcccgatagcatttctccttcctctaatggtagccaagaggaaaaagaacttagaatatttatccccttcattaagccaagagatcttagccctttgcttccagtataaagctcttctatctaaggactcattaagggctcgccgaatatcacactccttcttccaatcacgagaccccgtaggtaacttttgcataaggtccaacttacattcaagagctttgatggtactttctaacttaccaaattgaactctgatccaatgaatcaaagcaacccaagtggccccaactttcttaaaaaacctggccggaggccaagaatgaacaaccgagccctaggcatgggctataaccaattttctcctttcatctcgagtccaaccttcttcaaacttaaagctccttttgattttggcattcagaccgccaaaatataaacacaacgacctatgatctgaattactagtctaagtaagaacacaaaatagctctaagaaatagactgatccaactgtcattacccaaccctttatccagcactgatttaacatgccctagacgagagcagtgattatttcaagtcaatttatctccttgaataggcaaattaataagaccccgcgactctaccaatttagaaataaaagggataaattggtcttttcctttagagccctctcttttagactcgctgaggacaacattactattgcccataatcagccacgagccctcgtatctatccccaaaactcatgacctccgaccaaaatttctttttcgcatggtagtaagaatacattattaattatcatatatgtttgttggattgcatttgatttggaacatgcaataaaactgaaacatattttaaggaaaacaagaaaggtgagcatgtttgtttccttttcttttttattcaagttatacaactgtagcagtgaaaattcagagaataaccttgtaactgtaaattggcatgcctactgctgtggcacgcttgaagtcaaaacccgtatgaaataaacgggtttgagttttctttaaattaattgagttatttttggaatgatacagctaacctgtttattaaatgagtaacttttaggctgacacgcctaacgcacaacaacatatttaatatatacggtattatttattacatataattttttttagtgttagttaaataagacataaatttattaaatatgtcaatgggttgtaaacatgttaaacttgttataaatatgtcaatgggttggtaagttgacaaaaatgaaacatgatcttttatataaatgggttacacgggttggatcagataaaagggttgggtttgtgttttagttttgacacgattaataaataattcgggtttggatttactatttgtttgtaatacctaattcttgacacgacacaaacacgaattgctacccctaatttgtacttgtttaaggagggacatttttatccgtgttgactagaaaattaatttgtttttagccctttatgttttgagatctagaaaatggagttttgatcaaaggaggcaagaagaagactttggagagcaatttttagagatcacatctttgtttttttttttttttt

SEQ ID NO: 299498 - DNA, 4461 bp, Cannabis indica
tttgtttattttgttgctagttatgtagaaataaaaaatatttttttcataaatattaaataatttaatattaaaaagtaaccaatccaaagtaaccgatccaatccgcacttttgcggattgaattggattggatttgagctattgtgtggattggattggatccaaaaaatgaaatccgcacttagtgcggattggatgttgtttgaccaaaaaagtgtggattggattggatgaacagccctaatcaagttcttgagttaagattttgtctcgaacaaagtgaatgtcaatctctatgtgtttagttcgagcatggaacactggattgtaggtaagagatcttgctcctaagttatcaccctagagaattagacagctagggacagtgagttgtaattcagtgagcagagattgaatctaaatgacttcagaagtggccagtgcaagagcacgatactcagattctatgcttgaccttgcaacaatcggtttgcttctttgaacaccaacttatgagatttctaccaaggaagatgcagtaaccagaagtagactttctgtcatcatagcagccaacccagtcagcatcagtgaacccctgcaaatcaagtctatgagcagctctaaaagttaacccctgtccaatgtaccagcaagatatctaaggatgcgtttggaggcactccaatgcttagatgttggagattgcatgaactggctcaacttgttaacagtgaaggcaatgtcaggcctggacattgtgagatattgcaatgctccaattacacttctgtaggtagtaggattttacattggggtgcctactttagatgacagctttgttgttgagcacattggtatagtttgaggcttggagtccagtaactgagtgttggtcagcaaatcccttgcatatttctattgagtaagggtgatagagtctttggatcaatgaacttcaagcctaagaaataactaagagatcctaacactttaaatgcaaattgatcatgcaggattgtgataacatgctatatgtgagtctggttttctcctgtgttgagtatatcatcgacataaacaaggagaagaagaagctaaccattcttccttgtgaagaacaaactgttatttgacttgctgttttgaaaaccccattgaagtggagaagttttgagcttgtcaaaccaggctcgaggggcttgtcttaggccatagatagccttgttcagcttgcacacatggtgagggtattctggatcaatgaagccctgtcttccttgaggtcaccattcaaaaagacattattaatgtcaccttattgaatgtcccatcgaaaggttgttgctagagtgaaaattattctaatggtgcaaggtttgatgactgggctgtatgtctcaaaaaagtaaattccagggagctgctgaaatccctttgccacaagcctagccttgtgcctgccaacttacccatctttattgtacttgactctataaacccatttgttgtgaacaatggtcatgtctgatgtggggggaaccagaacccatgttctttctttttcaaggcaatgacttcatgagacatgactgcattccaaatggggctagctaaggcatctttgagagatttgggttaagtctcaacattagtgcttgcaagatatgattttggtttaaatataccatgtttagacctggttagcatagggtgagtgtttagttgttgatgggcagtgacaacagtggtactttcagcatatgaactagcattagtggatgcttgaggactgtgatattggaggacagtatcatcagggtttgggggtgagtttgtggagctagaggcttcagtatggacaagcacaggttcttggatattgttattgggagggacaagtgtagaatacggtatgttatatgctaactcattattataggtaaagttgaggacttgggttggggggaaggaaatagttgggaatagggaaactcttgttcattaaaggtaacactttgagccacatagaccctgccacttggatgtagacatcgatacccttttaaggagatgctatatcctataaacaagcacttagaggatctaaaggcaactttgtgattctcatatggtctcggcaagggaaaacatgagcagccaaaattgtttagcatattgtaatctggtttttggctgaatagtttttcataaggggagagaagattgtttgttggtgtgggaagcctatttattagataagaagctgaagcaaaggcttcccaccagaaagttaaaggcatgttagcttgggcaagaagtgtaaggcccacgtcaaccacatacctatgctttctttcaactctcccttgctgttgatgagtatggggacaagaatttctcttaagaatgcctaatgttctgagtgtttggtaaaggggttcatattctttccctaagtcgattttaatgctttttattttagtgtgaaagaacctttcaacaaaggtattaaactgtaaaaatgaagcagtagtttcagatttagttttcattgggaaaagtcatacaaacttagtataatcatcaataaaacttaggtaatatttgtaaccttcactagaactgtaaaaggatggaccccatacatctgaaagaacaagttcaaagggcatggatgtattattctgagaaggtttgaaattgaaatggtgtaatttgcctaattggcaggcatcacaaaaagagaattgtttacatttcttatttggaacaactaaagacataactttatttaaaactacttgagaggggtgaccaagtcttgaatgccaaactaaggcaatctgagatgtgtcatggacaagattacttgtagtggcgaaattaacggccttgggatttggtgtgagggaatcaccactggttgggtcaattctttggactgtagagtagatacttcgagtttgtaaaggccttcactgagatggcccttaagaaggacctgcttggttatcttgtccttaatgagacaacacacaacattaaattcaagaatgacattattgtcttttgtaaactgagatatgctaagtaaattcttattgatagaaggaacatggagaatatcttgcaagactaatgttttagaaggaaatttaattgagactaaactatggccatatgatgaataggtaaagaagaaccattaccttcaacaaccttggcttttcccttgtagtcagcagctgtggatagaatttgtgtgtcatttgtcaaatggtgggtggcaccagtgccaagaaaccatgcattagatagatctggtgtggttgaggaaggaccaacttcagtgagatcttccacacaactgacatataggtcggcttcctctacctcctttgttattataatttcctctaccccctctgtatggtcccttgaaaccacaattactgttagaacctcgaccaacattgttgaaatttgtggcggctatgttggcttgaacattgacaagcgaatctgaggtgagttgctaaatacgcatttcttggctttgaagcataaattgtacttcttgaagagtgagaggctctgtgcgagaggtgaggttaacaacaacagcttcgtactcggatccaaggcctccaagaatgtataaaaccagatcatcatctaataaaggtgtccagctgctgacaaggaatttgcttactgtttcatcttaagaatgtattcttcaatcgattgtgaacatttcttggtggtttgaagaagactacagagttgaagcaatctggctctggatcgagtagcaaatagttgggaaaacgtagtccggatctcaaactcagtcgatgtttggcaattaacaacatgtccaagcatgtttttagaaatagaattcattacccaatccatcaagaactggtcaagttgaagccattgttgatgagcagggttaggaacattacctgcaagttgaattggtggtggaggattctgaccaaggatgaatcgatccagttcatacgctcgagcagcagcaagagcaagagacctctagacagtgtaattcgatcgatccaatctgagattcagaggtaacagattattattgggaagaacaggttgagcattagctggtggtagggatgtaaacggggcggggcgagggtggggattgctctcccacccccatacccgccccaatacccgtttaaattaaagcggggacgggggcggggattacccggtgggagaaagattcccatcgggtacccatagggaagtaaacggggcatggcggggccagggattgctcacccacccccatacccgtatcctaaattcgccctatacccatttaaataaaagtgggagacagagcaagaattacccagtgggaggaggctattcattgggtacccatgaatataattttggaaaaaaaaa

SEQ ID NO: 299499 - DNA, 3054 bp, Cannabis indica
taaataagacatagtctgattttagagttataattgattaattaaaatcaattaactgagtctgcaagcagtattatcacatatcaattacttttgacatcatttgtcggcgcaaaagctcgccgacaaaactatgctagcgacatatgtaaacttttgctagcgagaaaattcgccgacaaaagtattttttcgtgtagtgaaaccagaagtctaaaatagtatttggagattacatggtaaggtaattatttttagcacataaattaattatgatagagttaaaatgaaattattcagccaaatcaaagagagcatttagaaactcctacactcttggcatgagaaacttttctccataggtagttgtgaactgcttcttaaagtagtagtctaattgattcccacatatgtcatctcttgttttcgactactaaaaattgtatgtaatcaattggaactactaatgtcaaacttttggtgcggttcaaattcaaatgattcaaaaatacattagtagagttggaattatttatgcaaggataaaatagctgggggaatgagtttagatcgtttatctcctataatcaatctctcttggcaaaacaagtctggcatatctatcacataccacaatcactgctcaattgcttattgcgctctaagtatctatatacagtcatctttcttggaagctactctttgtcaccaaccttgaatgacttagaaagatactatttaggggaaagaattattagtcaaaggattacaatgaaaaattggcattggtaccaagttttgtgttatacgataccatggattcctggacaatcttattttcaatctatttcttttgttgaaccatcaaatttagttgtatcctcatatataaataaataaagagaatggaatgttcctttgttgctacaacattttttagtctttggacgttgatcgtattctcaacattcctttaatgatcgtattgtaaaagttgttagtcttttatctctttttttttggagttgttgtctctcatgttcgaagatatgccaataaaattgtgcatgacttgcaaagcatgttttagagttagatgaagattatgtttggttggatgaaatttcttttcgcaatttatctgttattataagcgaatattttttatttataataacaggttttattcaaaaaaaaattatttacgtgctaaaaacataatcatatcattccaatacaataaggactacggattttctgagtgaagtttcccacaaggcttagttctggactttctaggtttttttcctgtttttctctttccctttaaccctcgcatttattgcttgtactcttcctttaatttctatcttacttctacaactatgatgattataccccttattctcataacccaatctctcatcaccttaattactctctcaaccctgcattaattttgattgtgcatgttttgtcacatttaatctgggtttagggaacctatagagaatacttcatccaccaatatcactcagagttttcaactgccatttttaatttcttgaggtcttagatggaaatcattgctactctagtgatgttcagcctagttaaggggagatctcagcagatggacctacaatcctcctgctctacaaggaggcctttcatctctaagtatcttctcttctttctaatttttgtctatttaaaggtttggccatctatttttggcaaaccgcctctctccattcttgacctaaacacccaacctgttattatggcatcctcttcccaaaatcacccaaacactctcaaccttactgacgaaaaaaaccttattcatgttttcgaccatgtctcccttcactctggtaatgctacaaagtctcactgtcctatttttaagatcctcacctccaaatctcttaggcctacttggagtgaaaaagtgatgtgagaagcttggactcttcgttttcctattgacatttcagagtaccattcagatctgttcttagctacctttcaatgtaaaggtgaccttcaatgggcctagaggatcagccatgtcatttagataaatgtataatgatctttcccagccctaagggtcttaacactctcacaccagactagtttcgatatgtccccttctgggtccaagctcataacaccccctttggtcaaaagtcgaccccccccccccccaactggccaatttcgtggctggtgagcttagggacctcattaaggtctaacccctctccctgtttgaaagctttggatcctatctcaggattagagttctccttgatgtcaccaagcctctcagacgtggaatgaacatccatttcaggaagattactaaaactaaagggctttactttaagtatgagggtctgcaaaattgctactatttttgtggtgtgcttgaccacgcttacaacaaatgtggcaaatatctcatgagatgtgccaatttttctattccacctgaattgggatacaaggataccctctgagtccctgctagaaccgtcattaagaaaaacccctttgatctttctaactccacctcgttgaagagtatcttagtcgtgggagtaactctgatcaaggcttacaggaagctattgactagtttttgaacttaggttcagacttcatggtccaactttagaccgggataacccacctgcacccactgaaatccctaccactcatgtgggttgtaacgaggctttttctaccctaccaccttcccctgtcatggtcacatctgtgatcacacacacagacaaagggaagggcataattctacccgaagctcaactaccacccatctctattatttcacgactcacacatagaggcctaactataaatgaacccagtagggctaccgccactattttgccggagtgaaaagatccttcactagataaaatgctcaagttggaaactctgtcaggagtaggggtgttcactaagtatccgatccaatccaatccgcacgatccaatccaatctaatccgcaaaatgcggat

SEQ ID NO: 299500 - DNA, 5752 bp, Cannabis indica
aaaaggcatgtagtcctttcttttaatatttcaatgtaactcttcttctcacctgcatgcacaacctttccattttaaccagattttggttgaaacctgatttttttgtttttttttctttttgaaaaagagaaagaggccacttgtcttaggctggctccctgccattatgtattgataatccttacttgtggcagaggaagaccgtggttacataaaagagcttagcaaaagagaaaaaagattaccacaaaggagattctacaactaattacatcaaaattctccattccctagtcttgaacattcaacccctacaaaaattctgttatttctttccaaccaaactgcccagagaatagccataactgtagttctccataaccaaaatccttgactttagaaggacctctacctttccataagatcttagtccagcacaactctctaagattctgattcgcaaggaaccaatagaatgttgatttgcaggagaaaaccctactcaaatctggtttccacactctactatcatcaaacacattaagtagtctaacgtattccaattgatgtagcagatctaaaagactaggtacttccctatccatcaaatttcttctgaatttgaaattccagcttgccaccctatcgtccacctcacctttaatgggaacaaggtctttaatactcgtgttcttggctttggaaatcacagctagatccgagacatgatccttgaaggactctccactccatacatcttcccaaaagcgtatactaacaccatttcccacttgaaatgtaccagctccaagtattcttcataaaactctggaatttccctctaagggccccaagcagacaatcttcctccgcttttaatcactttgtgcggaagtgaattaggttctgaaggatatctccaaagccatttcataagcaggcccttgttcctcagatccaaacttccaatggaaagacccctctcattccttggtctacacacctccttccatgaaacaaagtggtcaccgcccattaagtctccaccttcccgaaaatagtctttgatcatcatttccaaaaattgaatgaccaattttggagctttgaagagagagagagagagagagagagagagagagagagagagaatagattggaagggaagataggacagactgaataagagtaagtctgccccctctagattagaaggaacatttccaaccatcaagtgtcttggcacatttgtccataaccgaaacccaaaaactcctcttcctagtcgaaccacctagaggcatgccaagatatgttataggctaactgcgtacttcgcacccaatttgagtagcacattgccccaccacatttttgttcaagcatagacccaatagttggctcctacaagtttcaacaattctatcaaactcttgaaatgattcctcatcattttcaaaaaatagaatgtcatccactaattgtaaatgactaaatttgcatcttatctttgccgacattaaacaccgaaaaaagtgcctgattccaccgctttatccaccattctcccaagaacattagccaccaatgtaagaaggaaaggagatagtggttctctttgtctaagtcccctagaccctttgaagcttccgcttgttctcccattgatgaaaatagacaatgatgttgttgagatacattctctaatccatttcctccatttttcaacaaatccctttttcaacaaaaccattactctgtcatatgctttcttgaaaacaaaaccattcttgcctcgccatctataatcttcgacggcctcattggttactaggaccgagtccagtatttgtctaccttccacaaaagcaaactgagttcctgatatcgtatcttccaaaactcttcttagtcctgtagcaagaactttagcgataatcttgtatacgctagtaatgaggctggtcagtctgaagtcttttaccttacaactattaagtcttttgggaataagacaaatgaaagtttcattgatactgccttctattcttccgtctctttcataagcatttaacacttccatgagctcatctttgatagtctcccaatttgaacacttccaggttgaaacctgatattttaattagattttcacctagttttgtgagccccttttctcaaaggcaatcaactttgatatgtattgagctgatctaagcaatgtttaaaattgcgaatttaagtctcgtggtgttttttttctgttaggcaaggcgtaagcctcaattattgaattaaaataatattttagagtaactaaaaataaggaggaagcatcagcaacagtttctcttttttttactctctctcttctttggatgtgcgattgagaagatgaaggagggggtctcatggctactaaccctaagaaatatatttgatcttttaatataaattgtgtaggtttagtttttagttgggcttttttttatctatctgtttgagttttattgtgttttattgggcccttttcttaagttaagtgttattgggctttcttttaagttgaatgaaaataggctacaaaaaccctaaaatcttgttttttttaggcgtgcgcctcactcttttttatgcctcagaccattttccactgcctcacacgtttgaagcgtacgcctctcttccaaatattgaggcgcacgcaatagtgcattttttttcacctcaaaatgaggtgcaccttgaagcgcgcaataaaaacacaattttaaacattggatctaagtaattgtactctacaaactgtacaaacaaacatgttttgtgaaaccatcatgatacactagtgttccattccaatattgaaggaattagaaaacagaaatcttattgatatcaaaataagtattacaaatctttccaagcttttcgatacttcgatatctcccaaagtaaattttactctaaccaatacaaattaattcctatctcttacaattaatcagccccactatttatactaactcatccccaactgtttatttaacgaaccctttaggattattaacatagctcacttaagatattccatctcagccattaagagtttgacaagtcagcttctataatcctaatcactttgattgattaaactaatattaacgcgtaacacatcaatacatcaacacacccataagtactttactggaaaaataatagatagcaaggaatttcaatttttcacattaagttgcttacatttggaaatttggattgctttttaagctttgaacaatgaagaagggtaagcataaaaattcttactgcagaaattgataagattagaccataacaaacatgtacctttcttataacttcccttttaatttgataattagcagcttctgcaaacacctttcccgataatctctttgacacctaccacaaatgaaatggtaaattggagacaaatatgaaggaaaatgcaacaaaacaacaaaacattatcctaccacttgaaaaatctttgccaaagtgattataccaccaccctataaaagggaaaaaatcaaatcagttaaagtacaaattggagaaacttgcagcctattttattcttataaaaaaattaagaataccttcaaaaccaccgaccggacatctttcaaagctgaaagagcctgtactttccatcgactgagtccaaattctaaaccaccttctgcattggatgctccagagaattctaataaccctggaaaagcttcaagttcttcactacatgaagacaagtacatactgaaagtcagcagaatagtttataagaaggaaaggcttattgacttattgaagacataacatgccatgatatgcagtaataatttacaagtcaaatgtcattcagcaaatagaaatagagaattcattttcttaacaagagcactcagagggtaattgcctcatggctgaagtcaccataaaggtatcccataatgatagcaaaaacatccccattgtggtcattttgtcaaattttattgctaacatgagtaatatatcttcagtattgactgcaaagtgaacagaaaggtaatgttttggcgaaagaaacaccatcctaattctggaaatgaaaaggaaatggtttatttactattatagcgccctgattataaaaggaactaagaattcgatttgttcaactacatgaaatttagacatgctgctaaattgtatcaggaagctgagaaacatgccttgtgcaatcatgcaacaaatgaagaaagatctctgcttcgaggtcttcggtcgacaacttgtttgagcactgaattttcaactcctttcttacagcaagtaaaacactcctatacgatggcctccaacccctaaaaaggcaataaacaaactccaatcatcaaaatcattgtttgaaacaaactttcaagtatatattaaaaaaataccaactgctttaaataacctatgaattgattctttcaaatttaaaagaaacattactatgaatacagttacatgtgaaaaataaaatcataaagtacaacttagagaaactatcattaagctaacatatgaaatctttgactgcacatttactttgacaatataaagcataataataaccttaaggttgagcgagcatcagctgcaaggaataagaatcgagactcaagtgcttctatgaagtgctctctttcttgaagatcctcttcgatcatggcgtaatctacatcagttctcgtcgttatcgatttgagtaaagggctaaagtaactgaagattaacaatgacatcaaggtcaatcatattgggttttcaaagaactaaaatcttaattaataatgcacatgcttatgaagaaaaacaaagccatattattgaatcaaattgattgatagtttactatttgagtatttctttacacaagcctgtgaaaacagatattcacctttgaccaaaaaggatattctcaagctcatataactcagagtctgtagcaagttcaagcactaaccgaagttcaggatcaaaagcagctgtgaactcaaaccaaaaacaacattttcaaaaatcgaaacttgaagtgagaagtacagtcaagaaaccacaaattaaaaggttcacgaggcaaaagggaaccttgcccagttcttgagatagaagcgcgagcgcattgcaccaacctcatacggcttttatgtttcggtgagcccaaaaattgaagccaaattctgtttggctgctgagaaactaggtaagaaaaataaaaaaggaaagagaaagggaaagggaaaaagagggaatgcaggaaaagaagaagcatacagaataggcgtgtttggcgaaggagaaggttgcagagcttatgatcggagaagcgatgccgactttggcagcactcatcttcttcttcttagaccaactgtagcaagttcattcataggaggattacaatagatagatatgctttcacggtgcgtgtcacttgcacgtgagttaacacacagagtaatttattcattaaaatagcgttacgttgagtgccaacttctaacatttttcttttggctaattagtaattttttttctcgaatttttacatatatcaaatggtattttataaattttttttcggttaaaaattctctccgaactattgagatagttaaatttaagaaattttatccaagttcattcaattttactgtttcagtgattgtttatg

SEQ ID NO: 299501 - DNA, 3220 bp, Cannabis indica
ccatatttaactgttgcatttaaatttcaatgtttgcctctatttaaaaagaaaaagaaaaatgtttggcggccttacaatattctgatgaattactattttcattctcttcttaatatttgttttatatttttattgtcactcttcttagatttatcacattttatggcctataatttttagtttttgtatttttacttttgttctagcgtatttattgaggttttgttctgcaggacttcatttacagagaactaccgagctttgtcttgtattttattattaggatcccttggcataaatatctagttaggaatccagctctcttcttttgacaatctccctttgcctatatttcccttcctttcagcattgtcgaattttaattttgttgtcacattgaataaatggacacatttccacaaccagcagcaccgccaccgccaccatcacaatcactgctcactgggttaacagtactgtgaataccattcctttcagtggggagaatgtaagacttcttgatcatagcaagaagaccactgtttttcaaacgcttgagatgatttgccaatagggacgggtgagtaggtggcagaccagtatatgcttgctcaatgtacttggctatggcctttttgctagacccatttttctcttttagtgccccgattgctgcaaatatcatctgacagaagaataaagttatttcactggatttaaataataataggattagatcttcatatccagagatgcagaaaaggtataacatttttttaattaaattttaaagtagatgcacacctcagcatatggaggatgacttgggaccgcagataaaccatgtccaggaacgacaccagggtttggagcgggattagcaacagagtgatttaaggtactttgagcttctgcataaccactgaaaggaatggtattcacagtactgttaactgtaaaaccgggggcagtgaaagggatgggagctgcatggccagtgatgatgggagcagcgatgcctgtagcagcagcgccagtgagcagtgattgtgatggtggcggtggcggtgctgctggttgtggaaatgtgtccatttatttaatgtgacaacaaaattaaattcgacaatgctgaaaggaagggaaatataggcaaagggagattgtcaaaaagaagagagctggattcctaactagatacttatgccaagggatcctaataataaaatacaagacaaaaagctcggtagttctctgtaaatgaagtcctgcagaacaaaacctcaataaatacgctagaacaaaagtaaaaatacaaaaactaaaaattataggccataaaatgtgataaatctaagaagagtgacaataaaaatataaaacaaatattaagaagagaatgaaaatagtaattcatcagaatatttaggccgccaaacatttttcttttctttttaaatagaggcaaacattgaaatttaaatgcaacagttaaatatgggctttcttgtgacgccattttagtaaaaccaccttatataaatataaaaatcattacctgaagcatttttccaatcaagatcttttacaatggctttatgacaaattccataattaaaaaaatatatattattaatattcaagaaaaaaataaagcatgtacctgaaaatgcataataaaaccagatataaaagaaatctacaaaaaaatataacaataaaacccggctgcattaattaaacaaaatcgagtaaagtataacaattgtctaagactaatgcctttcccctaaacattttccaacaaaccaaacaaaacctaatacaatctatcttcaggcaggaaaaaaaatcagaaaaagaaaaagattctcgaattttaagaattaagattttagaactcgtttttgaaaaaataaataaagaaaatgacctaagcacataaaaacagtcaacccaacggtcaccttccgtggaaaagttttgcccctaatcaattagcatataagtagtactaattttcacctccattttctcagcaaccaagaaaaaacctaaaattccctcatagactagcaagctagaacaaacacaccgagaacgagaaaataactcatttaagaaaaaaataaaattaataataaaaaagaaaatggaaaaataaaatctttcagcacaagaacaagagcttattatatatagaatttattttagaaaattagggtttttaattttattttcttctcatttcgaaaattaaagagaaattatacctctggagatggtgaaaaaccaaaagccctaagctttacttctcagtagtagtagaaggcaacatccatggatgcaattttcagagaaaataaataaataaataaaattttgaagtgagagagagtgagagagtgagagagacgagaccataagcgagacctcgaacaaggtaaaaggctttttccactcaacaggatctggaaacttcgtaaatgacgataatacccctacgattcgtaaactaggtcagattgagtttaaatatgtggtgagggtattttagtaatttcaggtgaataatatctgttaagtgaaactttttgtctgcgttagtagtatcatcagcttccaattctgtccttacgatttcgtcagctatgctagaagataggcatgctatgagaggggtattttagtaaaaatccaagaatgttcgtgtaaatcaatggttgggtgagtgtctaatccaacggttaatatttggtcagcttttaatgctgtttttttttgtcttcggcggcataatttcatttttcaatttttttcatctctatctttaccgcttcttttctccctctcaattttttgtgaggtgtcatccaatttaattaatttctttatattttttttgttttaaaattttcaagatgagcaataattatatgcacaggtacactgaactattaaatacttatatagcaaggttttttctttcttcttaatacaaggaaggttttctatttcaaatatttatatttaattattcaaacaaaattatcttatacattagttaaggtcgcttgaaaattacgttttcattttgtactttcttcaaaaaaaaaagtaacttttctactcctttattaagtctgtaatttttcttttattgtatcgaacttgtaattttgtccgctctcaaatgtggctagatgggcgttttgtc

SEQ ID NO: 299502 - DNA, 3929 bp, Cannabis indica
atatattaaggtaaaatatatcgttatcatatactcgtgtatatatatgagtgtgattacacataataattatgtgttcacaaaattgtaaaattataattttcttttttcaagctgaagaataagaacattggtatatatagaataatcttatagtttatcttttatacgtactaggcaatagtatttgagtagtaaattaaaactgagctgattaatttccatcactttaactacgtaccaaaaaaaaaaagaagagagaaatctggacatgtgaaaggaactagcccttattataacatataatttgtaattgtattcattattattgtataccattaattaaacaaaataagaaaagaagaaatgtgtcaaaatcatcactagtattcatgaccaattttcatatataattgagttatatgtagggaacccacatgttatattttctgttcactagatttttctcaggcttcaatcagaccacttgtttgatgtttcattataactagttttgtgtcatttaaaacattttcaaataattactttcagtaggccatatatatatacaaaagaaaatgaaaaaatattcgataacattttgttagttcttgccaagagcgatgttaatgtgttacaccatatatattgctaataaacttcttttttatttatttattttttaatattctattttagaattaaattaatattagcttcaaatataaaaattacagttggatttattattgtatattctaattgactcaatattacacgttggatcttttaagcaatcaaatgaattgctataccattaaacccaaggccggccctaaaattatatgggcccaagacgaattaaattttgaggcctcaaaaatgtattaaaaatatcaaaaaaagagtgttatgagatttgaacccatgacttggacatccacctcaaccaactaagctatgaatattattgcttataatacacttaaattttacttaaataaaagcctaaaaaattttttttattttttattttgggcccccggaaagcgtgggccctaggcacgggcctagtccgcctatgcctagggccggccctgagataaccttataattggttagtgatttgcccaacttaacaattatcctaccattactaatgaatagctttaaatagcaaaaatccaagttgaagtggatttacttctctctaaattcttcattcttcaattgggaacaacctccggccttataatgtctcatcatgctgtattggaaacaaatctcactttcagaactacccggatgaccatctcaatcttatttcccctagaacctcttactccgtctcgaatcactagatgttgatggatcttttctttttgattatatactgagtgaccaccatccctaccaaagctaaaagtaggagaagcagtaaacccactaacattttgagtcctttgggcttccgtaaaaactccactgaaccctcggctctaagagtcttctctaccacctaatcctaggtagtatagtatactcagtcatgatcatcaggtcgtatctcatctcgacattacatcttacaaagttcttatcttccatgctgaaactggattgttccattcttgaagccaaaccgacaaacctatccactcgtcgcttcacgaaattgagggatgcatgccatctctcccaccaaacgaggataccttcctagaattggattgtttacaagttacctgaccttagtaacttccataaactaagtatgccattagtgtgtaaccattattctgcatacataacgcttgagtttctcttgaaatgcaagattctttcttacagaatcttttattatctacttataatcacactggccttgataataaaccctagctaggaggtataatgtctgaatcgacacatctctatatcttatcattggaatcaaattcacgttcccaatttgacaaagcctgaggtggatctacatcccactcataatacttttaccacaacctctgctatggttgcaacttaagggaaaaatctaactgtcctgactatttctagccttaaatactatatcatgattcatgtcatatcacctagatttacgatcaaaaatcaagtaatttgggagatggttctaatcatattcttctaccacataacatagaaatctaaacaagctcttactcaactatcaatctgctaacatgcttcctgtcatgattttctaattattatgcttatttgataaagctactaaaaaaatataaaggtttactgaaccatgagtcgagcttatctctaatgatgattgtacatatctcgatgatctttagagaacaacctggtgactctgataccaaattataacgccttactagtttaggcacgctacaatatttttcagaatagttgtgctgacctttgctaatcaaagggtttaatataaaattttatcaattacaactttataataattaaatattttaataaataaacatagtcaaaataaactgtatacaaagtttatgatccctaaatctatttattcaaatttaaatataacaaaactatcgtctagcaactaataaaactgagcctatattgtctcgaagatctgaatgctccaggtctaatcatccagatatgtacaattttcactgagcttcaatactcatagctttctagccctagcctttacctagctacacatgaacatatatctgtgagtcgacaaactcagtaaaaaaaaagtataaaacaaaaatatatataactcgacctataactaggagcccatgcacctactcacaagtctaaaactaggtcaggaacgttcttgaaaaaggcctagcatatatctattggtatcttagttcaactctatgtacacctcaccaatgccttgatatgctaatttgatggctttatagtttgcctaatatatatattgttatctcaatgcaactctatatacacttcaccaataccctaatatatttttttgatggaaactaaacacgcaagctaaaaaatttagtcatactgtgataactaaagtgcaattcatcttatgaagaatcctatgtgccatgaaaagtccaaattattgacatcaagctacactttgtcagagacattgttgccagcaagaaagttagagtgaagaagattaacacacataaaaatctaagtgatacttactaagtgtgtcactggtgagaagtttagactatacataaagctactgaacatagaagattgctaatcctccattcctgaaggaaaaccttaatgatggaacgattttgcccatttgtttttgctcagagtttaaacttgtacaagtatataaaccaggtggaatttgtggggtttatacacttgtgcaagttggttagctttggtagttagaattgttagttaaattctgttaaaggttgttggttcatgtacacttgtattggtctatatataaagaccatttctattcattagctgagttaagttgagagtgtgtaaagttgtaaagggtatgagatttgtatagctcatgtccctcaagtgagccatttcaatgggagcttgactccatttagttcatgttttctgtcctgttattgtaccatctctgagcttcatcttcaattcaataaaggcaaagcctcaaggtagttccactcaaggagtagattcaagttttctgcttgagattgaaccttataactcatgtgttctgtttttcatttcttgctgtacaatttctggttttagttttctttgttaatctttgatttcttggagggcgattgattcaccacagttagattgtaccagttttagcttttagttgtagtttctccataaattattcaaaaaaattaatttttgactgtttaccaaacacattt

SEQ ID NO: 299503 - DNA, 1811 bp, Cannabis indica
ttctctctagaaatctcactgtataattaatgttttaactcttagttgatcagattaagagtctaagtatatatagggtgagagagagtagatgagccaaggtaagttgtaacagaattaacagattccgttacaaactgttgagctgagtcttgagtcttggattgactgttgcaattagcaagtcttcagatgcaacaaggatccaaatagatgagtctaacaaaggtccagagaaatagggaccaatcctccacaagtatcatgagatctcttgaccttggaatgacctattggtatcatctctccctaattttgtgttcattttaaagaataccagttaaaactgaacctgactgcagtagcagatgtttttctgtcaatcctatatttacatgacatttatatttcagtttaaaccacgcattattttcaagtgtttggtgacatcttgcaggtatattcagtatgtaaaagaacatttttcaccaatcctaacaaaagaagctgaaacagttatctcaagctattaccagcttcaaagaagatctgcaactcacaatgcaggttcaaactaaattaaacatttattttttctcatatagcagattggtattttttcctttttactagttttaataggagatgtactgtgtttcagctaggacaacggtgcgcatgcttgaaagtttgatacgcttagctcagggtatgttaccttttaagattaatattatcatgtgagaatccctacctaagattttgattttgtcaatgtttctttcagcacatgcaagactaatgttcagaaatgaggtgacacggttagatgccattacagccattttatgcatcgaatcttccatgactacctcggctattgtagacagtgttgggaatgctctgcactcgaatttcacagataaccctgatctcgaatgtatcctcctactttacttatatatacataagtttacatgttttttcgtcagctatttataaaaagaacatatttaagaatgtcacactgccttgtgtgatgactgattcttaactgtttacttcatagatatcaatcaagaaagactgattcttgaaaagctaagatcatttgatgaatcttctgaataattgatcggtaaaggaacgggatgttgttcgagtttgacataggacgtcaagtgagtttgatgttcgctgcttaatttcgaccacctcgagaagagatggcttgcatacaacttaaattgaaggctgctacaatacttttaagtgtaaattatttttttggcagctctcattaacaatgatgtatttagaactctagggaaatgaggtgtgagatttgcatttgcatttgcttttgtaatattggataatgtatgtatttttttcagcagatgatctattcataccgatatgagcgttattaggtaaattaataagaaaatcatctatagtatatgttgaacgaaaataataataatgataataataataagcagatgattaaacaactttaatttaacatctatacataatttcacaactttaaaattttatatacttaatttcacatctatatatagttaaacaactttaatcatttctttaattttctgtcaatttatagtgttctttctaaattatttttccaccaaataaaatcaaagtctaatttagttagtaatcaatttcaatttccgtgaattcgatttcacctatgtacctatgtaagcattacttatgatatgtgcacttacataattctatataaatatatatatatatatatatatattttttgacaa

SEQ ID NO: 299504 - DNA, 1472 bp, Cannabis indica
aactttacagtttttaggtgtacgtatagtaaaagaaaaaagttatttttgtactttttatttttacaaatattacgaagtagaaaagtaaaaaatatatatatttcattttatttagactatttaattattatctctaatcttaacattaattcttgttttttttttctgtaagggtaattaaggatattctaatctaacattagttgtaggtaggggtattctattcatgtatgtaggtatttttggttaacattggtcaaaaataatattatgaagacttattttagtattgactatatggaaagagagagaaagagagtattgatttttgaagatcccatgttttgttgggatgcaaatttatggattcggaaagacaaaaatcaaattgagcagcttcttggggtttggtgtctctcccattgagccaagtgaacccattactccaaaaaaacacagctaagcacaacaagtacatcaaattcgacaaaatcaccctccttaatttcaccttattctattaataatcaattttaattttctttttctttatactttaaactctctctctccctctctctctaatacatcatatatatattcgactatagtacgtactaattattagtagtgtagtatactagtacgtatatatatatatcatcaagtccaattagattctttaggtatagtgtagttattataattagtcacaataaaatgaatttgtttttgacaaattaatcataaatgaaagatatataatccaaacggggcaaaccccagatgattgatgctcttgattttagtgttaccggctgatcctcctcattcctctttcaacgctaatttatttttaccactctcctcaaaattaattaaagaatgaattattgattcaatccagcaattaatgtatcatgtaaatagagatctttaacttataagctctatctagattcatgcattgtttatattaccactaatttgcatgatcgtcttaatttatgatgataattatcaactaattaatggtatgtgctcaaatatattctaaattccccatgcattaattctcattgttgagaatcatggagttccatctcaaaaccaattggcaatgagtggagtagcccatgttcttatatctggctcaattctctaccatttattccatgtgggacattgtccacaatataatattgttttcacttatttgtactgcatgtttttgaattatataagttttaataagttggtccccaaattttaatttttaataaattagtccccaaattatataaattttgtcaagttaatcctagaactttgttttttgaaaaaaaatttctcaaacttttattttattagaaacataaaacccttactgatcttaaatgatggtatttatttatttatttttattttaaatatttttatatttggatatacattatcaaattaaaaaa

SEQ ID NO: 299505 - DNA, 4258 bp, Cannabis indica
tattaaattaaaatatatttattcaaaatattctttttgacttaaagtttgttgtattaattaaaaaaaaagtgtaaatccgttaattagcataaaaatcattcggaccccgctaatcaatgacttgaaaaagaatagccagagccaaacaattaatcatcttgttcagatattgtttaacaaaattattaaaatctaaaatattaaatataaatgttagagagagctttatttacaccttatttaataattttttattttcaatattgtatgtgtgtcaaaaaaaatatgaaaataattatataacacaatatcttttctttaaaaaagataatcttataaaatgttatagagttattttttaatttttaaaattgatttaaatttatcttttaaaaatattacttataattttgtgagggttcaaataaaaatcgaacaagataggaaaaaaaaaatcacttttacacgtatgacgaaagcatatatatatatttcattcaaaaaaaaaagcatatatatatattgttattgggcaccagtggtacctagcaccttctaaatgtgtcgacttgcaattgactagcgatactctataaaaattattatattaaactatatgggacccgatacttaattgcaccaatagcgatattgacacgtaggatagtgttaggcaccagtaatgccctttagcatttctcatattattattataaaatttaaaaaatcattataaagcagctctcctaaaatacattttggttgacaatataaaccctagctaataatatattataactaacccaacccaacaattatatatatagggttagcaatagtgacatactatcacgttcattggcgaacgttatatatttatatatatataaacactcaccatataaacattcttaaactttctacagaaaaaaaaaagaaaaagagattatatattagtttcatgcagagagaaatgaaaaccagttcaactcatcatcaaatcaacaaacaccgttcattcataataatactcaaatactttttatttcttctcttcctctcactcctctcttctcttcctccttccttcaacccatcaccgcactaccaccaccaccaccaccacacgtttccggtgaccttctcagaatacgaccgggatactcctcctacgaaaactacatccagcgccagctcaacaagactctcaacccaaagctccgccaaatatggacaacacgagattgggaaagaaaaatcaaagtattctctcaattcttcgaccaattgaaacgacaaaatcttctctcaaacgactccaaagctctctgtatcggagcccgagtcggccaggaggttgaagcactgaggcgaatcggagtgtctgactcggtcgggatcgatctcgtgccttatcctcctctcgtagtgaaaggagattttcataaccaaccgtttcgaaacgggactttcgattttgaattctctaacgtgtttgatcacgcgcttttcccggaaaagttcgttgcggagatcgaacggacgttgaggccaggtggcgtttgcgctttacacgtgtcgatatctaaacgggctgataagtactcagctaatgatttgtatagttccgaacctttggtgaagttgtttaagggttctgatttggttcacttgaaaaaaatcgacggttttggattggacaccgaggttgtttttcgtaaacgtgagaactgatccaacggtcacgattattccacttgtttttttctcatttatttgaactttaactccatttttttttaatattatataaattatttgatgatacgtgcatagatgtatgtatgtttggtttatatacatattttttttatattatatggtgagaattagatacaaccaccaatatgatatgatttaattacttttcataattgtaatgagaaaacaacaaaagagaagagaacaattgagaggcttggcctgcttaattgttctattaagaaaataattatgtgaaataagagaagtaaagtggaagtaaagagtgaatttgttaatgctttaagagacaaaaaggaatttcttgataccattgcattgattacggccaatgctaataatgtcctctaactttggattgaacttgacccactattaattaattaattaataaataaatctatatttatatcagtatctatatctatactatttatataaaattcaatttatattttggttttttctaatttgtttatttctgtcaatagttaaagaaaaggtttattatattttagaggtattcttattttctgtttttttttcttctccaactttgtttatttatctacagctgctgcctacttttcttcttcttatttttttttttctctactgttcatttttgaagctgaatttaagcttcgaactaggaaagcctaatcaagaagcaattagtccgatgtttgagaatgagtttaagctttaaactgagaaggcctaatctagaagcaattgatatctttatcaacatttgttgaatatggttacaagttttgtcatatggaaagaaagctatgaatttagggagtaaatacgaaaagcttagtgtggatctggaaaaatcttaagcagaagattttgttagaagcccgaaggcgtttccaagtaagctgggtatgtactgtcactccagatagcttgttattagtctagagatgaactttcggataacttactattagtcatggctattcatcctggaataagcacttgtacaaatcctaatatggcttgtactgaaagcgtgttcttcaagttgacaagttgacgaggattattattgttggagatgaactagatcctttaaggtggtgtaaataagccatgatatttttggagctaatttataaatctataaatagttattaatatccttgtaatctgaagtgaagcataccattatagcttaagtgaagatcgtgatagtgtaaggttgagaaagagtctaaactagagagagaaattttttttcgtaatctctgaaagtttgtgaatattcttgtaaccttgtaaatattgatatcaataaagatatagttgttactgttctgaccgagctgtagagcattgcacatggctcgaactcgttaaaccttgtgttattcttttctgttttacggtttaattcattacatgaattatgtgatcttttgatttattgtttcttaattgtcttgcgtgtttgttgatccagtatactgaatcgtaagttattgattgtttctgttacgtacaataaattagtattggagaacaatttgtaatcatgaatgtcacaaaatacatacgatgctgaaaagtttattggtacgaatgattttagattatgggggatgaagatgaaggctttgttggttcaccaaggattgtatgaggctttgctaagaaataagtctcttccaaagtctatttaccaatgatttagtcatacaatatttttacgttaaattatatgtggtattaacttttatagatacctaaatgtataatattttagtataaaattgttggaactttgtgaaatattacaaaaataaagtgtgtgagtaagagtcccacatgggatagaaacacttcatttgaagtgtataactagtgcaagtttgagatatgggtttgggccccaaggggtacccagttttttgcgcatgggtgaggactcacacaccggaccaccacacacgcgcgcgcgccgccgccgccgtccgtccgacgggaaaaatttatttattaaattattatttatttaattaattaaaacagtttttttaaacgtgtttgattaatcagtaaacaaaggtttcctgattttgtgcatcgttcccacgatctattccaacgttcccttccagtaacgtatttcttcccattactatcagtgcattgcccatataatgcggctgaacagtggaagaaaaatatcttttttcacactgataaattatacgatatatttacatactactataatacatatttatattttcgagcagtagtcggttttgggtgtttaatttcgacggtactctatcgtgcaatagagttccgatacagtgttcgactgggctgttttatcctggggacgaccggcaaatttcgactgcttgcacactcttgggcagtgccgcgaacgtcttaaagagagcgacatagtccgcgactcaacccagaattcttcattcggtaatat

SEQ ID NO: 299506 - DNA, 4021 bp, Cannabis indica
cacaagtgcggatatccgcattttacgggattggattggattggatcgtgcggatggattggatcggatacttagtgaacaccccttatggaaacctaaactctacaaggaaaaggtgtgcaaaggctagcttccatctccaaaggctggcctcaatctctaaaggttcacctccacctccaaaggctggcctcctcttgccaaagctggcaggaacttgacctgccagatcctggcaggaacttgacgtgccaaatcctagcaggaacatgacctgccaaatcttggcaggagcatggccaaccaacttttcccttgaaagaaattgatgcatagccttcatccgtgagtagcaagccaagctgcaagttgggccttgacaacccactaagatactacaaaaatatctacttttaaggggtaatttgatcatttgtatttattaatttgatatgtaaatatctaattagtgtttaagctctcttataaaaagagccttaactaaaccctaaaaccctaagtctcatctaagacatatagctctaagtctgaaaccctaatcctcttctctttctcttctacacgcccaaagggctttctctcttcctctctctcacacgcctccaaggccctatctctctctcattagttatctacctactaattcatactctgtaaccctaaagagagctatatcagatcccacctatagtgatgtgaatagtaaatatctgtcggtattaatacaaccaaaaggagagtaggtcattacccgctacttaagggggccgaacctctataaaatccttatgttaatttaattttgagttctaattgtgtaacacatggcaatcatcaatttaatacgaccctgatgtcggatggccaatttctgaggtcaacaattagctttaaacttgatttatcatgaaaagagtaatgaaagtgtgttgtttattaattttgattagtttttgtcttcattttctatttagtatgctagtttttgagttttatgaaattattattttttagctgcatttatttaattaattattgattgtttggtgttaagaaagaagagtcaaagtgccattagaaaaggaatgatgtgaggtcaaattgggcatggaagctgaaactgcgatgaattgctaaagtaattgttgcaacaaatttagcattttgggcagtgatgtggacaaagtgcaatagagttttctttagttaaatcagagaaaaggtggcagtcacttaaatttaggcaagctggctgacgtgagaataggagaccaaggctagggggccaagaaaagaaggaaatgggcatctattttagggtattggattgtaccctaatgacctaacaactaagaaaataagtacaaccaccatcatcacaccatgaactccgctgccattttgggaggaaaattaattacagaaagaaaagtaatgaaaattaagtgtttaaaagaggaagtcaactgagaaagaaggaggaggacacaagcttcattagtttgaatttctcttcttcttcttcttcttcttcttctattttcttctgttctttatatacttggagtttattaatttgcaaagaataagtagcagccatggatgaacagattttattttggattttaattactggtttgaacatgagctaagcttcttgaggcttgaatggctatgaacccctatattttggtatgattaattttaagcatgattttagtaattttgcctttttttattcaagtaagcttgctgtttattaattgttattacttggccaaaagtaacaatttactaagctagatctggttttgaaaaggctagatctagtagttacaacttggatgatgcaagtgaattcctaagtttagttttttcttagttaatggaatagggatatttcattaccttgcataacttgagaattgatgtttaattgatgttctgcaacttgatttgatataagaatatatataactaagtggtagaacataatttgtgagttttaaaaaaatctcataaactcaagaaaatttttgttaattttgtgcaactttgctgaaataatgttgaaaaattgggcagatttaacatatgggaatttagctattcaagtctattatttcgtagatattttgtcttgcagttaattttacaatgttggttgtcttattttgagcatattttcattgtcaccaatttattttactttcattagtcatctatttttttcgtttatttttctttcaatagacctaaagttgttaattagttagttttacatttattttaatttgcaatctctatggagacgatattcaacttatcattatattatttgttgtcgattgagtgcacttgtgtataaatataattttcacaacaaaaggccatgtagatcctagatgtaaaggaaagatgtacccatcgtccaaagaatattccattttctcagcctacaaatacaaaaaaatgtaatgagaaatgggatttgaaaaacatagagaaaagagagctctgaaactgtaatagaggatatactctcatgctaaaaatagattgctcattaataaaagtgactcgtggactacggttaattaacacctgaactgcataaaaacgatcttctccactcataattaatttcttaatctaagatttagaagttaacgaaaaatctcaatcaacaattatgatcatataatcatattattttctttcgtgatttacatcaaaataattttagttgtctatgtgctcggtattttatataacgaaaaatcaaacaaataattgtgaaattaaatacattaacaatgtgattgaccaagtcaataaatttctgttttctttattgatgataaaaaataacaaatatattgaggtttgaatatttaaggcataaaacccttacaatacacacatttatgcatcctaaattatttaattgtataatttttagaaagtctctaactacattattgaccatcatataaaaatatgtacttaataacattaaaaaaaataaatataggtaactaaaaacaataactatagttgtattcatatgtggataaataccatttttaattgtaaaaattattgaatggaccttctcttttgttaaatgacaaattagatcctgtgtttttcaaaatggtataaaatattactctaaactcaatttttcgttaatttttttttaacatagcaaacccgaagccattttccagcctggtcatagatatctctagattgtattattattattatattttattttgatgaaaattaagctcagaataatattttgtacgattttaaaaattacaagttgtatttattatttcattaaatagagagcatgatagttaatttttgcaaaatataagaattaaaatagtatttgtccttatatatatatgtataggtattcatattttggatcgtggctatagattcaatccctcgccacttatttttcagaccgatcactcacttgaatataatgatattttttttttgctgaaagaaaaacttacactcgacaagcatccaaagcggctgcacgtacagcaaggcgatgagccaccccattattcctacgaggaatccaaacaccccattattactttgtctttattttagtaagataatatataactatatataaaagagtcaataacttttgggcttttacatgttaaattacttttttaacctttatcttatttttttcattaaaaatttttgtagatcaatataaatcacattattttgatgtaatatttttagtttttaatctcttcctattcataattatattagctaataatcatgtaacaacttaatcattaataatctataacctctataaaagtgagaatatttttaagatttcactaagtaaattacgtaattagcttttactagatattaaaattacaaaaagaaaaaatcattattttgataaccacaaaataaataataaataaagttg

SEQ ID NO: 299507 - DNA, 1235 bp, Cannabis indica
taaaaattatttacatgtatattcatgtgtttttttaattaggagaataagagcttgattgtggaatccaattgtcttaagatgaaaaactttgtctggcgggtgtgtcacaactggattccttcaaaaagtgaattggcgaggagaggtattcagatggagaggacatgtacgggttgttggaaccatgaggagaccacaggccacgccctttggcactgcccaaaactgaaacaattttggaaaacaacgggtttctggcacttatttcctactggtctaagcaagatgacagacctggccgaatttctcatctacatgaaacagaacaactcgaaagaggagatggaaacattcatgggattgagttggttggtttggaatcaaaggaaccaacgtattttccaaaataaaaagatttcttacaacaactggactccttgggccattgatttcatatcgaataccattcagcggacttcaaccaagataacaacaacaaagccttctcagaacatcagatggatcccacccaaaccaggtacatatatgttgaattgtgatgctgctgtgagtaaaaacaatcagaattttgccttagctgctgtcatacgtgaccatgaaggtatcctcattgctgctgaagtcgaacatcacacaggactggtttcgattcttcttgctgaaatttcagccattaaactgggacttaaactggttagatctcagcagaccaaaccttttattactgcttcagatagtgcttcagcagtgcaccaaattcggctgaatcattcttctcgggcagattgggggactcatttgattgaaattttttcaagtaaccttttagatggttgtatagaggtgaagtttgtaaatagaacatgtaatgaggtggctcattctttagcaaattgggctttgaatcatagatgtaattctttttggtcagaggatattccctcttgtgctgctgctatattgaaagcagaaaagcctgacctgatgtagttttcttttgtttaataaagcattttttcattcaaaaaaaaataaaataaaacgctacaatacttcttagttcttacttaggctatcattgttagagaaatattattatcatcaaatgatttttttgatattaccatgaatcattctcctagaataactaatgaggtgttgttcattatttatatttttaggattggaagatgataatcttgtctaggggt

SEQ ID NO: 299508 - DNA, 9663 bp, Cannabis indica
ttattggtatgagaaaataattaaattacaattgcaacgtaaaagaaaatgaacagaacaaaaagagagaagaaagcaatctgagagagagagagagatactgagaaagtgtcacatggtggagtcctactcagacttttagggttccttctccaacctctgaattcccttttctttttctcacttgggttctccacattctccatgaaagctcccattttcttctcctcaagcttttcttagtgcattcttgtaatatgaacaaggtggcatagcatcatacattgaagtgtttgtacgtgaatccttagttgaagttatagccatggaggaagatgataaagttagaaggcttaacattgttgtggtttttttgtgtcttttgatgaggctatgttatggtgtgacagaccccaatgatgttaaggtgttaagtgattttagagaaggtttagacaatgctgagcttctcaaatggccaactgatgaggatgatgatgacccttgtggtcctccttcatggcctcatgtgttctgtgttggggacagagtttctcagattcaagttcagaatcttggtcttcagggaactctgcccaagaattttaaccaactctcaaaactatctaatttaggcctccaaggaaacaagttcagaggagaattgcctagttttagtggcttatctgaattggaatttgcttacttagacaacaatttatttgatacaatcccatttgatttcttttctggtcttaccaatataagagtcttggctttggatcacaatccttttaatgccactactggatggtctcttcctggtgatttggcagaatcagttcaattaaataatctttctttagttggttgtaatttggtgggttcagttccagattttctagcaacattgccttctcttatggtgcttaaactctcatacaacagattgtctggtgaaattcccatgaattttggaatgactttgatgcagattttgtggttgaatgatcaagatggtgagggaatgactggttcaatcaatgtaatagggtcaatgactttgttgacacaagtttggctacatggaaatcaattcacaggaatcattcctgagaatattggtgatctttcttcactcagggatctcaacctcaatggaaacagacttgttggaataatccctcaaagcttgaccaaaatggagctcaacagattagacttgagcaataacttgtttgttggtccaataccaaagtttatgtctggtaatgtttcatatgcttccaatttcttttgtcaatctgagcctgatcttgaatgtgcaccagaagttaatgcacttctagactttcttcatcatgtaaattaccccgaaatgcttgtctctgagtggtctggtaatgatccttgtgccggtccatggatcggtttgagttgcaatcaagactccaaagtttctattctgaatttgcctggacataagctgaatggcactcttagtccttcacttgccaacttaacttctctgctcgaaattcgcctttcgggaaactatttaaatggcaccattcctgagaatttaactgaattagagcatttgagactcttggatttaactggcaacaatcttgagcctccaattcctaaatttcggggtagtttgaacctcatcatagatggaaattcttgttattgcttggaaaccagacaacttcacctgctgccataccagtggaagtccattgcctggaccatcatcaacacctccctctccatctccatcaagtgactcattatcacactctccaacatcttatactccaccatctccagcttctgtttctgatgaagtagagtctcaaccgaaacaatcaaaaagctcgaaacaagttacaactgtggctggaatttctggtgctgctacttttgttgcttttgtgacactttttctgtctatatactgttttaggaaaaggaaaggaagcttagaggctcctaattcaattgtgattcatccaagagatcaatctgatccagacaacatggttaagatagcagtttcacataacactacaggaagcttattcactccaacagcatctagttcaatcagcagcagtggcactgagtcaagacacattgaggctggaaatctccttatatctgttcaagttcttcgaaaggcgactaaggatttcgcgcctgagaatgagctcggtcgtggtggatttggaactgtttacaaaggggaacttgaagatggaacaagaatagctgttaagagaatggaaggtggattaagtagtaacaaagtacatgaagaatttgatgctgaaatagctgttttatccaaggttagacataggcatttggtttctctcttgggttacaccattgaaggaactgagaggcttcttgtttatgattatatgcctcaaggagcccttagtagacatcttttccattggagaagcttatgtttggaacctatatcttggaaaagaagactcataattgcacttgatgttgctagaggaatggagtatctacatggtttaactcaccaaactttcatacaccgtgatcttaagtcttctaacattcttttgggagatgattttcgggccaaggtttcggattttggattagttaaacttgctcctaatgggaaaaattctgttgcaactaaactggctgggacatttggatatcttgcacctgagtatgcaggtatttctttatcaaacatggaaaaaatgtactagaagttttcttttgtagaatttgagccataattttcataatgcaaatagagttagtttcaatttcctattctaaaaccaatctttttatctacacagttatgggaaagatcactacaaaagctgatgtattcagctttggagtagtgttgatggagcttataactggcttaacagcactagacgaagggcggtcagaggagagccggtacttagccaattggttttggcaaataaagtcaagcaaggagaagctcatggctgctgttgattcaactcttaataatgcagatgaagaaagcatcaccaaagtagctgagctagccggacactgcaccgcgagggaaccaaaccatcggcctgacatgggccatgttgtgaatgtgctctcaccattggttgagaagtggaaaccagtttatgatgaattagatacttgctctggcattgattataggctaccacttcctcaacttcttaaggcttggcaagaaatagaaagcaatgaggatagtattagtaatagctattgctacaacaataacaatctcaatgacagcaaagggagcattccagctaggccaatgggatttgcagactcattgagatcaactgatgctagatgagttttaaaatgttggtaagaaatgttccatcaatggccttttctggcatacaagatatattatacatgttgtgctttctaggccatgatagtgttaatgaaaaatattgaattttggttcccacatacagagagattatggtgctcaaaaggctattgtggatgtggttttggactttgctttatatttcaaattgtttgagacaacattgttagatgggagagactatcaacattgagatgtgtcattaatattgtgtgttacccgttgtaaaattctgaatatcacaagtgaaatttacacttgtaattcgtaagttgcgtatatacaaattttaagaatgaataggattatttttagactatacaaatcattgcaaatgtttctctctgttcatcttttaaaagggtatatttttcaattgtttttataattgaagagaaataataaactcaagaggcaaaactcaacaagatcataattggaggcatataaacatctcattttgttttctttttatcagagtaccatgtatatttttggttgcatatattatgtccaaattttatttatcaaatttaagtctataacatttgtatgtacaattttatattacaatggactaaattaatattatcgaaaacataaacacagtatcaacataaacatttagcaaattttcttactaatactacacacagtttaaattataaacagttgtagaaagactctgcttctagaggtgccttagtcatccagccctccttcgggtctactcttattgaactgattgttgtaaaacccgttgttgaggttgcggaggcccccatttcagtagatgatgatggggaaggcatcgtattcttagagaaagttgttagaactttaaaacggtcttatccctctttagttgtggaaaaagaggctaagaaggctaggaaggagaacaccttcggttctacacattcccctgatgccaacaacgaagactcttggtggaggaataaggtcaaggatggaaagaaggcagggaaggagagtgaaaaacactcgaccatcgaagctgagcccaaggacttgcaagtgagttcaaggccttagctatccggagcccaaaaataacagcctctgaccacacttccctatatcccaaacgctgactttacttagcccatccggtccaccacgaaacactttgcaaaagttcagaagaaaactaaagaggttgagacttggcccgaaagcacaggaaacagtagcagattgctgcgcaaaggaaggcttcttccttgccaccagacagaaggctaagctggtagatgaaggcaagagcaggagttctgggctagtcgtggattgttcggctttgtctaagtatcttaagcctaggttcaggagtgatactgccccttttgtcacaaagatgatagagttgactgcgaatagcatctgtgacctcactcctgaaaagtgggttgtgatattcagttttgacttcgtcctattggcctgtgctgctaaataacatgttgctggagtaagattttctttgcacccttgctaagtatgctcattattatttttcgtctacatcaatttatcctaacactttttcttcttttattattctaaattattgtgcttgttgaaagggcatctgactctgttaatgccacgacggtggaactaaaccaatttagggctaaaaataagagttagctttcccaagtagaggaggcatcgatcaaagctgagtggagatctaaagacaagcttgaatattatgtcaatcaagccactgaatcttacaagggtctgatctgatagcttgaagctgatttagctactgccaagactaacgtggaagtcacttctaaggagtctaaagaggtttaggagcgtgtcgacattatagaagctcgagtgctggttagatttaatgagctcaaattgaagcagattgaagtcaatgccaaagacctcgagatgaagaaaatcacgaaagaatttgagtccaagaggctaagggtactctctttggaaactgaattggagtcagagaagacttggaggaggccactccaaaatatggagaaggactggactgctgaaaggtctaaggcttacgttgtggctgggaccttgagcaggttagttgcatcgtaccctcaatttatcaaacaatcccagcaactcgccaataggacctggatcgagaaggaggaggaaatgagggtcacccttcaggaagttgtagaagaaaaaatgagggaagttgttgaagctgcggaagcgtatcgcaggcgaagtgtagatctaacccttgtgaacacccttcattatttgtggaaaaaagacccaactatcatgaagatccttggggatgaggaagaaatttctttggctaagatgctgaccataaaggccaccgcattagaaccacaagctgttgagtcttccggggatgatgttgataagttggaccttggccaacctccatccaactaggtttagttccaaaaaaaaattatttcttaatatctcattcttccaatcttctttttcttgggagtcgttgacccccccttttggtatttgcagagaaaatttacatgccttaactgcgaggctatttgtaataattttagtcttttacctttaattatcttcattccaacctgtctatcgaatattgctagttacatacttttctttcaggctatctagaatgtcttgagttttaggttccaacggtgtgaactctaagacttatgtaatgactgcatacttagaatttagattagtagggcaattagcattaattatttatattttatgattatatgtgattatatatatgtgggccctattttcaagaaatatgtattaaggttataatttctcaattctagagattttactaaactctaagagtatcatatatgatatatgtgaaaaatagtatttttaagatttttgctcagtaacgatagaaatgcgatggtttggccattagagtcacgcaggtttgggttagaacctttgttttagtgggacaattgttaactattttttagcttaagtttcgagtaaatttttaaagttgttttcattgtttgttattacttttaggactgttttacggttatttttctttgttttcgattcttggggttttaaaaggacatattcattaaggctcaaaaggacaaaaacgggaagaatgagaagaaaaatcaagaaggaattgctaaagctcgccgcggagagcattattttggttgcaactaatagtcgatgcgatgagcatgacttatggtcgcgatgagatggcttacagaaagcctcaaattcgactttcttaggtcgtcgtgactagaccattcgtggtcgtggtgacgacattcatacagattcgatggcagttttgtataactgttattattacttggaatatgtttatggatgttgaattaggtgttctggagagtttggcacgatttggggaagttttgagctagttttcgagttttttggattttctacagagaaacgattaactatttctggaaaaacggttaactggtttctcaggaagaacccaagaaaacagtttaccattttgggaatttggtttaccatttttagtagttttgaaatctttatatatgtatatatatattttatcgatatttagggtattgtcatgctatttatcgataggaaaaattgtagtttgaaatttaagtctccaaaagtgatttagcatatcacttatcagttttatgaacgttgtgacttaggggcctgaaaattgtcgagtagcagtttctactcaggttgatcgacacaccataattcgaaatcaaggtaagattagtataataattgcatatgtgtttacatgtttagtgtgcatgtttatgaatgcctgttagataacatatcagtaatggtagtattagtgtacatagagttgcactgaatactgacgaatatatgtttggcatagtataaattgacgatattacattagtatacctagagtatcgtgtataggctgatattatagtcaatagtactgtcatacgaacatttgaaacttagtacacgtgagatgtgagataggattatgattgggtgtatggacgcctaattatctgggttatgttatactatgtttatacttttcactgagtttgtcaactcacagatattgtttacatgtgtaggtaagagcaaggcaaaggctgaacaatagtcaacctgagctaatgaagatcgtacatatcggggcaattagacatggagtgttcgatcttcgagacaacatgccttattttgatagtcactaggcgacaacttttgtaattaagtattttgtaaaatagttgaagttttaaaaatgagatcccaaattatgtaaagtatttttatactcaagtttagtgtttaattatgaaagtttaaatcaatcacacttttcaataaactcgttgattagcaatagagtgcacattaaatattaaaattacgataacatgcctaaaactagtagggtgttatagtaatgatcaatagtagatcgacctaaatcctgggtaatcgggaactcatgttcatgttattagtttctttgattcactcgttaaactttctaagagaatatgattcttccaacttctgttttgaaaatctaataatatggatggctggaaatataatctacaattatggaatcctaactttcctaacaaattaaatattacttctttttaagtattaattctggaactgaaaagttgtgcacaaatttagattggatctaaattacactttcaccagtgaattaatggtactaaaggatataaaagtaataagaaggataaaacagtaatttgaccaaaactaattacgaaccgaaacaagaagagctaatcactgaaattgattatatcaatagacactgcattaaaactcagtaaatataattctataattattaagagtttaattctatatttatagtgagtaatcatgtaattaataaacatgattatttgattgatgagattcaataaataaatctaatttattggagcttagaatagtgcatggtccccggatcattaccttaaaacactatcaagggtaggataaatgttgtatatgaaagttcagaaagtaatttttttatttttgtaataaataatttattttttaaattaattaaataggaaaaaagacgaaagttgtgaagacaaaagacacattccttgtcgaaacacactgcatgcgtccacatgtagagtgtccctattagttttatctttttaggttaattaattaatttaatggataaatatttaaatattaaatgtagttgagatattcttttaagtcgttgagaaatcctctcaatcggtaattagatgtatatatctataaccgatttcggttaaattatttattcaaataattaaatataatttaataaataaatgtattaaataattaattaaataaaaattttattggatttatttaaatatactgtataacaaagttgtgataaaaatcttttttctctccatcacataagaaatagttcttgctcatgtgttagacttatacaagaacttcatatacactttatcctagtagcccatactactccttgtgtgtggtggatcgatctggaagattacagtgtgagatttattggatccaacttatgagaagttttgaggatacccttatattcatcaagaagtatttatttctttcatgcaattattttttttagagtttaatatgtatatatatatacatctggagatctttggaactatggtacaatgataatcagttaattattattttattgtgtacctgatttgacaccataaaaccaataggcctatgctttatcttctgatccagctcctttcaaattctagaacaactgagcaatctcttcgttcttcatctggagaaagaagaaatcaatgaaagcaccaatgttagagaagttccttccttgagacaaggtcaatctcccacaacgaatcaattgcttattttatttcataactgaaaatcataataattatagtcctcaatttaatctgtaaaattattcaagtctaacagaattcagttacaaaaatctcactcacttagagcatgttggctgtgttttcagtttttagtttttaaaaatgagaatagaaaacagttttttttgtcattttaaaaatttaatggtattt

SEQ ID NO: 299509 - DNA, 998 bp, Cannabis indica
gaaagcaagaccaagtcttgaagatcaagaccctggttggagaaaagtgtctggagagtggtaaagttagcagtgggagctgggatcatgttgttggcctctgttctgtttgagattctcccatctcttctacctgttgggacactccatgatggacctccctgaccaagccaataagaaatttataaagtggtgaatatatgattaatttaacaggtggaattagatttgataattaggtttaaaaagtgatgagtttcttactattttgacaatggcgtctcttgtagccaaagcaataacatcagcacaagaaactactccagggcatgctgcttctagcaggctctttatgctatcaatgaagcggaaacctccgagtgttagattagggttggcatctttttcacctgaatttggggaagttgagttcagaagaacagaagcatcacacccctttaagccaaaagaaaaagaagaagaagaaattagtacacactttaattttgaggatttaattttggtttcagataatgaagagacaaaccctgacgaaacaatcatggaattgcattcttatgagggatgaagacatagcaggagctttagggatgttcttgtctataaaatcctgaacaattttctcagcttgggggcaacttttggaataaaaacccatttggagttgagcttgagtttgttgtacaaaagctgtaaggcctaaagtgatgaacacaaaacagtatagcccactcattttcattttctctctatttactctttttttagagtatggagataatagacaatgttactgtaaatgtaaagcttgaacttgtgggcttatctctggaatagggaaaggaaatgtgtatatatatagaaagatcactctccagtccagtactacttgtgttgcaaggtaagaagcaagacaggggatgaggatggcgatgatgataatagaaattagtattattatataatttaaaaaaaaa

SEQ ID NO: 299510 - DNA, 3679 bp, Cannabis indica
taacaaattagaggttattcttgaatagagtattcttaaatagagcttctactgtattagtttagagataaaatattaaggtatttaatgcatatttttttaaatttccctaaattaatatagattatggaacgacaccctaaatggttttcgctctaaaatttgagtttaaagattaaatataaactgaatgagagttggaatagttgaaccgcaaattactggtaaatacatattaaaaaaatataattaatgcagcgtggtgaagcagaaatgtataatcatcaatggcggaaccgtgatcaatcaaaccaagtgttctgagctcttacaaagtagaaagatatgactttgacgacggagcttctgaaacttcccatcgtcgacttatcctcccctgaccgcttatctacggccgctacaatcctacaggtccgctattagataacaatatttagttaatatttattcaaacaaaatagataaataaataaattgatagatatcgcggaatcgtcacttctggtaggcttgtacggatcacgggttcttttatctggtgaatcatggagtggaggaggagcttttccagaaggtttttaacgagagcaagaagcttttctcactccccttggaggagaagatgaagttgggtcgcaaggatcatcgaggctataccccacttttcgctgagagtcttgaccctgatttggcccccaaaggtaatcgagtaactgtttttagtgtattttagtgattgttcttatggctttactcaattttgttttgactaaatcaggggaccccaaagagagctattatattggtcctttggaagaagattctgctccagttaaattgaatcagtggccttctcaaggtaccaatacatacagtacatgatgtaatttctatgtgttggagagttaatcatatggggaatttgttatttcgaaaatgcagaaactctaccttcttggagacctacaatggagactttctacagaaaacttgcgtgagtttttcattgttgtcatcaatgtttttatgcccaattcgaattctctcctgtccaatctatatatgtgccactcatattaaagaaagttaagaaacttgcaagttcgtttcaactttcataattttgatgtttgatgggacaagaacaacggacctagtaacctgaaaatgttctttattgcatttgagcatttaaactatgtgcaaatgttggttgatttatgcttgttttagagtgtgttatgtattggattggattgggtgtgtatatttgattcgttttaggtgtgctgggaataagttgcttcgtttgattgccttggcactgaaattggaggagtctttctttgagagaatgggaggtttggataaaccaacagcttatcttcgccttttgcgctatccaggtttaacatcactattaagctatttatcttatgtacttgtggcatattgatcttaaaactaattgtgcatttattgatatctacgtttcataaaactattaaaccattgaaattgtgcttaatgacttgaagaagagtcaagtcattgaatcaagcagagtttttctaagaaccagtgtataaaattattagtattcaatttttgtaaccatattatatctgttttggcacatcatggcaaatactcgcactgtgcaggtgaagttggatccgccgatgaaaatgtatgtggtgcttcagctcattcagattacgggatgataactcttcttgcaactgatggtgttcaaggacttcaggtataattctaattgattaacttttcccatcagcaattttcgtcccttgcattgatatgtgctaggtttattgcttaacagatctgcagggaaaaattcaagcaaccacaggtctgggaagatgttcttcatttggaagggtaagtcaatgactataaaatttattgtaaatggctgttttgttattgattcagtattctgcatgctgtaacattttaaagtgcacaaatcgggcagtcggatgagtttgatctgaatggccatgcaatttgtagaactaatgtagattatgatgttcatgccttttgagaatgctggttttcttattcgaaaaatttccatattgaaaccagtccttttttttgtgtgtgccttttttatgtgaagatttgcaatttctagtttgccaagtgcattaataaataatttaactgttgcaatgttcttaaatgatctaactttacaatgcagagcattgataattaatattggggacatgatggagaggtggactaactgtatgttcaggtaagttctttttgtacactcgaaactaaaactgtactataaactatgttttaactgtttttctgctgacattgtcacatctctataggtcgacactgcatcgagtgatgccagtagggcaagagcgtttttctgtaagcatctatctcccataaaagtttctttgattaagtaacattataatgtgtctaaaagtatagctcgagggagtttttgtttgataattctagttatcgaaattggaactttcaggcagctttcttcttagatcctaaacatgattgtctggtggaatgcctagaaagttgctgtagcgagtcctctcctgcaaggtatagaaaactttcttatactgttctacagatagtcccttccaattatatggcataattcctcaaatatgactgttgtagttgaactaattaagtgaaagatttctaggtataaacattcctccttgttgtttagtatttcttgtcattaaattgttttgaatataattagctggacctcttaaaaaactctgctagtcctagtcttgatttgctaaatgttcctccataacttctcatgcttgtttaactcacagaagcacaattttacccatttttaagaagtattctcattgaaagattcatttgattgtgaaattgcttacagatttcccccaattctaagtggcgactacctcaaagagcgatttaggctgacctataagtcaaatcttgaaagcatagtctaaacgatctaaggctgcttatcacggtaaaatatcgcacaacaagattgtatttagtttatcatttataattcgtgtgcttctatagatacatacattttcttttgactatttaggatttttgcccccaaagtatgacacatgcatgattagtgtgctccctgattttttcacctcgttaaaagtagtcgttaaactattcagtgttgtaaagtgggacttctgttaggttctgtaatatgtggctaacagaatgttgacgtgaatctttggtgaaagatatgttattgttacattagcgccacatgtgtaattatttttttatttaaaataaaacacttaaaagaaactaataaaaatatattttttaaataatataaattaaataaaacttaaattaatcaatcttgagacaatatgatacatttccataatcccaacatttccttgactcttatacttcatgttcattaaagaaccacgaagtgttgtcatttcaaccatatcgtttttaacagaacgttcctcaatttgtttaaggaaatttttggccatagtaaccctttcaaattctgtgcccctaaaagcttctggaatggtgtgttttataatcattagactcatgc

SEQ ID NO: 299511 - DNA, 5863 bp, Cannabis indica
ttggggttgaatagtcgctagagatttttttttttttttttgctctgagaccatgttagaatttggggataagatgaatgaggtttcatcccaaaactaattggcaatgggaggagtagcccattcctcttatatattctattttctttccacacattagcaatgtgagactctctaacactttttttattatcttattgtattattattttatttacaccctagaaaattataaatacaccttaatatttttgaaaaaatagaaacttaaatcatttttaaaaaataattcataatattttttaatttttttacattattttatgctaattttaataattattttaaattttttcatataatttttttaaataaatttcattgaatgctttatttaaaaaaaaattgtcttaatatttaaaatatatattactcttattgtatatgagtatttttttaagaagaaaaaaatttaaacaatagcaaaaatttaagaatataattttggaaatttctctaatacaccactaaaggaaatattctggtagaccctgtttattttggcatttaaaaaaattttagtctattttttttataattacgtatgttgtagctacttaatacacgtaaatttttagaaaatttaaaataatttacagtttcaaaaataaaattcaaacagttacttagtaactacgcttttaaaaaaaaacaaccgtgcgtgtaataaaatatttaaattttatttttaacattgtaaattactcgaattttttaaaaaatttatacataatttatttaactgtaacgtatacaattataaaaaaaaaagttaaactgaaaaactctaatagatgttaaaacacataaagaacccactaaatacactcataaatctatatatatatttttttatatttttattaaatggagtctctttctctctatctctctttggaaaaaaaaaaattaaattattatttaaaatatattttattttacaattaattataattttttatattaaacaaattactaaatggagtctttttctcactttctctttcctttgaaaaaaattaaaagttaatattttttaatagcataattaaagatataattttttattaataaaaaaattaatagtttagtacatgttaaagttcaaaaagtacgatatgataaatattaatattttgaggcacaattcaatagatagacaatcatttaatcaaaatccaataaaaattcttcaattcaataatctcaataattttcgaataatttactataagctcgtttagaatattatattaaatcgtattttattgtattgaattggattatatattatatttttatataatattatataaaattttaatttatgctaaaatataatatatttaattatttataaaaattaatttcacacataactttacataaaatacaatttaatataatactaactaacaaaaaaaaaaccgtgtatgtttaaaattcaataacaaaactcataattcgctctgagaatttagcggcccatggcttggcaaagcatgctctgcggttagacgatgagctatcctggttcgaggaggttccaacgccggtggcggacgtggacgtcgtaaattcacgagtgattttaatcactttgtcaaaaaaaaaaaaaataaataaataacaaaactcataattagcctaataaaaattattaaatggagtctctttctcactctttctctctccttggaaaaaatagaaaaagcaaacctttcttcttcatcatcttcttctacttctacttcatctacagaacagagcagagaaagagagacaccaccaatgaaagactctcccttttttctgaaactgaaaaccctcaactaaaacatgccctctcgactcataatcccaacagttccgtcaccggcgccggcgccggcgccgacaccgtcaacctcagccaaaccccactaccataacatccctctactccctcccttaacagctttctctttcctcttcttcttcctcatcatatgctgtttccgtaagaagagaatcgaatccccaaaaccaccacctcacagcctcccttattccgtcctccgccgcgccaccgactcattcgccgcctcacgccggctcggccaaggtggctttggcccagttttccacggtaagcttccaaagacgaatcaagagattgccgtgaaggttatggactctgggtctcttcagggagagagagaatttcaaaacgagctctttttcgctgcttcgatgatgatgaagctcgatgactcaaaacgacatgtcgtttcggtattagggttttcatctgataggaaacgtagaaggatgttacttgtttatgattttatggagaatgggaatttacaggaggctctgttgcataagaaatgccctgaattgatgaagtggagtaacagatttagggtttcgattgatatagctaaaggtttggaatttcttcaccatggattggatcaaccgattattcatggtgatattaagcctagtaatatacttttagataaaggttttaatgctaagattggggattttggtttagctaggttgaagaaattggattcccaaactgagttagttgttgttgatgggcttaatggagttaagaagaccaattgtagtgatgattatggcgaaattgagagtgtaactactggatttgaagattctaatgtgaccccttttgatttttcaccagatgtttgtgtaaaggttgaatctttttctcctgagccagttgtagtaatggagatggagtctccggtggtggcggtggaggctgagtcttcgcctgagctggttcagaagttaagccctttgaatgtgaaagagtatgtgatggagtggattggtagtgagattaataatgagaggcctaagattggaacaatggcgggatcttctagctttgatcctgtggaaaaaacaacagaggagatgaagaagaagaagaagaggagtagtaggaagcaattggattggtggatttcgatggatgaagagaagagtgcgaaaatgttgaagaagaaaaaggagaagagattaaggcctgggagggaatggtggaaggaagagtattgtgaagagttagctaagaaaaagaagaaaagaatgaagcaacaacagaaagagaagaatgataatggcaataatggcgacaatggcgacgaatggtggttagatgatgaggaattgtacaaaaatagaagaaaaagaaacaagggtagtttagattggtggttagatgggcttagtggtgaactcaggcgcggttggaggagtggtagtcatgattcgggtagtagtgaaatcccgaaaagtgggggctatagtagtactactactcctagtatgaggggaactgtgtgttatgttgcccccgaaacaggtttcgggggaaatccatcagagaagtgtgatgtctatagtttcggggtcacattgttagtccttatagcggggaggcgtcctcttcaggttacagattcgcctatgtctgagtaccaacgggcaaatctattgtcatgggctcgacatcttgctcgagctggaaaacttattgatcttgttgataagtctattcaatgtttggataaagaacaagctctactttgtattaatgttgcattactatgtttacaaaagataccggctcgcaggccttcgatgaaggaggttgtgggaatgttaactggtgaattggaattgcctcagttacctgatgatttatcaccttcaccacctcctcagtctagattcccatacaagtctcataaaaaggtatggtgagctttctatatctaaggtcttgtttttgatgttttgttttataattaatgttaactgtagaatgcaatactctgatgatgatgatttgtttgtgtacaaaggaaaagaaactatgatatgatatatatagtttattacattttacattgatatcaatggagttgatttatttactttaaagttctttccatttttggtgttttttggattggcaataccatctatgaacatccaatgcaaaactcaaaacatttgatttcgaccaaacttttctttttcgaaaaaagagaaagggaccgatcacttgtcttagactaactcaaggtcggccctaagcatagacatagggcccaaaataaaaaatgaaaggttttatttaacttttatttaagtaaaattaagtgtagtataaacaataaatattcacagtttgattggtatgacacgttatacaatggtgcgggttcgagtctgggctggtcctatactgacccccacatcctcacttgtggcagagaaaaaccatggtaacaaaagagaaacaagaattgagaaaaaattccatacaaaattagatcatagtttttcattgtctacacaagtctaagaatgaaaatttctcaaaatgattggtcttaaaaatccaagtggctttccgaaatttgatcttcttccataaatcttctgctgaactttcagtctgttatttctttccaaccaaaaacagccccataataaagttgccaagattgcagtccaccacaaatttaatcctacgtttgcttgcacttaacttttctatatcttgcatagttttcaggagcgtagtaatgagtgtttttgcttttttttggcttagttgatttatttacttttaagttctttccacttgtgctgtttttgcatccaatgcaaaatttaaaacatttggttttaacccaacttttctttatcttgcatagatttcagaagcataatcatgagtgtttttgctttttgaacatgaaccatgctttagtgattttagtcttctagaaacttgaacaagtggttttggctggcaagacttgtgaaataaaggtaaagaaaaaccaagaaaagaagcaactttgcttttttatctttagagaattttatgcccaattatggttgtcttgttgttatgtgcacttttttaggtttgactaagctttttttgtatgctatttttatttttgtacttggtcactagaaagagttattcatattaaaacacaacacaacatatattatgtttacaccaacaaacagctcaagtgccctgtaatgatgtgtaattatggttctgtccaaaacttttacatgagacaataattgacattgatacttagtccatatcaatactgtttaggactctttgtctgtattatgttgtattgtattagtattatttaatacaatattatattttgtattaatatgtttgggatttgggatcggaactgggataggtcgagactcgggttcgagagcgaatttggatctaggtcgccaattccggaccctttgtaaatattataatacaaactaatacaaattatttgttttgtattaaatattatgatttacattgtattaaaatttataatcgtaataattaacacaatacaatattttattcaaacattatattatttcttatttaaaacaatacgactcttatacgacctaaataaactcttagtctccaactttgtacatgttgttgctttgcttgggcaaatataaggcatttcaagttcatggttgatctcttctgttctctttccctaaatctaatggttgtcattatattccaagacttttgccattaaattttagtaatgatttaatatacaatgtgctcgtttggtatgtcgtattgtattatattgtattgtgttaggttgtattatattagtattatttaatacaatactatgtttggtattgatttgtattaatacatcgtgtaaagtcataatatattttt

SEQ ID NO: 299512 - DNA, 567 bp, Cannabis indica
tttttgttgtttttgtgcatttgtaaaattaacccttgatttaacactaaatttgagtttctccattcgagttgcccttagtatttgatttattttgtgttaaaaattcttaaaggtaatcagttacttttcttatttagaattttattgtttgttcagaagtaactagctctattttatagtttgttctttagatatagagatttttcgtttattttgtttaggtaaccggttacgtaccttcgtttttattttttttctcttttatctatttgttttgtttcattgttaagtaaacaattattctttgatttttgtttctttttgtatatggggttggggtttatttaggttttaaggtaactgttacctttctaattaaggtcgttgataactttttttactataattattgattgccttagttgtattagccttttttaatatatatttataggacaagattatggtaggacttagcaaaagttccctaccggtagggtactttttccaaccattaattttagatcgtatggttattatcatataaagtgtatacttttacga

SEQ ID NO: 299513 - DNA, 3053 bp, Cannabis indica
ggccataggggaaaaaaaaattttgggcccttatgttagaaaaaatgtagtatttttcaaaatcggtaaaaaaaaatgtataattttaaaagaggaaaaaaaattttgggctcctaggctgggtgggccctaggcacacaggcctagtccgcctatgcctagggctgggcctgcctacggatcatgtcagatctttcttttaaaaatataacacgacacgacactagctatatttttttttgtaacagacacaacacgacttatttttttaaagaacacaaataaatgcggacttagccggagacgcataaacttacagcaataatcacaatccaacctcaaattattctatcggaatatcaggtatccaaatttgtgctttcaataatatatttataaattgatttgtgtatttaattataaaccgtagtagtaatagtcgtatatatagtgaaaaatggacccacagtagtataaaataatatggatttttataaaataataatatcttaaaacatttaattgaagaaaatgaatttataagttgatgccaccaaaccaatatatccatgaaaatacctgcacattaatcttcccttgccagctgtccagcttctatcttttttttcttcttttgaaaagagctctttaacagttctatctactttctattaatttctcctctctctatctaccattattggatccctctggtctggtgagcacattaaattattattatttaaaacaaaatttctattgtttgtcaatgtaccaaaatcttttttttttttttatttctttcttttattacctaattatagtgaatttcactcatttaatatggtcatcagcattaattaacactatgcaaaaagtcaaaaattacgaaggagaaaaaaataagactgagaaaacatgtctcatcaacataatataattcatacaatttttacgtttttttttatattaggtgattatacttagtcatcatcttatttcttatttacctttcaatttgttttatagcgaaaatctcatacgaactatcataatcattgcaaaatctcttttgccgcatacttttgtatgctaaaatatcatatttaagaatcaatacaaaaaaaatcatacacaaatagtggtctaatacatttaaagaatatattaaaattttagttgattaaatgtactgtaaatatgtctatcaccacatgggcaaattattccttaaaaaaaaggacaatacgtggcagcaagatgagcaagtttttattaggtgctatagttgaggggattgtttttaactttttaccacacaaaaaaattataagagaaataaattctgatctacaagtacgaacgataattgaagaggaaaaaaaaagatttgtcctaaaagaaaatttatcatttatggcttacattttgattttgattaattttgtactatacatataatacattattatgtacacgtgaaacctacatatatacatatatatattttgtttgtttgtttgaaaagcgtggaacctaatgtatctttttcttttaactaaactacatttggttgatttggctatatgatcatttattagagtatattgtggagacatgtataaagaaagacaatatagagtaggaaaaggggtattcctttttgtttttattcattttctccttcttattattttaattaattgtgtatgtgctaaggtgacgtagaaataaactaaaaatgataataaagattgataatttattgctggaatgaacattgtaattaaatttcatttgtattcggtttagtagaagaatataaaaatatatattgtcaaaaatattcctactttaatttagtaaataagttatgcaagggtagtcattttttttaattactttgtttagagcaactccaataaaccctcaaatttgaggatgcagtggctaatcttctcccaggtagcaccattttgatgcacaatatgcagtgtttgctacagtgcactgcatatatgcagtagcactgtagcaactgcatctttttttattattattaatatttaataactgatttttgtttatatattgtttaatattaaaatatcttatattttattaatataataataaaatatatttttggtgtaaattttagtgttgtggttggagtagaaaattttttgacaccaaatttggtgatagtgtaacaccaaatttaatgtatctttgaagatgctcttagttaaaatgtattattttattaaaggcaacaatgtaattctcattaaattcacttatgcatgtgatgacaattacaccatacattgcatctcattaggacaaacaaaaataaaaataaaaacataacatggtaaatggtaatgggaactttaatcacattacaaattccattacattcaaccaaacactagggttatcagttgggatgatcagaaccataaattgacaactttctacaaaaattaattaataatagaggattccgtttatttatttgatgcaaaatatatatatgtaatatttatatgtatgaatatgatgaacccttgtttggttggaggcgaatccatatttggtaagtaataaatgtagtactagatttatggtgccgacttttagatcgtattaattatcttgctgtgaaaaatggctgtgtatactatcaaaatattcctcttgttgttttgaagtgtgtgataagaagtttgtaattctaatgagaaatgttaagcgatatttatattgcttagcaatttgaggaattataatattattattggtctaatttaatattaggtctcacttgttttccttaaataaatattataataaagttactaaccaaatataaggtaatacgttgtcagtggtagatattatggtgctttataacaatgatcaattctaacgcaaaattaattaacgagtatagtgatctcataaaattatttgagctcaattattttaaggaataattaatgcatgtttggcatcaaaactaaaaactgtttttagtttataaaaac

SEQ ID NO: 299514 - DNA, 1917 bp, Cannabis indica
aaaaaaaaaaaacaaagcataagtttttgtttttattcataaaaaaaactgttgaacaccatttaacatataaagttagttgacatttattatcaaaaataaaaatgagaaggatataatttgaaacctcaggcaggccaatactaaattcacaaaaagaaaaagcaagaaacataagaatctattataagataagtaaaagtttcataaagagaaataaacatgactggcctaacaaagaaacaaaagtaaaaagccttttttgttcttcttttcattttcttgaaagaaagatcaaagttatgtatttttttttacttacttgagagatgatcttgtttcgaataatttctgatgaaatcgatctttccaactcgaacgaattactagagccatgaacatgaacatgatgatcatgatcagtagtgatcattacctcatcagaactaaaaggctgagctttattgagctcagacctcttatggtagccagtagcaaaggactccatcatcaatgtaccaatagtcgaaagcatagccacaaaccctgcaaaggggaacttcctccatggattttcactaaggcaagggcttgtcaagctctcatatgcatcgggaagtacatggatgaacccggttgataaaataacaccggctgcaaaggccttgatgaggaagtacatgtcgttgttcgggtttagagaaggcaaattcttcaccaaaaatggaagacatactcctagtgcaccacttgataggacagagccaatggcaatgagtttgtatgaaagagcttctgattttttatggtcttcaagttgtttttcacatgtgcatgttgaggataatactatggttggtaataatagaacaagggtcactacaaagattgttgaatgattatatggttggaataagaatttcaacattttttgttttgaggaaatttagatggaaaaacttgagtatataagggaaataactaatgtaagcagatgccagttctttgctgaggacaaagttttgaatgacatttattaaaaaattcaatagtaaaatctctataaaacaaaacaaaagattgaaattaagacataatggtatcttagcttaagacaattgataggaatatgacaagagagcatgagtaattctttgctgttatttttattatgcttaattgagaatctcattttcagatatgtggacaaggacaacacatgaaattgaagatttgcccatattagaatgtgaaggaatcttattcttcttcttgggttctcttatacataatttatgtacacaaggattgcctactttgtcaacataattttatgcagacatacaattatacaatcctaaaagagatgtaattccaagaatgtcagcaaattgtgtagggaatcttttatgaactttgcagcatagtttttatactatttatgctcattgggaaacctcacctcaactataatcattcttataacacttgacaattcttttgaagcatccattaaggagcattattttttatatcatttattagaataattcatatttttaattttgattttttaatcattaatgtaaaatgagttaaaggtatttaatttgtatttatttcacctaccaaagtaaaatttataagctattattttattaaattgttcacattgcacattttagtggaaaaacattctgcttatctatataatatatgtatattttaataaaatatcataaaattattttttaatataataaataaatacacaattaattattataaataatttaataatgttcaaaatatttttttatttatttttagtgacaatttttcaaatgatagcgaaatgactatttaattatcttttaattattgaattaaatattagataatctatttaattaaaaa

SEQ ID NO: 299515 - DNA, 1804 bp, Cannabis indica
tgaagctcctttacagctatagacagtagacacagacacaacacaactcaatctcatctcactttaattgaattgtattgtttagagaataggggaccaaccgccccaacacaagtttgagatggtttccagtctgcccatttaaatgcagctcaagtgctcctgtggatgtgaatgcgcagcgcaaagcaataacattcattcgtacataaacaatataaatctcacctattggttgtcttcttcttctaattcaagtcaagtcattattatatttatgatttatgacactttttacgagagagaaagtgtccaacaatttttattacttggctgtttttcgaaatttgaactacctacgtacgttgacgccaatgcgtgttgcaatagctctgaatcaaccattcttattttatttatattaaagtcaaacaataagaactatcatgtattaattaatgtttgctgaaattgaaggttgttaactgctaatagaggacagatggccctttttaattggaaaagggaacgattgacttccttatagctttgtacaatggaattgaaatgctttaaatttaaaagaaataagattattttttataagtatgactctagtagagtttaccatttaattctttttttgttgcaaaactctcttaccaattatacaaattgtttgcaaatattccttttagttacattacgctaatttataaaacaatttgtagctatgagttataggcatgggtaaagctactttgagtccaaataaaattattgtcccacctaaatttaggacccgttataagatatttaggacttaaataaaaaaatttaggcctccatacaaatacgtctcattcaatattattaaataatattatttagtgtagttacaaaaaatatattgatagagggcacattgctattaggtaatatggtgcctaacacccctatagggtaacatcctaaaaatagttagcaattttctacaatcattattaaggtaaaataagtaagacttgatattaaattgcatcaataacgattgacacctcttaggggtgctaggcaccatgaggaccctgaatgaattttatttctagtttcgcccttggttataagtattgttgcagtatgatgatctatttaacaactttaactagccaaacttcaatatattggtttatatcatacaaatattaattctaagaatgcatacacatattctcacaattcatcataattcattattagactgttatttatacatttattttttatctagactcttgaactaagctaaattaatattatgttagtgctacatcaacaaattatttatagaaattgagcaaaatataactaaaaaaattaattatagcaatttttatagtttaagaaaaatttttgcaacagaaaaaaattcatgggaaaaaactttacaaagttcatagttcaacgacaaattttatttacttaaaaatgcacatgcccagttcaatccactagtattgtgtggccaatccttcaaattggatgactaggctactaattaatcaatccttaaaatgtctacactacccactgtatcaggaaatcatgctcaacgagttaggagactattggaccggttaacggcgataaatttagggggtaagttgaaaagtaccccttttattaatcagttaatcaaatttatctctaattttatatttatttgaaacatacctttttttatatgaattgtactcaaaataccctgacataatgagagtcacatggagagtatcttgaagtg

SEQ ID NO: 299516 - DNA, 1432 bp, Cannabis indica
aactgattaaaaaagtgttatcaaacgcccactatatttatccattgaagaataaaatgagggactccacacatttgtatatgcaagtagttttattttcaaaagatttaaaactaaaaccaagtttatagatttatatattaaagactaatataaattaaaattttgtattaattaataaaaatgatttttgacctatctagtactagattattattattttattcttctaatttgactcgaaattggcctaaagtagatctgagattcttgaaagttgcacttagagtttgtaaggacctccataaattctagtgtaacctcaacctccactttgaccacgactattataccacctcgattactattattcaaggaaagattagcaaaattggcctgaacattcaagagagtagtggtggtgaattgatttatgtgaagtttatggactcaacggattctcatgcaatgttaaattgacaatgacaacttcatattgtcctagtcctccaagaatatactaaacaaaaattttattttcaaaatgtattttttaatcgaagatgatccttttttcttttttttttgtagcttgaagaagtccttgaacttgcataactcttgctcttgatcttggcagaaagtgttatgcaaaggtggtccaaatctcatatgaggtttgacaattgatcacatattccatcacaaaattcatcatttagtgcacaaaaaactgatcaaattttaattattgaaggtaagtaggatttggaatgttacttcaagagtttgagctggttgagaattgttctaagagatctaacatcagccaagatgagagatctccaaatagtatagtttgatctatctagaattagatttattgaaagaagattattattggaaaagcttacttgtagagcctcttaagcaggttgagtagcaatcggaggagcatcatacccttcaacttgacctccattgtttaaagaatttgctaaattcgacgtcattacagctctgataccatgaagaaatttagagaagtaaaataaaaaatgagatgagagaaataaaagtgcctcactcggtagagttgagctctgtctcttttatatagatcgagattcaacataataaacataatagcgtgacaatagttaggacaagctcaactgaaagcaaaacaagtacaacttaggatctcctttttgtgaggataagtgtaaaatcactaagctatgtttatacattttggctttatatttgctttattatataaaaaatgatttttcttttaataaattaaaaactatttttttggaaaattatataaactgttattttaagtaaaatatttacatatttatgttcaattttttatatatatattttacggtattctacaaaaatattagaaaacaataagaaa

SEQ ID NO: 299517 - DNA, 1922 bp, Cannabis indica
acttactccatgaaccctcaaaacccatcatactggtgcgtttagttttagttatttaacccttgccgtttcccaatttccattccttcacttccacgctgccaagcataaacttcccttctcacaacttcttcctaaatctagggcttgcttgattcttcttgttcttattgagtgtttagtatcatggatgtaggccacaaagcttaggagcaaattgcaaggttactataaaaggtgcttcttaaattttttcataaaaatactttgattttccaagtgtaagtttatttaaggcagtactacttgcaagggtggaggtatatattaggttatcaggccatggtccaccaccattttcaaaacttcgttcattatattatgaattagtaccatcctaaaaaaattgatacacgttcatatatttgggttgttgacttattcaattattatacatatataactaagtgtaagtcctaccaacagtaatactttttaaaataaaaatttattgtataattatgtattgtacttttactttctttatttgaattgaatactatgatatgttgcatttttttttatttcagtgtctaaaagaattttttggtctattttttatagtcgtgcatgatatagttatctcagatattttgtaaaattttataaaatttagaataatttacaatatagaaaacagtgttcgaacaatattttacacaagtaaaaataaaagagtcacccatgcaacaggttgtttaaactatatttcggcgtgttaactttttaaaattttttaaaattgtgcaaaatgtcttaaataactacaacgtacaaaattataaaaaaaatttaactaatttttttctcgaatgctgaaacaaactggagtaaatcagtgcatcatttctaagaaatattttgtataattttcctatgtatataggacatgtttcaattaaatgtgtattaattatttattttatattagacgagtaaacaaaatagtgcattcttaaattgatattagacacattttcttattctttcttactaaaaatacaagtaaattttggtacaattaaattgatgagttttctaacactttatcaaagcactaattagtatgcaggttttatttttaatttcatttcttgattcatattttctaatttactgtatataatacttataaaaattaaaaatatgatattttcttccgtcaatgtacttaaaaatgagttttagtcaccataatctttaattggttttgttggatgtgttattcatagcccctcctacaatctagtcctccctccacccctggctactcggtttcagtttctataactattgtgtttttttgatgtggttacagataatgatgattcacattccatcccataccagaatgattattcaaatcttgttgatgtttcaaaaacttgttttggtaataacatgtttgagattttgctgggagaacgaacactataaaaaatttacttttaattataataaaatttgtgattaaaagttaaaaaagtgtaactaattataaattaccattactgtattttgattaaaaggtctatgactaataaagttattaattctaaataataatcacaattaatttgttgtgactaaatgcgtttttagttacaatacttattgtgattaaaattaaattagtgataacttgtatctaaatactatattttagtcctaagtaacttttttattgtgattagaaattatatttaataaaaaaattatattctcagtaaaaaattatcattaaaaatagtttttttagtagtggaattataaatttaggtgacgtttggttgacaggaataaaaatatcggaataggaagaatgggaatagaaataggaatggaatgaaataaaatttaaa

SEQ ID NO: 299518 - DNA, 1202 bp, Cannabis indica
tttcagaaaaataaaaaataaaaaaattgagactaattaggcaaaataaaaacttgagtaagaaattaatcaatcacccataaaaaagataatattttttagataaaagaaagtattgtaataagaatattatttataacctacatagataaaacctaaacagtttttaaacaatgtgggacttttagcttgtttgtgtggtttagttttcaaacaaaataagaaaatgtgttagaaattaagaaaaataggaagaaaattttataaaatgacacataaactcttcttgtgctttcctttatattatatatagatttggcggagaaacttaccataataaaatttaatgaaattaaagaggaggaaataaatttggtaaataattcaaaagtccatattttattttttcacctttgaccaccctcccttgcttctcacatacaaaaattgagccttatatactaagaatactcacaagtttttctaaaatagaaaagttttaaaaatttcatagaaccatactaaaaatacgctatggtagatgctctaaattctttcttcatttaaagtttctttaaaatttattattcgtgttctacatttataaaatattattcattgctctaaacttattttattagttattttaagttttaataattacttttgtcatagagatagtatatattaatattatatacttgaaatgaataaattataataaaatttagaaaaaaaatgagactctagtgatatattttaaagaatctaatgtatgatataatataacagtatattgtaaagtataaaaaataaaattgatatattttaaagataaagtaaaaaaattattgggagtactctaaattgctggtaattataacttccataataccaagatagttgaaacctatacaactttattaagcttgtatttgctaaaaattgcttgaaattaaaaatcctgaaaattgtgatatgaatcatatgatgctacaatttatggtatatagtataacattaacattttaaagggaaattatagtaaatggccccaaatcataggagtatgttagtttatgtcattttttcaaaaaaatatagcaaatggtcctaaatcataagactatgttagtaaatgtccttatttcaatttattttttatttttttagaattagaagcaaattatttaaaacattat

SEQ ID NO: 299519 - DNA, 3409 bp, Cannabis indica
aatggaggttacttgatctttaaaaaaaaaaactgaaaagaaatcaaaaatcaaataaaaacaaaaagaaaaaagagagggaagtgattggaagttgattgatggttgatagggaagccacacgtgtctgtgcatggaattgatgtgcaagtggtatatgtgtaataaaagaaagaggaaagataaaaaagatgatgtaaccgtatggatttttttgtaataaattgtgtaaattgtatttttggtgtaaaaatttctttttattttatatgtatattttctaccttcaaattcacatattgttattttcttttttttagaaattgtattattttttgattttgataattatatttttttattgatattggaggaggggagattccaacttaggatatcctctttatgagaaaaagtgtgaaattactagggtaaatgtataactgcattttactaattatatttaagatagactaaaattgagcaggtaatttaattaaaggttattttacaacttaattaattcatatagttttcttttggatgaaagatgaaaaataatagagattcaacaatttttgtttacaacgaaaaatacattataatagtttttattttacgattttatctagcaagagtgtatagtaaagactaaatccacccacaaataattttggagacatgaaaaagataggctcctcttttgaattttgaatgtacaatgtattttgaaatatttgtacttaatattaatcaagtttactccttacaatttttttaataattggtccccctatgattaattccagcctcagcccctgatcataagtgtattagagatcaaaaaagatacaaattaagttttgtcctggtctgaatcatatgtagatgtagtgtggaatttcaatgtatgatgaaggccatgtgtgacagtggcagactaacaaaatcaccaccttagcttagttaactctttgcaacaaagtttaaatatggtgaacctctaattacttggtactttgggatggttcaaagtagagaccaaagtcacatttgtgtacatataacgtgtatatatacttaaagcaaattacctaattagttaagtgctgactcggacagtaaatactaaatagaaaataaaacaaaatggacagatgatcatattcttactgtcaagcataaatttcaacagctagcaatgtaattcaaatttagtaacagtacagcatatataaaatagataatgattacctaataatctaaccaaatttttcaataaaatccctgatttggtagaaaggatgaattacttataaaatatatttaatattgaggataaatgctgataccctatcaaatcaatattattataattattatatattaattgtcttaacatataattaagaaattaaacaaattaatcaggggcacttgggttttccctcctgggttttccaattgttgtagcaagggcaggtttccttgtggccgtagacgcctggaggaacgcaaaggcatgttgcgcaacacttctcgcagaagaacttgcatggcttcttgtgtgatgtcgctgagcatcggtaagcacatcttggcttgcagtctgccaatttatacaccatcatgtaaagaaaattaatatatatccatagaattataatttatttaagtactactaacaatacatatatatagataggtagattaatttctattcttacctatacgagcattgttatagtaccacaccattaagtttctataatatttattaaagtaaaacaactgagatttaatattaaggtacactacttatagtaatattacaacttatatccggatttctctctgtatagatcatgatacaacagtctgtaaataataccttgaggacgaagcttctgttgacggccatgagcctgatcagaagacaatacaaattaaaaaacgatgacttgaatcaagtgatgatataaaaaaaattgtacaagacaaagtagtatatacgggtaaccgtacctcagccacatgagaaaatgtgactaaaaaaagcatagcaatcaccaaaaagaggacggagctgtacggacgagaagaggccattatttttcaaagatatataccaacactttctgatgctttttcactcaacaactcgatctcttagtattgccaactctaggattttggatcctataatttatagtaggggaaggaaaaaggtgggatgtattgggttgaaagagtaaattgatttttatttaattaattattaacaaaataaaagcgtagattaaggcatgtaacggggttatgaaccttgtgtgtgcatgtgaaagatttggatggggaagagattgagcgctgaacgcggcgtgtttggtgttttgtttgtttggttttgctttcatactctgcttttctaagatttactttaaaattatttaattttttgtttcaagtttttttcccattaacatttgtatttccttttatagtttctcatttttggaatgtagcaaaacactctcaatttgatcttttctcattttagaatgtttaactttttggaatatgtttagtggattcttaatgttattattattaagaggtttgaaagaaatattgaattttaggtaaaggtttatatttatagtgccacatgataaaatttacatttttgttgtcttggtttttttttcatttatactgtaaacactgaaaataaaatacaaggcttttatttttcacacccagggacacaaccaccacagcaacaccagaacagtcggaaaacaaccattaattctggcgagatgaagtagaaacattaaaactcttaatactgggctgtcatggtttttctaatatttttgagttgttacaatgttgtttctgttggggattattttaccatgatttaaatttactaccatgtatgttgtttaacatcttatatatgaatttctaaataatggaatttaaacacatataaagttgaagaaaccttacattggttgcagcggaattaaatgactccttccactcagatttctaacccttgttcctttctatcacagagtattatcaagatctaagcctgattctcctctggtgttggattcttcacagtcttacacattatgattgagtacttactttctatgtgtgggcatgtactctatcactataagggacgaaaagttgaagagaatgagagagagaaaaggattcgaaaatagagagagggagagagggagagagagagagagagagggctacaaatttcactgaaggattaagttgcatcaactgtctagttttgagtccatcattatctatttatacggaacccttctaggtttggtttgaatttatttgcattaagaattaatatataaat

SEQ ID NO: 299520 - DNA, 5639 bp, Cannabis indica
tttttttttttttttcaaacatgatatccatgttttatagtgtaacaagcttatctataattgatgaagataagaaatcaagctatttgatctgggctaacatattaatttgacaatgtcttaacaattgcaaggtatagccaaattatatccaatattttactcttctcaaaaacttgaagatatgatattcactaataaatctaaaccgataaattaattttactatgatattaatcatttaatggtatagtcaaatcatattcaatcttttacttttttcaaattttaaagatatatttgacgaataattttaggccaatgaattaatttgaacataatcttaactatggtatagtcaaatcatatctactcttttactcttttcaaaagttgaagataagatatttggcgaataaatgtaggctaatagattaatttgaactacaatcttaatcattggatggtatagtcaaatcatatccactcttttactcttttcaaaagttgaagataagatattcggtgaataaaagtaggccaatagattaatttgaaccacaatcttaatcattggatggtatggccgaatcatatacactcttttactctttttaaaatttgaagataagatattgacgaataaatttagaccaatgaattaatttgatcacgatctcaaccattgaatgatatagtcaaatcatatctaatcttttactttttctgaaattttgaaagagataagaaatatgatatagtttttatatccttagatcgtccccatcaaatagctaatagctaaagtgcttaaatgaccatccaccagctccttcattttaaagaacttttaaatcctatcaaaatagcaaatcttcataaatttagatgtaatgttttaaaaaagctctacatcatatgagctaaatgtatattagctcaaactaatttaggttagctaattgtagagcatactgtatactccaaaatgttattattttcaatctcttttatatataataaaaataataatacatatattacaatacataattgggacttaaaccgagaatctccaacacacacatcctcctataaccacttgagctagcctcaagtcatttacacccaactcattagcatataactttttattattgatagaccacatctaagttaataaactgaaatagcacctataaaaaaggaaaaaaaaaatctaattctgtataaatatatgtgaccttctgtttcaagaagaatgttttaagaaaaataaatgtagtccaagttcacaataataatttttgacatcatattgaatggtgatcaattaatgaccaaataacacaattactccctctacagtgctattcttatttcattaacatcatcaaaaacaagaacacaaaatattattaaacaaagctttattacgaggaaaacacagtaaagtctaaacaaaacaaaacttcaaagagagtcccgagtcaccaaaaatagagaaccataatctaagacaaacaaacaaaaaaagtactaccaccttataaggcttttcatttcaccaagttgcaccaccacctagaaattttcatgattaaaagaaaaaaggtctcgtgagtgttgagctaacatacacatctgaaatatgagcaatcttgtgccaatcctcacctacttccttttcacatcgtttctccaagtttgggcacatttcaatggacagtttcttcaagttggtgagcatttggatgcttgttggtagagatgacaaattttcgcaacctacaatacgtaaatcctgaagagatttaagatttccaagccaatcaggcaacgatgcaatctccttgaaatatgatattctcaaaacttcaagcgaggagaggtgttgcaaggcctcgggcataaccaccggcttatcagaacaatgtttgtgccaacacctaccattttggtctgtttcaatgatattttcccctgatattatcacagttcggagagaagtgaggtgatcaacaccatttgaaaagccatcgagctctggacaatcaacaatctctatagattcaagtgcattgagatattgaaaactttctgataaagattccatctttttacaactataaattatgatatgtttaagcaaggtacaatcttgaaacattccctctggtaagcacttgagttcatgacaaaatttgatgcacaaaaagtttagcgcattgaggccaatgaggaaatcagttggcaactcttgaatctttctgagcctatcaattgtaagcctttgtagacaagttagatcatgtagcatattttggggaaggaaactcatgttatcattatcatagatgtcaagatcagtaagaccatggagattagagatggattctaatagctggtgtgtcccatcatacactcgcaaagatttaactgatcccagattaggtagggtcaatttcgggcatttactcacacacaatgtagacaagcttagaaacttttggttaccaacatcatgccttgataatctttccaaatttggtagatttgtaatttcaagactttttaagcatcgaaagcaatctccatgagagagttcattgtctatgtactcaaccaagttcattctagatatagagagatctcgaagagatgttagtttcccaaaaggtggaagttctctacagttattccagttagataaagtgatactaactacatttccaaggatttcattcataaaccaatatggataatacgcacctttgtaaccttgaatgttcaactcagtcaagcctgtcgaaggagcaagagcttccagtacatcttttgcattgtcttcagattcattttcatttgtattccaagacaagtgaagccttttgagatttcttttacctgagagattggcaaatctagcttcttttggccttctcaccttatctaggttgctgatatgtagataacctcctaagtttaagtggttcagttcatccaattgacagcctcttctcctatccacaatgaaattactcaaagtctttaagcaagttagttgcctaatatttggaggtagatgtgataatcttgaacaaccttgaatgtaaagatggcgaagacctttcaagcgaatcatgtgtttcgccagcttataaagataatgacaatagcgtatgtccaaaatcaacaagtggtgcagcaaacaaatcgaatcaggtaagacttcaacagtacaatgtgaaagattcaagtagcgtaaatgtttcaagttactcaccaatgatgatagggatgataatggagtgattaacaatttggcatcaagtgctcttaatgagtgaaacttccaattcttattaggatcagttgaacaatttgttaatagcatgaatgtcctcaaagattgaccacttggtattataatcttcttaaattgactaagagtacaagtcaagtgacaaacactttttgacaagctgataatctcaccattattattattattattaacctccacaacacgacatttatcatccattatgaattgagctaaatcatgaaataaatcatgcatcttgaaatttaagatatttccgaaaaaatctttttccatgtcctgaaaaaatgatctccaatataattcactgatcatctcatttccaacatcttccacctcaaattcttgctttgaagaaatcaacccattcgccatccaaagatgaattagttgagttttttctattttatgatccttgggaaatatagcacaataagagaaacatcgcctatgctctattggaagatgaaggtagcttaatttcaaagcaggcaagatggaagttttgtcttctggtaaattccaaagctcactacgcataacagaaagccactcatcttcttcaattttgaagcgcatcaagcctcctaacgcttttgctgctaatggaactcccttacacttcttcactatctcttctccgattttcacaaggttaggccgctcttctgattgatttccaaatgcacgttccttgaataacaaccaacaatcattgtctgacaaacccgtcaagatcagcattggaaccgttcccataatagatgcaacctttttcgaacgagtagtgacaacaactgaagcaccatctaatccacaatccaataagtatctcaacttgtcccattgatcatgatcttcattccaaacatcatccaaaacaagcaagaacctctttcttcgaagcatatcgcgaagtcgtttctgcaaaggatccatatccaatgcttcacaagcttttccagttccagattctataactgctttaatcaatctaagcacatcaaaatcttcagagacacaaacccacatcttaagctcaaaatggttaccaaccctctcatcattgaagaccaattgtgctagagttgttttccccatacctcctaaaccaacaatactgtaaatacaagtatgattacaatggatggcatcattaaccaaaaccaacaattctctctttctcctcttctcttccatacacacatggttgagtaataacagaactagtaagacgatttcctctaatctggcttcgtctctccccaaccacaaccacacctcgcaagtgaaattaattcgctcattcccaatttgatctaatctatccccaatctctttcatcttgttagcaatctttttacgaaagtaaagattcataggattgatacaagataaagaagatcgtacctttcgaatccatggctgctgctgctgctgctgatactctaactctaatcgaaaagcctccatttcacaacagtcatccaaaatatcttccaactcagaagaaacatcaataagcttttgcaaccaattcttgatagaacgatctgataattgtctttcttcagcatcttcaatcacagcaacaatggttgaaagcatgctacagattctttgcatctctttgtcgatacctaaaaggattccaatttggttttggaggagagagctcagattctcaagcagaacagtaagaaaagcttcagccatgaaattggtgaatcaaagttggatggaatccagggaagagaaagagattttggtaagctaagccaattcaagcaagcaatgaaaatggtttgagagtttgagttgaggtagtaaagtaaagtggttggaaagttggaaacaccatttacaagagaagagactaccaaagtcaatattgtttgccatagtcaaccttcgttgcttcactcaattctcttctgtataaatatatgagaaatgctaaaaagacatacgtgattataactttttcggtatgatatgttggtagaattaagtattgcatctacgtaataatttttagagaacttctactatacaattgtcacttctaaatagtgataggtaccattagtaaaattactaaattatacgtatggccacttatttagtttagctaaataaataaaaataaatcatgacaaaacaaccgtaaaataacaatttccatgcatagagaaatatttaaaggtattcatgatgtttagcacccttttaagatgtaagattgctgtttgcagggacggacacactaataagattgtggggctatagcccc

SEQ ID NO: 299521 - DNA, 1404 bp, Cannabis indica
atccagaaaagaagcgtgcttggtctgtagggccaattaattgtgaaagcagtagagtgatggactcgtgtataaaaaccatcattcgggtaagggctcaatagatggttctcataaaacaaattagagattttggttcactctttaaaaattgatttttcagctataacttcaaggtttgttatttaagtaatgacattttggagtacttttagctctcttgatcagtcatatataagctgggtacgagtgtacagttttggaaaacagattgagtgaaattttaaggatagttagattgggtttataaaataatttggttcatgaatttgtgtaaaatgtttatgtccttgctttgttatattcatctgtgaaattttgtgtttcatctgttgtttcatcaagttgtaacagatattgattacagtaatacttgaatggttgacccagtaaaatatctggtggagttcatttctttgttttatttttatataaataaatagacaaaaaaaatggagcaaattagcaaatctatttatataaataaatttttaatctatcctgaatgtatacatacctaattcatgagaggatataagagtagggatacttaagaaatttgaatagtaaacttaattatcaaattattatgaaaatccatgaacactcttaatgctcggccaaagaaagattcaatgatatcaaaggcttcaagataaaaatggtgaacaagcagtaaacaaggactccaacaaaactttcctccaatttcaacattaagcatcatcatcttccaaattgtagcttcctaatcaaaaccttttttttttgaataagggtaaagattaaactttttatgattctgcatgctttaagttttagtgttgtgtgtgtgtgtgtttacaaattaaagaatccaataattttatgataaagtatccagtaaattgtttttacaaaaacaatatatatcaataataaataatattgtgcaatatcaatgatattttggttttctctattcaggtttatttgagtcagtctacaccacaaaaaaaaagtagtgtacagaattgtattattaatgatgatgttgggtcactcagcttcaacaattaagattgctgattttgaattagattaagtcgtttttgctaaaaattatctaaattaccatgatgttaattaaccattttgttagaatttgataagatacatgggttacgtctcaaaattaattagtaataaaaggagtagtccatgcatagattttacgtatagtatgtagtttctacatattattaattttttctcaccaatcttgcacgactcgatatcatgttagaatttaataagatgcatggagttttatcttaaaattaattgacaatgagagaagtagct

SEQ ID NO: 299522 - DNA, 1751 bp, Cannabis indica
aaaaaaataaagaaagaggagagtgagtgagacaaagacaaaagcaaaggtaaacaaggtgtgtaatccaataccaatattcatatattcattcattccaatttccatacaaaaaggctgagtttttatattttatttttggggagaagagaatcaagttcccccaacccaacccaacccaactttgactggaccccaaatttacgagaagaaaaagttgagactttgagacactactcaatactcaatactcattcataatattaacaactactcttttctttcttcttcttcttcatctgattttctctgtcacaatagcatttgatgttgattttaaacaatacccagtttcttaaatttcctttcttttctttattagaaaaaaaaaaacagagaaaaagaaagtcaaggttggattttgttttgttgggatgaaatgagagaaataatgaatgtgtttttgtttatggaatcagattttagcgtgttcatttcatcttctctgtctcagtctcagacacatttctgaacatcgtacatacaaacaccttaaggtatcttttttctttctactatcatcattcatattattatttatgattgtgattgtgatttttccaccatggctgtcatgtccacccctcttattatttttattgggtttatcacagatctgataaccaagtactaaacacacagaaaacaaatatcagaacaaaaagaaaggaagagtctttactaaatgtctttgagttcttctctccaaaggaaaagaagaaaagcttcaaacttgttttctgagacaaccaatattaaagacaagacaagacaagagaagagaatataactaaaacaaaacaaagtttgtataaatatttatatatatgtgatgggattgttttggttggtgcttttgattgcgtttcagccactatttataatttcttcatcatcatcaagttccactagaagattcttgtctgatcagaaagcagtggagttgttgttaaactttaaaaactcatctgttgagtctgatcctaatggcatgttggttgattggaaagcttcttcatccacaccctgctcatggaatggtgtttcatgctcatctaatggcttagtcacagctcttaatctcagcaacgctggcctcacaggcagtctcaacctctcccatctaactgtcttgaccactcttaagtatctttacttacaaggcaattcattcacagcagctgatctctctgcttcaaatgataaaacatcatgtgctctacaggccattgacctttcctccaacaacatatctaactctcttccaaaaccatctttcatgttttcatgtcaagctctctcttatgtcaacctatctcgtaactcaatcactggtggaactctttatgtggggtcttctttgatgcagctagacttgtctagaaatcggtttacagactcgggtttgctgtcttacactctctcaaactgtcacaacttgaatatgctcaacttctctgataacaagctaaagggtcaattgggtgttactctaaagtcttgtaaaagtctctcaattcttgacatttctcataatctgttgtctgggaagataccttctacctttgttgcagactctccaccaactctcaagtacttggacctttcttacaacaatttttctgggaaattctctgatcttgactttggcagatgtggcaacctcacttggctcaacatgtctaggcaac

SEQ ID NO: 299523 - DNA, 1943 bp, Cannabis indica
ccaccaaacaactttctcgtatcaaagcatgccatctcggactgtaattatttgattaatatgcaatgagccaacttggattcccagcgtctttatcttgctcaatgacctcaaattcatagataccataaactcaatgttgccgtggtcaatgcatttcgtccactgtacattttaaactaagttttcaatgctgatcttttcctcatgaattgtgctccatatgcggcggttgaaccaacagttgttgacgccaccagccaactgcaccaattttgggcaacttagtggactgactctcataaaaatacatcaaagaagtttcaaaaggaaaagtggccacaactcacctcaagtatgtgatatatatctgagtttcctgcgttccaaaatctggttgaagaagtgccccagcaactaaaatcaactggaagaccgtgttgagctgtcaccaagcatggtatttttcagttttatatgcaagaactcttacatctcattccaacaatagtaaccttctcataattctagggataaccagtgttgaagattataaaagtaaatcaagatatcagtaatcccaagaaactgcataataagatcaggaactgggaaaagaacaaagcgtaccttgctaataaaaagtggctccaccttctggggttgggtcccatccaggttgaaaaaatcaaaccagcttttccactgcaagaatttaacaatgcataatccagtttttagcttgaagatgccaatgagagtgggagaaaaaagtctattataactagttaaaattttgcattatcacctcccagcctaagctactggctcgttggtacacagcaccacctacgagtccaacatctcgaaaaacaacgagtccaacaagtccagcttcataaacaaagtttgataatgtcaatttttattgaatttgtacgaaaatgaaagactcagttaattctcatattaagacttgttggcacatttcagctgatatgaatacattatatgcaaacacaaaataaccaataacacacgagaaactcaaaccaaaccacttacggtgaagaagatcctggtgtaccatagccaaagcaacagatccaataagaacctgtatatcatggaaaaattgattaattaatgaaacataaaaatcgaagcactaagtatacttataaattgagcaaaggttacagacatagaattacacccaaaaaatagaaaagaaaaaaggattaagctttactatcatttaccttgtcagctaatggatcaagatatgaaccaacaacagaattgatccccatctttctagccatgtacccatctagctacacgatacgagaaggagtatgagaagctttgttcgttatcattatgaatgtgagactaaactacattgcatccatacccagtcagttgctccagaaattgctaaacccaccattgctgaagagtaccattcattcataatcatcctgcataacactgtcaattacaattctcacaaaatcaaacaaaatctttgtattgacttagtcatgaagaatgaacaataccatccaagtacagggccggaaattaaccgactcatggagatcacgttgggccaattcacgaaaccgccggtccactggctcgagtcaaccgcattcgtcacggtccagtcggaaggcaccgaagcgaagtccaatttgagcggaaaattgggtctccgccgaagaaggtggaaattcaaggcttcgattttgcgtcgaacgacggcgtttccgcggaggtagagaggagttgcggactgagaaagcttccatggctgcgaggatgagatgaaaagaggtccctgaaatggaataatccaattggaaaacggagagaggaatctagcagaagactgagatgggaagcgaaatagagggtggattaagggattggctaga

SEQ ID NO: 299524 - DNA, 1543 bp, Cannabis indica
tagaaagttcttatttaggatgttaataaacatacctgtgagtagatctaagatcctggtaaaataatttccaacatgttgatcgagaaagctcctataaatatttctatttttcatgtatagggggagaacaattttttttttaccacagaacctctgctaaaaattcctacgagcttcttcttcttcaagaggaacgaaaggggtagagggtttaggttcatactgtaaacacttgtaatatttaacatctgactataaggctaatataacagactcatgggctatggattattaatgctcgaaccatgtaaaaaattatgtgtctattatttattatttcatatctttcttaaactctaattaatcggttttttaaaaatctcagtaaatattttggtgctttctttgagagttgaggaaagatctaaacttatagtgttgttattaccacgagcctaaaaattaagaaaaagaggagctttcctaaaaaatggagaaaggtcatggcttgactacattccaggtctagagatccaaccagaagaggctatgtcgaagactcgttagttgaaggtgttattgagagtaacagagatagcccttctaatgtcgacacctctgcccgtgtgaaggtaaaaggaaggtgaacatgggcaatcttagagtcctcgctgctcccatagctctttagaaaaacatgaatctaatcggtcagccctctaagaacgtagaaggccaccggtgcttctgagcttgggtgcccttctagtcatagaggcataaccacattgaaagggaaaagtatagaaataccagagcccaaggcccaagaagacttccctattgattctgtcaaccaagacagtgggactagggaacattattccgacgacaagcagcggatggtggaccttagaaagtatcgcaatgttaagcatgacaatgctcgaaaggcgaggcaattagggaatggccaccacgcccattcaaccgacaagtttcagggaatgaatctcgtagtttgtgacacagagaggtttgaaaaatggagtgatgtcttcaccaacattgacgaggaagagctagagctttgcttcaaaaggtcacatgagttgttctcctagggaatttcagcaattagctactggttgtgggatgagcaacacatgacaagagcaaaaaccttatccgagtttgtgttaaaggcccaagaaatttttcaaattgaaagatgcatgccaacaacctgtcgaagctccttcggcaccaatgctggccctattcttgctcccaagtttgcctcatcagctcttgttcctagaaccccatgcattcgaactatttgtgaacattttgtgttaaaatctatacctacatggaaccctttctgtgggtactgtaaggaccgcttagtttaatttggaaattagcagttaattatgatttattatggaaattatttatagatatttaaataattgttgatactgttattattgaattatgaaatgcattttatgtcatatagtgaatttcataa

SEQ ID NO: 299525 - DNA, 1316 bp, Cannabis indica
taattacttatttttagggcataaattctaacaaagacgtcttgtgaaatattgagaaacaggaagtttaagttcatgagccatctgcaaaaattgtaagaaaacaacaagagcaaacatattaaaaccaaaaaattttatatcgcaaactgcattgcaaatatgtcatgaaaagtcgcaaaataaaattgcaaatatgaagttcacaatttagcgatatttcacgacattcaagcgacatatcaatataattataaagcatttttttttgttcaactgaaactagcgatatctagcgataccattcacaacgtctaatgataatattaagtaatccaatatatcgtgagacgtcaccaatcatattgctagatatcgtgaaactacatcaaacaacaaaactctaaaagttcatcaaaccataaaacatgtcgcaaaacgtcgttgcgacctgtcgtgaaacatcactaaaagacaaacacctactacattttgttctattgaaaaacaaaattgaataacatcgtgaataatgtcgctacatgtcaataatcacgaaagccataacttgaacacacattaaagaaaatcaaacgaaaggagttttccttacaatctaataaatttccttacaaataacaaaaataaaaaaaataaaaaaacccattcaaaatcaaataaagtttaggaaaaatacttatttcatgatttcggatgtgggtttcacaatttgggattgcgtttaacgatttggatttgggcttcgactacgtggtttcgttggggtggttgggttggtgggtttcgtcggtggtgaccattggaggagaagggcgagaggatgatcgggttttgtggtgagagttagagagagagttagaccggagagggagagttaaaggaagagtgattcaaatggggtaaatatttttgagtttgtaggtttttgaagtattataaccgtatgttatttaaagcggaataataagagatcatcatgcaccaattttaagtgtattgtcaaatttccctaaataaattatagagatcacttttattatatcatatccatcatatcccgtccatcatagatgctttggttatgcgttggtgtggtgaattacttcactctcttgactaggaatgtcaatctgggccattttcgcgggccgggccgggccgactgtggcccgaattattcaggctcttatcgggcttatggcccgacccggtacaaattatttcgggtcgagcccggcccgacccggtttcaaatattaaaaaaaaacctaaaattcctaaaaaaaatcccaaat

SEQ ID NO: 299526 - DNA, 1275 bp, Cannabis indica
caatacatgcataaaccccataaacctcactcgctatactataacagcttgcaactcactcagcaattacaaaagtacccccagcacagtaaaagaccatactacccccaaacaatagcacccttacctctcctagcataagcgaaactcaccttggtcctaacagggagttcggtagttcggtattacagttagttggtatctcttgttaactagcttagtacataaaggctcttcaattttttactagataactgtatgagagtgattcttggagcaagactccattgttgtacagattcttctactgtgatcaataaatagattctcatagcccttgtgtctggtttggcccacgtatgtgatttgttcttcttgttctaattacttttccattttgatttcttgttaaaaccagtttagcttgagaaagaatcatattcacatacctgtctgatgctgtccttattatgagcattaactccataacaaatacagttgttttgctcaaaatagctcaaccattcctagaaattaaataaaatcctttaactgataagatatataagacaaagaatctgaactagaaaaacctcttaaaatcaaatgaaaggttcactaaatcagttcaatgttttggttaagaatttaagttactaactttggtctgtgaccggttagcaagatctatcttgttcaacactacaattcgtcttgaagaagagttgaatttcctcaacagctcatactcggaagacaatggaatctaaaaaagagaacaatcaaaataaatcaactattgaggcatttcatcaaacaagtagagagcacatatatctcaacaataacaaaataattctttatagatatgcatgtacgataacagaatagaaaaaagaattactacccttgcgtctctgatttcgagaaccagatcgaccaatgggattcgttgagctatggcgcgagaggcggcagccatatgagtgtcgtaccagcttcctcggcgtgttgttggctcagtgtttcgacgactagatttcaccattgctcgtcttctaccgataatttctttagctaaacgaacaacagtagccatttttccaaagctcgaaacaccagacactctccttctccttcgtctctagttaattcatctgagaaaagagattgtcgttttttcgtttgtagtcagaaaatgattgtcgtttttccattttgtagtttgagaaaaataattgtcgtttttctgttttgtagtctgacaaaataatt

SEQ ID NO: 299527 - DNA, 3643 bp, Cannabis indica
tttttttttgagcatatattaaattatgtccctcaaatatttagggtcattaacaatttttttttaaaaattattgagattgttaaatttaaaaatttttgtccaattttaataaagaaagtctaacatgaatcaaagtttaaggatataatttagtacatgtcaaaattttaagaacataatttaatacattgacaatcaccgaattagtaaaattgtatgaaattgaacaaaagtccttaaattcaacaatcttaatagttcatggagaattttaaatggtcaaaaaaattcaagggcataatttgatacatatcaaagttcacgggccaaaatttataattaagcaaaaaaaatttaaattgtagttcaaaacctttttttttaaataaaaatcagtgaaaattaaacctcacattcattacataaaatgtttactgatattaatgacacttcaattaattaaattttaggtgaaagtctaataagccacattagagcatctctaaaaaagtgttataaaaatagtatatatgtattttgtaacccatgttcataaaattaaactccgaataataataatgtataatgtggtctgaatttggcacatgttaaaagttgtaccaaatttaacacacatttgtgtcaaattaaggataattaattttattttttgataaaattaatttatcattaatgcattagaacaaaattgtaaaatttaagctaaacataacattgacttattttttaagccaaatttagttcaaaatttataccatttattatacatggccttataagtcgcaaaattacataactgagaagccataacaaagttacaacccataaaaatctatttagatcccatcttagagaaagtccctaagagcatctctaatagaatgctacaaatgtagtgtatattcattttttagtccatgttcataaaatggaactacaattgtagtatataatgtggtccaaatttagcacatactaaatgttataatgaatttggcacaaaatatagcatgaatcaaattatacaccgcaataaatatcattttttttatctacttttttgtcactcatttatgtaattaaaaacttttttatacttttatctatatatttaatatattttaaatatacattcaataaaaattaaatatttttgttgacttttttacaactttctattaaaataaaatttattacccttagtgcatttggacacaattgtaaaatttgagtcaaatataacattgattcattttctgagtcaaatttaacacaaaatttacaccattaattggaaatggtctaagcccattaatggcaactttcgagtcgctttccaccaccacaaaattatagcccgtggctaaagaattctctaatgcaagcaaacaagcaatagttcaaaaggttttaatgttgcatctttgggtttaagaaattgataaatgtggtataagtatttaaagttttgagtttgtaaagatataaatttaatactttttttagcagtataagtttctaatattagtaatactgtaatttttgtttcatttcgccaatacggactctgttagtgtcttaaatttgaaaccatacttaatttttgagtttgttgaaagaatttttggaagtaaataatattacatgtttctatccagactcaatgatatagaattttgtcttacatgtgtcatgtttaagacactgacaaaatatgtattgatgaaactggacaaaaattacagttttactaacattgagtactaatattattaaaaaaaaattaccatgctaattacaaattcaaaactttagatacttatgccacaaatattcttttgaaaatatggtggtgtttggtttaccgaaatgtaattgtaatagtaataggaatagtaatggtaatagtaatgggaatactattaccatatttggtttattttgtaatgaacattgtaattagaattgaattgataaaaatatccttgctttatttatttatttatattttcaaagtgagaaagagaaagggtaaaattatatttttattatttagttgttattgtaatcctcattcacgaggtgtaaaagtgtaatgagaattcataggattagtgtaatgcccattataataaaattacattacaaagattagaaacacaaatcaaacattgtaatggtgactttgattccattacaagcttgattccaattggacaattcattagatattgtccttagtttttctagtttcggataggcttgcatttcttattggtgtaaatctattaatgttatagcttataccttagctagatatgttttattgatgtgttatctttgccaccccatttcttttcaaaattttatttaggttgatgccatttatcaataaattcatcatccccatcacctttctttagagttatttgctctaacagttggtgttcttggaacttttctgtaagaaaatgaaaagaaaagaaagtgggcccaacacatgcttaattgttttatgaaaaatctattaatacatatacatcccaaaaagtagtgttatattttatatgttttgaaatttccttaccctttttatttgtttttttatttttttgtatatgttgtaattatttacgataatttaaatatttttagaaatttttgaatactttatagttaaattttatttttgatactataaataatattctcaaataactataatgtataagattataataaaaaaaaaatgaaaagtgaacaaaacaaatttcataaatgtccaaattaagaggtgtactataaacttataattttgtataataaaattatattagatccaatacttaattaaacgtaatattcaataattactttgggaaaaaaaaagtatttatttatttattgtttaataattttgcatgatgatctcttttatcaaacttttctacaaaataaaacttctaataacacatagcaaaaaattagacataatgttcataaagtaacttttaaaatggtctatttcccaaagtttagtgtaaaatttaaagagagactatatatataaataaataaataaatacatacttagtcccatatgaaagaaaaatacctatccaatttcaatgaattcctaacaaattatgattaaatttctataataataactttatgggttgaagtttcttcacagctaaaagcaagaaaaccaagctagaatattgaaaggaaattcttcattgaatttcactcaactttccatctccattagattttggcttaatctaattatatacaagtaatcaactagaatgaacaatccctagttgatttaatcactaattataaatatatactaatcatatgcataactcaatactcagagagaagattatgttatatgatgatgatctgcaaattatatgactaaatataagggaaatttgattttctatacttaaaaaaccttaatattttattcttaaaccaatacatttcaaactaagaaaaatatgacacttttatctaaaacccaaaaatacccctctcataactcaaccccatctctctctctcttcctctgtctgaaatcgaaaaaaaattcccccaggtccga

SEQ ID NO: 299528 - DNA, 1714 bp, Cannabis indica
ttttatagtgtatacctttcctcgtacgctttagaagttctcctcctctgcaaacaaagttcaatgctgtgaaagctttcgattcgtggccttcgcctttttcgtcagccaatgcaaatgtagtacttccacagcccctttgaagccttgtccttagaatagcagctcctcgtaaggctgtagtatacacaaagaaaactatccctcattattttattccaagaagctattgtttaatcggttttttccatgctaatctattgttatgagtaaaaataaataggattgtcctctcaaaactatgactattgtagtaaataatattttgatgtggcgctaacgtgacgttaatctagcgagtccagtttaaaaaaaaatacatagtagtagtatattgatgatgacttgcgagaatataaatatgtatttttagagctgatgtttgtatgttaatataaataaattggatttgggataacttaaagttgttaaaaagactttcaactctgcaaccatacatgtgagttgtgaccacataagaatttagtttttttaaggagcaaaatgtaattgaaaaggaatatttgcagtgatttttatagttcgggtagaatttttctaatagaataaagttcaggggcaaaactctataagggtcaagtttgggagaaaaactcttgtttattctaataatggagaatgttagagatgccaccccaccaatcaattcatgatgtttcatctcacttctcaattagaaagccccaaaaataaaataaaaaactggtttgtgtgtgctcaaaatcataagcaactagaaaagccattgataattaccagtagctgcagctgctgttaaggtcatgatatcgccattagtctttgcattaacagctgagttcaccacagctaagatatggtcatgatcggcgcccatttcctcagcaatctcgatgcaatgagatgccaccagaccagctgccgatgctagtgcagtggatgtctttgaaggagttgattttcggtgagcagctgatgttccaggcgatgcagctgaagctgcaagtgctgcaacagctgcagcaacccccgccacagaaactgctgcgtgtaactgagcattttgggttctgatttcctgtttctttctttccttctgatcttttaaccatctccccattgttttcttcctcataatgctcttatacagctgcatggtagtaatgattagtactgatatgatatgatattcatggcatgacataatagtgaggctgagatagattattaccccattttttatcaactgttgactggaaaggaactctggatttagtgcttgatgaagtagaaacaactcctgtgaaatataataacatgtaaaagaaacaattacatgattatggtaaagttctgtccttaaaagagatgaagccttgtacaggaacagagttggcactactgaaaaaaggttaatttgacatgtgttaaatcatgcctcctaacttttcagatcgtttgatttatgaatttttgttcaattttactaacgtaggcagaagtttggagggcatgatttgattcatgtcaatgttcggggaataaattgtaattaaccctttttaaaattgatcatatgtttgaagagagagagagagagagagagagagagagagagagagagagagagagagagagagagagagagagagag

SEQ ID NO: 299529 - DNA, 860 bp, Cannabis indica
atcggaccgagagtgagcgagaacggtgtgaccatgtcggatgaatgtcttggacaaaaattggccgaagttaccaaacccaattacagcgatcttgagcttgtttgaatcataaaactctgcagcgagtttagattcgtagtcgaagaattgggcggcgtcgatggcttgaactttgagcctacgttgtcggcatcggcgaaagccgtgacaaaagcgagtggcggtgtgagctttataggaggagatagatagagacaataatgggtgatgaaggcaagaatgaagagatgaaggtttggggaatgagatgtgaagaggtgagagagaaagcatggtcgttactggctgctttcgtgtgttatgattgatgattgaatttgggttcgggctacatcaaaaaactctgaatcggcatttttgcaaattaaggtagacacatggaagctctgcaactcaatgaaaggactctaataataaaaaaaaatgatgaagaagaacaccaacaccaagacatgtttttttaatttgttcaatttttgtgggcacatttgtcaaataattaattaattaattttttttaataaagaataatgtttctatattgtagtgggaagcgttgaacacattatagaaatgtttccttttcattttattttatttgaaaatgagaatggttgaacttgaaggtaacttactacaatgtgattattgcgaccttttaacttatagaattgaaagagcttgttttgctaaacttctatttgtagtttgaagcacagcaaactgttgtaaaaactaaaaagtttatttttggttggatgtaatgaaatggaatagaatagaaaggaaacaatttt

SEQ ID NO: 299530 - DNA, 1370 bp, Cannabis indica
aactgtaactaaagaaagaagaaatgaaaaaagctgtgtatactaaaaaccaagaagaaaaaaacgatcctaacaatgaaaacacaaacaaggaaaaatcaaattacatgttcaaaatgaaaagataaatcctagtcaatatacagacacagacacactactgccacaaaagacaatcgaacagaaacccattttcgaaagaacacataatgtcggcttaaaccgaaaagaaacgaagaaaaaaacgaaatttcgattacccattaggaagattttcaacgaaagtgagcaacattttgagcttcgaaccaccttcggaggctaacccagcgtgcatctcaaccgccatagcatcaaccacttgctttaatcttccaacggttgtatcacagctctcttctaactctctcaacacacccaaaactttcttccactttctcttactcttaactctccgacccacaaccaccgccgccaccgcacacgccgccgcagcaacggttaaagccaaacccaccactactttccccatcgactcctctctcagaagaaaaagaagaagaagtctccgccgcctgcgattaatcacaccatcaaacgacgccgtttcgaccaccctcctcgtactctcgccgaacgccgccgtttcaccatacacgacgtccccctcgtcttatcctctctctctctctttctctctttcttcgtgtatggtgagaaagagaaagtgtagtaaggaacgacacagtagttagccggcgttggattttccggcaggtctttctcgccgttaaagtgttgtcctttttatttttgtgtggagagagaaaggtctttgggcattggaaagcgaaatggtgggtacttatataccacttgaaatgaccaaaatacccctttctttgtttttggggccaatttttatttttagggtattttttataaattgcaaactgctattacactctctaagttaatttttaggctcaaaattatatgttggaatatttttttaatttcatttattgtagttatagtgctatttatataaattttaattttttttgaatattttataatactaaaaaaacttcaaacatattttttagactataaactatttgaagtttttcaaaattttacaagagtaatattctaagtataacgacgaccgttataaaaaaaatttagaaaaaaaatattctgacatgtatttttagatgccgaggttgactaaaaagttacaatagatacttccaaacacactcttgatataatatattatagttatttatattgtgtaaaattttaaaaaatttagaagagaagtattataatttcacttttttagtcaatttccatgctcaaaa

SEQ ID NO: 299531 - DNA, 1798 bp, Cannabis indica
gtaaggaaacattacttttttttattggagaaatgaaattcattgaacaaccaaaagattacaaagaaataacaagtcacaattacatgatgagcacaaaggggtggcactccactctacatattacaaactttgtttttcaaaacataataggccaccatattggcttttcgaattacaaaacgtaacccactaacagaatgatattgcaataatctttgaatctcaacaatgaggtcatcctcctctcgacaacccttctcttctccattaatgagttttatagcttgcaaacaatctaattgattaccaaaacttggcagccttctttgtaatccggcttttattctatccttaattgtatagagttcagccaccaatggagactttgcctggcataaaacagtagcggaagcaaagtgaacagccccctctccatctctaatcatactagtaaaagcaccacccctttgagatgaaatcctagcatcaacattgatagtgaagcacccatctgctggttgttcccatctctcctccctccttttttcaccccttttactccctccagcagtttgctaaaactccgggataaacttatcacaccactctaatatatcccgtgcccttggacgacagcctcatgaacatgagagtttctaatagaccatagatgccaagaaacaactagaaagaactcaaaagaggatgaggaatagaacttactaagcctttggaaaaccgtcataacatcacctgagggagcatgttggagccgatcccacaagccacatcgtttccacacctccttgctcaacgggcaacccacaacacatgtggcccatcttcaatctaattatccttacaccgagaacatataggagccacttggatgcctcgtttagctaaagcactattagtaggaagccaataataacaagccttcaacacaaagtgtttaattttcggaggcacatttgtcttccataagcttttccaccaagcttctctctctttctcattcaattgatgagaaacctctctcatatcatgcgccaaacgatgtccacttctcaacgtgtattcttcggttttggtataatgccacatcactttgtatttcatcccccaatccccactcggtaaactaagaattaactcaacatcttacacattaaaatttgccttaaaatttttttcatcccaacatccatcctcaagtttcaaatcaaccacatacaattggtgtggatattggacatatcatacactcaaaaagtgaccggtctaggcaaccatggatcatcaagaacccgaaatgcatttccatcataattctgtagcgataacccttcaaaataagttctttaccccacaacaaacttcgccacatgaaagacaaattactaccaaatttagcttccagtacaccacaattcggaaagtaacaagctttgagaactctactataaagtaattccggacagcgtaaacatccccaaatcttcttaacaagaagagcctaattaaataaccccaaatcacgaaggccgaaactgcctttatctttaggcttacataagtaagtccatttacactaatgtattttcttttgttttgcagaagacccccaccaaaacagagcaatcatgcaatgcaaattcttaatagtactcttttgcaactggaagcaattctgtaacatctcagaaacctaattatgaataattaggattaattatatattaagggttaattaatgttggaaatattttaccaggatctagatttaccaaca

SEQ ID NO: 299532 - DNA, 1994 bp, Cannabis indica
cggtatttcattatgcaaatcggcagcgcattactataaaaccaacggtattttgtataataaaatacctgaccggaattttgtaattaaaataaaatttgtgtcactgtaaatttctctataatttatctattttctatctttgattatttaaataatttattcttttagagtaaacaaaatattcattaataaataaatagtgtaaaatctattacatgaaaatataatttattgagcaaaatcaataaaaatgggtattacaagttgcttaccataaataagaagaaaattctaacaacaatctcaatttgttaagattctttaacatgtttggacagtgagaaagaaaaaaaaaatgcagagaaaggaagaaagaaagagagacagattgattgtcaaagagaatcaaatgttgttattgattagccattaaatgctcatttatacaagcaaggtcacactataactcaagctgaattaaacaagaattagttacaaaatctattaaaaaccaacaaattaccactaacaaacttgatccaaaccgatacctcaaactagcaattggaattattgacaattgctagtttgtttatgaaaattgaaaaccttgaactagagatagatttagttaatcaatctgcaacttgatctaatgttggaacatgtttcacttgaatgaaaccttgcaaagtattttctcttacaaaatagagatatcaagctctaatgtgtttagttctagcatgtagaataaaattaagattaagcatcatagtatcgaggttgtcacaccaaatagaaagaactttgggaagctgaatttttagttctaagaataaagagtgcagctaagttacttctgcaacattaacaactagacttctatactcttcctcaatgcttgatatatcttgaagttgtgtgttacttcttgcattgctaagtgattagattagacccaaaatagataggaaagtctgaggtagacctcctatcatttagatcagatgcccaatcaacatcacaaaatccaaccaagtccagatcagtaagcttatttagatgcaaaccatagtcaagtgtgccacttatgtaccttaagattctcttcactacaacccactgaacttgaagaggattgtgcataaactaacacactttattgacactaaaggcaatctcaggtttggtgatagttaggcattaaagagccccaactattgacttgtaagttcaactggatcactcccatagctgataacttgagctcactggtcattgcatggtgttgttgaacacttggctttctccatattattgatctacataataagaaagcatactttgtttgagacaaaagcatcccttcagtggtgtaagacactttaattccaaggaagacagtttgcccaagtctttaagtgaaaactagtcattcaaagccttgatcaaattggaaatcactcattgatgatttcctgtgatgagaatatcatcaacatacactaaaactaaagttgttgatggatttaaatgttgaacaaataaggaatgatcagctttagatggagtgaaacccagggatacaatgcattttttgtaacttctcaaaccataccctaggagcttgtcgtaattcatacaaggctttgttgagattgtagacaagatgtggggaaaatttgtcttcaaatcctggtggttgagtcacatagacttcctcttacaagtcaccattgaagaaagcattatttacatctagttgcctcattatccaattattagacagggtctacaacaactttgattgtaattggttttatcactggactaaatgtatctgtgaagtcaaagattagttaatggtgaaaccctttacaatcagcatagatttatacttgtttactgtcccattaacattctccttgattttgtatacacatttacaccccattggttctctcccctctggtaaggagacaagaatc

SEQ ID NO: 299533 - DNA, 1148 bp, Cannabis indica
agttatttttacatttatattttatatttagcttttgtttttctgtttaatttttaatttggctcttgattttttccgtttcattgttggatttgaaatgatgtgaagtcttcgaatggtgaggcgaagaagcatactgaggtttggcaactattcaaagaagctcagcagagtaagtctttaatgcaacttaagagtttactttgataatatttcttcttgaaattgtgactcttaaacacaacattttattaagatttaatgtatatggtacatttgcttttatgtatagatattttgtacttgaacaaacaacgcctaaaggccatgagggagctggacagaacaaacaaagagaagcagttgttactggatagattgagcaattagagttggaaaggcagtctggtgctgtaaaaggtaatgctttcatggtgtgaactgattaatttggactagttctataatttgtggtgcatttcagtttgaggtccttttaatttgcttctatcattctttatccatagcaaggcatctatggcattctcatggtatagatttgtccatgtggtcgtttgacatgtggttcatcaaatctaaccgattcttattttgaatattataacaaagagcgattgtaaatttaaattaatttttagttgttaacaatactagagctatataagggtaaggaactactgagctgtatagttcttgtgacatgtaaaatatcttttcatatcagttccgcccaatgcaatattcatttttctcaatttttttttgcatagtagccaaattgaagaattatctttaaattcatcatctcaaaccagataaactatcatattgttgggaaatgctacttcggatagattctatggtcctcactggcatgattagcactgatgaggcatctgacttgagaaggctgatcatggatcacaaagaaagtatagatgatcttcttgttgacacactacagaagaaagatgttgagtttctagctgcacttcgacacttttcagacagaagaaaaaagtaaaattatcttctagatatttgggtatcattttatcattgttcttactgaagttattcatttacacatttatcccttgaaacttttggatgctatgcctatggta

SEQ ID NO: 299534 - DNA, 1600 bp, Cannabis indica
caaagaaaaaaaaaagaaggaaattacataaagtaattaatgctattttttttttttctaaatgttcttcttttcgtttgttgttttacacttttacagaaatatgttgtcggagaaattttgacaacactaaaaagaaactcaatctctaggctacgaaatagacaaaggttaatagaaaataaaagagacaatagaattatagtgattcacttagagctcagtctgcttagtcaatatttggtaatatttttttagtttaatttattagatttggatcacttctttatataaaaagtaattgcccattgggattacacaccggtcaattaggatcattattataataattacataatttaatgaataaaaaatgtttaaagtataacagtacaattttgtctgttcttactttaataacagcaatgtgtgcgacttattaagtcacattttgtccattcatattccaacatgcaggcctacaggctctgtggtattgtactcgcataatagtccttcaggcttgatttagttagatgtctgtggtcgtctttgattgcatatttggacatcacttgtgttgacaacttagaacatgtgagttcttagcgagttatcaaacacattaatcttttggaccaaacctaagtaaacaagcagtctttacttataacaggagagatatactcgctcatcacatataacaaatatgcgcgattagtactgacttctctcgatcttgtttcttttaaccatgctgggcatagtattagaccactatctcggtcgcatattcttgcaaggtaaattatgcgaggttgattctatgagaaccatactattgacacgtcattattattatttttttttttggaaaataggtacaggtcatccttttcacgtgttgccaacttacgctagggaggaaagcctcaaccgcatatctcaaaatgcttctttaagtgtcctagcatagcgtttttagcatatctcaaaatatattttttacagtatcgtagtccttccatcaaattttattgtgaaataaatgaagtggtggattatagttgataaatgaatgcaaattatttaccattcatctttcttatatgttaatgaataatggaataaaatattttttatataataatatatatatttatatttttagtttcttaatcataaaaataaaaaggatgaaagctatttaatttgtattaattttatcaattattatgcattattacgtcactcattttacaataaaattaaataaaatatgataaaaaattacactattataaactttatatttcaaagaatattattaaccaattattattatatatgagataaaacttaattgtgtaaaaatttaagagataaaaatactaattattctaagaaataaatacaagctactttaccatgtttatggtttccacactattcttctaatttattatgatttgtatttaattataatattctactaggggtgggcatcatccaatccaatccaattcgaaccgaccgatccaatccaatccaattaccaaaagttcggatatccaattacaaatggattggattggatgtt

SEQ ID NO: 299535 - DNA, 2602 bp, Cannabis indica
acactagtacatgatcacatggcttatataggaagacgacttatactctcctaacgaaaaacgtaaagactatagcatttattatttacctaatatagtggtcatataatttattcgtgtatactttagactttccataatcttctatgtcaatttgctttaatgaaaatatatatatatataaaaaaaaaaaatacccaatatgagagaatatacctaaataatagcacgttcatatatatccacacatatgatcatctttaataactaatcaaaaagcgaaatgatgaattaattaatatggtcttccctcctaataagttgcgtggtttagagtaaaataaacgacccaccaccagagattaatttaaataataataataataataaagaacgtttaattatatatttcatgatctttatatggtgcgttatttagatatatagaattattgattaatgaaatacccacatgatatatactttgatcaaataatcaagctaattaatataaattataatgcgctcctgctaataagttgcatagaatgaatatataaacgacccacatgagatatgttaagcagaaataagcaactaactgattccactggcctcctaactgatagacagctaacatgtggagtccattgcatagcatgtgattcaagtcgttatttgtgtttaatgctataatttatttctaatcttagttttacatattatcatgtttcagacaactaataattgcaatatacataaagctttaatatttgattaaaaaatttgaacaattacttgataattaagttataattctctccatcattccaaacaaaattttactgatgtaattttcaatatatatttatgtataagaaatagcgctatatgtaactactaatatttaatggatttttacattaacatacgtcttcaaggcttggtacgtaatttgctaattatatataataacttatttagtctacaaaagttaaagatttaataaaattaagaaaacatagagtatataaaaaaaaagagctttagataaatttactgcattaatttgatgtagatatacatatgcattatgcaatcatgtacaaatatatataatagcataaaaatagataaatatatccgggacactaaaattttgaagtcccatagtggataacatgattttctgatatatctagctaatagttaaggatgttgagaagggaaactctagttttgattaaacgcctaaacaacctctctaatctctcttcaaaatcttgaacacatgactcgagactgtgcagttcgttctgaacattctcaatgtgagtagtgttgtcaaacttggcagtctcatggtacatgaggcactgcaacgcttcatcagcctttgcgaattcgttcgcatcggcttgatcatcatcctgatcacaactcacttttttcttgtacacaagcttggaaaccaaagaccaaccactcatcatggtttgtgactttggtccagaaacaaagcacaacaaggactcaaaaattgaaagagtcactgcttcaacttctttcaaaacactaattaaggccatggtttcagcactgctttctttgttggaagatgaagatttataattagcaccagccttcatgttgtccaacgccttacggattgcctttttcacaactttccttgaggccatgtatttcttgacctcgccaacaaggccaagtacttcagcacctcgccttctgcgcacgatagattgaacttctcgtgcgcattccttggtgtgcagcacagcatctttggctgcgctgcacatgtccaagaccctcagagtaccgtcgaccaattcatcaacccatttctcttgacggccttggacaaaggcttgttgagttagaggtagttggaacagcttctcaactgaatcatgcaagtcctcaagaccacttagtttcaggcttactgaagaggaagaggttgcatcggaagctcctaaccggcacaaatgctcgtcgcattgctggaaaagagggtgtggtcttgtgggaaagctgttagagcgaatatggtactgagatttggagggagccattttgttattatgactaatattgatgatcaaaaaatataatgtaaatatactttgatcttagttttggtttggtttggtttattagcttggcctagtgcacaacatatttatagtatgatgagatgaaggagagagacattaattaataagcatcttaattggtccaagtattaatgcatgcaatgcaatagcaacatggattcagatttggatctaataattatcaaacactatctgaccgatgttcatgcaatgtttcctgccaaccaaagaaaccaactcataacctcataaaatattgagataaaatctgagagtatctctcttcacgcgatataggtggttaattataaaaaatatgtggacatacataagagtgacccttgacatgttcctatcgttaaattattgatatcaaaactagagactagagactagagagtactgtaaacatattgacgtgttcccattcttattactcgagagtcgagtgtatggtggtg

SEQ ID NO: 299536 - DNA, 2525 bp, Cannabis indica
tttttcagctacatagtctttaccaaactcaatattttctaacaactttttttaagttctgccttggcttcctcacgccatttcttccacccatgatacaaatgaaggctaacagctttaggaaccattacttctttgtctccaaacatccacttcatctcgatttcaggaaaacccttcaccacctcatcttctggggtaagcacaacaaaacgtttttcatcaccaaacttcttcatatcttttcttatacgagcctctacatacttctgcatctctcttgactctctaagtctttgttttatacgttgagcgaaatcactagcattgttgtcaaaatatgagccaagatcattatcttccaagacactaggcaaaataatttgttccaaatgatttctttgcacactttctaactctttctgaatatcagttttagaaagtttggtgactgggcgctttggcacactgcaacgaaataacaatagatactgagaaaagaccaacaaaacttcatcaacctcttttaaaaatgatattgcaaggtaattcaaatcatgcagcattcaaaaagacaattgaatcaacaagaaacatcatctgtaattgttcacagtatttttctcaagagccatgagtctggaaagcttgatgaagttttaagtttgtttttgttatataatttcggtataaatgcctacactgtcagagctgaccagcttcaaatccaaatggcccagatgagtgccaatgaaagagaataacaatcacaatatgagataaatatcaaaagaagcattataatgcaagttttaatcaagaagacagtgagctagcaaaagaaccgtgagtcaccagattcctattgagcaagcaaataagaacatcaaaccaaaccatattcctcagccagcagcaccatagtgctgcagaacaaaaatgcattcttttcataaaaagctgaacttggcaaatgcattcttcgttttaaatttagactcctgaaggggtaagaacaccaaaaatgctttcttttcatactacaaaatacaacctctcgtacctttccataccctttcgtctcatttcccgattaaaaccttgaaccaactgctcacactccctctcaatgaaacaaagctctctcaccccaaaactcattgccgctgtctctttcctcagaataacatcctcaatctccccaattctttcccacatagaactatactcttgctccagccgtttcaagctcgcctccaacctctccttcatatcccccaattctttatccacattccccagcgacttctcgtattctctcctcgtgttcaccacagcatccacaatctcctccgaccgattctccaacttctccttatctctcttcaattccattaactccacatgaagcccattcatgattccgtcctgcaactcctccttcttcgccttcaccgccttccacgccgcctcgacttgtttcacatccccatttcctttcctcgcctcttctatactcctcaacagaaacgacaccgtttctagtaatctccgcgtgcaatctgcatactcatgactcctcgaactcccttcattccctttctctttctccttctcattctccttcacccttctgcccaaaacctccgcaaccggagccgcaatggcagacacacgaatccctcgaattggagcgaaaccgattgcgaaacaaaacaaagccaaaactattttatttgccacacatttaagcagtcttccctctggctccggagaattcaggctagaagaagcaacacgttcctctttcactacctgttcggagcacagtgagctacagcaaggctctatggagctaaatgcagcaaatttatacacatgtgggaataaaattagttgacgtttctgtaatttggaagcgagagactgagttctgatacggcgagttcttgaaaatggcgggagtgatgagtttggatgcggatatgagaatagaggagggaagtgagtgggaagaagacgagaggcgatgatggcatccatgagattggaaaaacaggaaactaaccatccgccatttctaggttttgaaggtcaatttcatcttgattctaatgctatgttagtcctctctatccttggaaagaaagatttagaatgtgagagagcactgagcagcggtttaagagttttttgacgacgacggagactgatgaggaaggttttcttcaacggataaatcattagttggctgtgttaatgggctggactcagtttctattattgggcctaccttctccggcccgttagaatttattcaaaaaatacctcactttcagttttggggtaagttgaaaaataccacttttattaatcaattaattaaatttacctctaattttatatttaattgaaacatatctttttttatatgtattatacctaaaataccctgacgtaagagaatcacatagaaagtatcttgaagtgataggggcaaaattggtacaatgtttaaaaaaata

SEQ ID NO: 299537 - DNA, 2049 bp, Cannabis indica
ataaatatatatataattaaaatagtacaaaggtagaaaatccagtctctctctcaaaaaaatggcgccaaaagtagtcatgttgagagatgttttctgtcgactaaaaatgaaaagtgttctatctattgtaggacccattttcagatgtatttcctctctctctttttctccctcaaaaccctttaccttcttctattatatatataaatcccatttcccactctcaacttcacgccccttctacacataaattctttatatatatctcactagctttctcattttccgccgctttattttttgttttttttcctttttcttcttcttcttctactactttcaatgtacatctttcttttatttctctctcgattatatagcttctacaatctactacacctcatcaattcatagatatatagagagagaaagcatttaaacgtgttctttttttttttttcttttttgaagttcctaagtataaccatatatataaaatatttagtagagtagagtagagtagttatatagataggatgaaagatataagtgggagtggtggaggtagaaaacaaggggctccttcgccttgtgcagcctgcaaactcctccggcgaaggtgtgcccaggattgtgtgtttgctccttattttcctgctgacgagcctcaaaaatttgccaatgtgcacaaggtttttggtgctagtaatgtcaacaagatgttacaggtaattaattaattaatttacactttttacatatatttttttccccaattataattattatatatataatgctgtgtctagcattattctttgtctttttcctctacaacttctttttccaccacctctccttacccctaataattaaagttttcaaactagagagtcgcaaagttatataaatattccatgataaaagcacacaagaaagacaaataaaaaaaggaattagtcgaaatacatagcgagatctcaaaataataaatttactttctataaacgtgtacgtatactttaaaacttacaacatggtgtgattttacattattggggttgtaatgtattttatgttatccaaattgatgatatattattagtaaatttaagagcttgaattagttatctgaattgagtcactttggaagttgttcccacatgcattaattaatttaaaaatatataatcttaaaacaaatgattattaatatataataataaaacaaaccatctaattaccaactctttcactagctatagtactagtcaagattattagctaaccttttgacgaaaatacaaggtacctagctaaatcaacctcttgctgcttttctaattatggatctttacgaattgtgacattattagacagaatcatccatcttcgtcaatgtggttggtatttctagttatgttttttcgatgagtcaatcatttgttgagctaaattcttataactatatgtatatataaagctctctctagtttagatataaaataaagatattattaatatatttaaatatatatatagagatcaaatataatatactattaattcatgaatattaagttttaactaaagggacgaaattatgagagttgttgggcatgacttttgattatcatgactcatgagggtaattgagtaaattgcagggaaaaggggttattaattcttattggctaaaattatttagttttataaaatcaacattattattattacctccaacttttttcaaaggcttttcacatgatcacgtgaagctgtttaatttgtagtattttgattttcttatacctgcatacatattgttttcaaaagaaatatatacataaatagaataatggtcataataatgtgctgtttggagtccctttttcttctccggggccattttagttaccaaaatagatgccaaaattaaacacttgatcaataagcttagtttgagataataaaataaaatggaatagaagaatagaattaaatttcattatattcatttgtattttaaaatattaaaatgtcatt

SEQ ID NO: 299538 - DNA, 4071 bp, Cannabis indica
gtaatccccgtccctgtcccgtttcccatttaaacggaaaatccctatcccagtctgggcggatctccacaaggccccatccggtagaagaaatgtacattcctatgaaataaaataaacatttcattactcctttttaaaactattttatttatttttcattagttggtatcctttgcgatttaataagacgtagaagaaaactacgtacaacagtagatttaatatggttactaggagaacttcatataaaataggatcttagaaataggatcaattaaataataactttattaaaaaaataaacaagtaaatcttagatagttggttgagaaatatggcaatttttaaagacttttagaattatatgaaatttgaaaaatctagagtttgttgaaacgatccctaaatattttttcaaattttaaatttcaactaactatcaaatgttaatgttatttaaaatattttagtaaaataaatagctaataagataaagtgctagtttaatatatatttgtctaatcttataatttaattttaaattaataaaatatgataaaataaaaaaattgaaatatttaaattatagttaggaatttaatttttttagattaattttaaattttattattattttaatatcaaataagaccatctcatattaatattaataataatatgatcttatagttaaagtaataaataatcaaactaaaataaaataaccaaatttacaattcaaacctaaaattcaaaaaatatagttgtacataaaaaatctttgagctaggggaaaagctttgctagagttctaacttcagaattcttctggtgccatggtgggtcggggccgaccacgcaaggcttcttcttcggggaatgtgagcggttcttagaggcaaggggaaaggaaggttgcgattaaaaaatggggtcttacatcgtcggatttgatgcttaaaactaaatcgatggcagaggttttgggtgttgaagctctgtcagtttcggacatggatgaagatgagaaagtggaaggggagaacactgttaaaacaattgaagaagtggctgatgtggtgtctcctagatccacatacaagaaattagctctggagcaggaggtgtgatcagacttcagaagttttttggaagcaactaatcggtgtgaacaacaactacaagcaggtaacatggtttctccaccaattacataaactgagtgttctgttattagaaatttaagtggagaatttggacaatctaagacaggaagaacaacaggtagagttaagattgaatcagatgatatccagaaagaaattgagtattggcattctgctatggtctgctatgtattgggtgctaacccacttgtgggtgcctttgatgggtttgctaggagagtttggaaaggaaaaagagtggataaagtaggattgctaaaaccaggaatttttattgttagatttcaggccagcaacacaagggatgaaataatgcaagatggatttcatttttttgataggaagcctattgctatgaaaagatgggatcccgtaactgattttagcaaagaggatgtcttctcggtacctacatggattcaacttcatggacttgaattgaaatattggggggagcggactttattcaagatagtgggaccattggggaagtcaatcatggtagattcggttactaaaaatagagagaggctaaactttccaaggattttggtggaagtccaaatgtttcaggattttcttgggattatttcctttcataataaattagatcaagagattgaggtgatggtgaaatttgaatggattcatgtgctatgcaaagagtgcaaaaatttaggctatctagcagaagtatataggaagaaggaaaagccacaagtcacaaagacaaagcagatatgggagaaaaagaagcagggaacagaaggggaaaaggaaaaaggtgagattaaggttgatgaagaggggtttcaacaagccaagaaaaaggggaaaagcctatagaggaaaatcaactgttggtgatttctaataattttcaggtgttggaaaatgaaggggaatgttcaaaaaatttgctagaaactgaaaaagaatctcggctagaaggtgataatgtcattactcaaggagggggagatcctcctatttcaaatggatagaattttgagccggaacgtccgaagaatcaacaaactgaataagcaattagaggttaagcatttaatctctaaaatgaaagtaggtttggttggtttgctcaagacgagagttaaagctcctaagttggaagctttatacttaaatatgttttaggggtggtgttttacgactaataatgcttggcatccaggtggtagaatagtggttagttggaatccgcttatgtttcacgtggatataaaattttattgaagtcaattaattcatttggaggtaaaggtgagaaaggagatttttcaggtttcctttgtgtatggaatgaatgatgaagagactaggaaaaacctttggcaagagcttatagatctagctcaagggtttcatgttccttgggtgatcatgggatactttaatgaagtattaagtgtggatgaaagagttggggagagggtgaagcttcacaaaattaagcagctctaaagttgtatggaggtctgtaaaattgaggatattaaatattcatgtaatttttttaacctagaataataaacaagagaaagaggggagaatttactcaaagatagacagaattatgggtgaccagttgtggttccaaaaattcagttcgggtgaggtgattttcctaccagaaggtagttttgatcatagcccaagaattttacttgtccatcctgagataagagtggggaaattccattcaagtattttaatatgtggaataatgcaccgggatttcatgagaagatcaagcgtagctgggatgctcccattgaaggaactgcgatgtatcggctggtgcataagctgaaaagactaaagcctgtgcttaaagagatcaataaagaacgattttctggcattcaacagagggatgagcatgcttatcaaattttaactgattgtcagaaagaactacagcgatttccattgtgtggggagcagattaaaaaagagaggcaagctagaacaaactatcaaactatacacaaggcaatgctttcctttcttcatcaaaaagccaaggtgagttggcttaaaaaaggggacaaaaatactgttgtttttcatgcatttatccgagcacgaaaggctgcaaatagaatctactcgatcatagatatgaaaggaaaatggacagatcagccagaggaggtaagtaatgtatttctccattattatcatgagttattgggaactaaaatagagaatcggggggcagtctcatctagtatcataaagcaggggtcaattatcatagatcaacataaacagattctccaaacaagcttcactcaggaagaaataaaacaagcagtatttgttattccaggagcaaaagcgtgaggtcccgatggttttggtagctcttttatccaagacaattgggatttggtaggaaaggaagttagtgttgcgatgatggattttttgccgacagggaaactttttttttaatcaagaagaaaacttcattaatcaactgagcaaatacactcttaaaactctctcaaacaagcaaaagagcaaacaacaactaattaattacatcgaagcttgtttacaaataatctctcttgtctagacatttttctattctttacaagatgtaattgttggaattattttaccaggatctatttactatcatgtatgttttattaacatcctaaattcactcaaaggaattcgaaatttagagagaagaaaagagagagaggcgtgtggcttttctgaaagaaaccaatgttcaaagttgtgtgtttcctaaagccaacactttctatttatagaataccctctaggtttaggttagaattgtatggcattaaaataatgaaaactataaatggcaatt

SEQ ID NO: 299539 - DNA, 1673 bp, Cannabis indica
taacctgctattacatgttaaaaaaaaatgtaacttacaataaaaatgtaaccattgaatagtcacccaacttaaaaaccgtttaaaaaaaatagagaaaatacgattgagagatttttcctgtccaacaaatatcaccatccaattttttagagcatattttgcttctctgtaaacaacttaattagtacatctctcaacatgtgaaacaataattttaaaaaaaaaacaaggaacattcaaaattaaatttaaaaagctgatgaatctaatttccttccactggttatcaccaagtttcttggtttgaatattcactgcagcatcaaaattcaactttaatccatttgtctcaggtggttttgcatttgcttgaactttaatacatgaacaaaatttaactttatccatttttcttcaatcattttttcctttataatattccctataatcaaattattttaaacactcattccaaacgccaagaaagataattttttgtttttattttcctatattttaggaccatttctccttccccaccaagataaaacaaaatgcaatgacaaaccaaaaatagctgtgaaaaacacttgaagatctggagtaggagagcggcagggcagtgttggttgtcagtttggacaataatttcgttgtttgttaccaataacataaacatggaacgagatccactctttaagcatctcaacccttctattgcagttgttacaaaatctaatgcggttttttatgcttattttcagttttcaaaccatatacataccatagaaaagccacaaaatcaaataatatacaagaaaaataatcaaatacaaattttaaaatttagggcagttaaggttcagataaactgaaacaaattaaacgttgaaaacacgagaaaacatgtcaaaacctgtagctgccccgaaaataatcaaatattggccgggtgaaattgagtcatcgcaagattgaaaaatcagaacgaaaacccatttggaacggcctaaagtaagacgaagaagaagatataaataataaaaagtaacagcaagaatgtcacagacgatttctaatcaaatctcacaaggaataggagagaatgagaaaaagaaaaagcctgtgaagaaattactatatgcctgcaacggaacatcagcgccaccgtttttataaactccgacgccgtgttctctcaaggcaatgaagtagttcgatacccttctcttattatatatagcaccaccctttcacaatgggcctcaaccctacttactttattctctcaaggcccagaatcgcggcccttttattattgaagctgaattgtatcctttatttatcgattaatgctaccaactaataatatatgagaaaattagagtttataccttttttgtattgccctttgaagttgaaatttcaatgccttattgatcttagtttatgcaatgtgagtaagacatagcaataatttgtgattcattctcaaattgcatccataatttgcagttttgatttccttataattactcctaaacgaaaatgttaacccatactaaacttgtgatgtttgataatttttttcgttttggtttcagaattaggatttgagtattgaaattgaaacaaatctcactatcgtttccaaaaaaaaaaactaattc

SEQ ID NO: 299540 - DNA, 4095 bp, Cannabis indica
gagttgtttaagttggaattgtcatgggcttgggaacccattgactttacaattccttaaagagatgatttctacaaaagcagcccaagtttgtttttcttgtgagactttgtgtgctaaggatcgtattgaaagggtgcaatagagtattaagtttgaaggtgctttctctgttgatgttcaaggaagaagtgggggactagctatgttatggaaagttaaagatgaagctgaagtcattggtttttctacaaaccatatagatatccttactaaagttccgggtatgatggaatggagattaactggtatatatggtgaaccgaaacgcagtcttcgtgcacagacttgggatttacttcgttcattgaagcaagaatcttctctcccgtggtgtctgttgggcgactttaataatgtgatttctcaagctgataaaagaggtggaagaccttacccgtcctggctcgtagaaggctttcaaaaggctatcgaagattgcaatttaattgatatggatctatgcgggtatcagtttacatgggagagaggccgaggtacggattagtgggtggaggttagattggaccgtgggttagcatccatgtcttggttcaatgtttttaattctgcaaaattgtacaacctcgattattcttcatcagatcatagtgctttgtttatggaccaaattactcatgtctcaacaccaggtaaaagagcttttcgatttgagaatgcttggttgttggaacctttatgctttcaattagttaaagatagttgggaagctaaaaatggttgttctgttcaagaaaaagtttcttattgtggagaagttttggccaaatagggggatactattactggggactttaaaggtagaattgctcaatcgaaagctaccttaaaaagacttaagaagcttagagatgctcattcctgctctttatttgctgaagaaaaaaagaatttggctaatatttttcatcagaaagaggtgtattggcgtcaacgatcgaaacaactctgacttaaagatggtgatcgaaacagcaagtacttccatgcttcggccacaacacgtagaaataacaataccatccaaaagttgaaagatgagcaaggtaattggaccgattggaacaatggtttgcaccaggttatattcaactattactcaaacatttttcaagcttctatggtgaattggcaagaggttgttgattgtatttctccatccattactgaagctcataattccacccttatggaaccggttactgtcgaggaagtgaaggcagcccttttcgacatgcagccggacaaagcaccaggacccgatggtatgtcacctgcattttatcaaaaattctggtttgtagttgggggggatgtggttactgtggttcaaaactttttcaactccaattctatacctgtgggattaagtgatactaaccttgttcttattccaaaaaatcctactgttatgggagatctaagacccatcgctctttgcaatgtcatgtacaagataatttcaaaggtcttggctaatagagtaaaagttttgcttgatcatgttatctctccgttccaaagtgcattcatccctggacgtttgatctcggataatgtgttggtctcttttgaggtgctacactacttgaaacgaaagaccaaaggaaaaaaaaggttctatggccctaaaattagacatgagcaaagcgtatgattgcatcgagtgggcttttcttgaagctatgcttttgaagatgggattcaatgttaattgggtagcattgatcatgaccactgtgtcttctgtcaagtatgagattgtgcatggtggccagaggattggaccaattatgccgacccgtggtataagacaaggagatccattatctccttatctgttcattctctgtgtagaaggtttatcggctcttattcaaagttttgaacaaaaaagatggttacatgggtgtaagattgctcgaggtgcgccttctgtctcgcacatgttattcgctgacgatagctacctttattgccaagcctcggaggaagaagcttcaagggtgatggctcttcttcataaatttgaagtggcctcgggacaaaaagtgaacttgtctaaatcatcgatctttttcagcaataatattgatgattctgtgagacaaaggataatgggggttacgagaatggttcaagcagatgaacatagcaagtatttaggcttgccaagtactatggggcgcaataagacgactgttttgggttttcgcaaagaaaaagtgaggaaaagagcggaaagttgggatgttaagttgctttctaaagggggaaaagaaattctcatcaaaaccgtggcccaggcgcttcctagttatgccatgagtatttttcttttacctatcaaaatttgcaaggaaatagaaagaatccttgctaagtactggtggagttctagttcgggtcaagctgggggtataatttgggaaagttgggatcgtatggtggctcacaagcatgatgggggcatggggtttagaagtctaataaatcataatctggccatgctaggaaaacaggcgtggagactcttgatcaatgaaaattccttggtgggacgaatttttaaagcaaaatactatcccaatggttcaattgctactgcttcgcttggtcagaacccgagttttgtgtggcgcagcctgttcgaagctcaatctttgatccaatctgagggtcgttggtgcattgctgacggtaggaaagttgatgtccttaaccaagcttggcttcctcactctgaaaatccattcattacttcggaccatccatctttggaaggagttcaagttcatcaattgatggttaatggaaagcgggagtgggatatagatatcttggatgacttattaaactctcgggacaaggatctggtgcaatctattgtgctaagtgacttcttagacaatgattcgtggtattggcactttgaagcctcaggccattacacagttaagagtgcgtataaagctttacaacatacccaaaatactgctactggaggtgcaaactcagggctttggagaaagctttggaatttaaaaattccagcaaaagtttcgaatatgctatggagagcctgtcgaggaagccttccaactcgtgccaagctccaggagaaacgagtccaggtcccgttacattgccctttctgtcaaatttctcctgaaaccaccttacatttgctggtggattgtgtgtttgctcagcaatgttggtcatctgcaggtcaggaaattaaggaggctgctggtttagcttttgccgactggtttactgatatgttgcagagtttttcctttgctgtgttgggcaagattgcaatgatatgctggggtatttggagggcaagaaatgatttggcttggaataacaaagaactggttgctgctggtgtggtgtcatcgacttctgcttattttaatcaatggttattagctaacgctcgatctcaaggtgttgcctctgctgttagcagaggagtggaagagcgttggagtgttcctgaggaagacacgattaaaatcaatgttgatgcatctgttttcacttcagcaaacttttttggtatcggatgggctgcaagagatcacagtggcactctaatttttgctacggccattcgaaaaccgggtcgagtggaacctgtttgtgccgaggccgtgggactgaaagaagtcttgagttggattaaaattcaaagtttttctaaagttgttgtggagtctgattgtcaagttcttattaattgtcttcatagcaacttgaatatgccttccccctttggttccattgtggcggattgtaaggttctttgtcaagagttagtttcaacttcttgtgtttttgttaagcgttctgcaaacaaggcggccaattttttggctcgttctgcttgtttctctccagaacgtagttatcgtggggggcttgtccctactgatttgcaagctattttgatagctgatttgcatgaataaaagtttacaaactttaatttcaaaaaaaaaa

SEQ ID NO: 299541 - DNA, 1030 bp, Cannabis indica
taatttctaaattaaactaagcggtctttacatttactattacttagagtaatgttgattctaaaagtagtgaagaggacaagaacaatgttgctttaacctatgtttgtcaagcaattttcaggtaaagaaaagatttgtgtttgaataatactttgactgatgaaaatgaaaaagaagttgacttagattctaactagtcagaacttaataagaaatcattggtagaatcatataaggtaatgtatggtaagtggttacaagtttattcaaaaaaaatatttttgtagtaaaagttaataacgaattgtctcacaacatcaaggaagttgaattgaaaaataaacgttgtgaatttgatttgtattcttaaaaatctgagattaactatttgacaaaagaactttaaaattttaaaagaaatgttattatgtagaattcaagctcatcgatttttgaagaggttcaaaatacagatcaaggaagcatgatggattgagatttgttgaatctcaatcgaaaatgagcactcaatttgttaaatatgaaaaatatcttctagttttttccttatctaacatcgcaaggatcttgctctacatctggaccttatgttcctagaaaaaggaaacagttaggtaaaagtgacaattttcatgggaaaagaaaagattcatttctgcatcacttttgtgagataataggtcacattcgacattagtgtttcattcttcaaaaaatattttattctaactactttgaaacttttaaaatgatttaaaatagacatatttttcaaaaatataaacgggttatcaaaaatgaaatcttgttgattatattatgaaatattagtattatgtaatattataatttagagaaagaaaatagagaagagatgagaattttttgagtgttttattccaataggtgatctcctatttatacacatacaagagtcaaatattaagaaactaagagaaagggaaactaagaaaaaggaatgttgattacattaatggtaataaat

SEQ ID NO: 299542 - DNA, 6936 bp, Cannabis indica
aaaataaacaaaaaaaaaaaaaaaaaaaaaaactatctttaagtgtaaaaaataaaaaaacttcttaaattattttattgtaaaatattaattttttatttaaaataaaataatattttgtgtaattttcctttcaaaaacgaccaggcctatgtggaggcccattttctaggcccaggcccagtattgctattgctgttcaggcagtttcagagggaaacaaaacggaaaactatcagaaaattcaaaacaagagtcttttaaggaaaagatcatacaattcaattcaattcattatacattatccaatataaaccctaatttttcgttattgatcgaaattctgagttctcatttggggagatgattcgccagcattcaaatggggcaaattttcgctcagagtcgccgagtcatcgtcaatgtagatggtggaatctagggacggtaaccgccgggcgtcggacattacgaacgccgatgaagctgtgatcgtactgtcttcgtggggttctctgggcactggcgtttgttgatactgcaatgcgtattcgaggtcccaaatcacgtctcccatggaaggtctatcgactccttcttcttgcagacatttctccgctgtttccataaatttctgtagagaattagggcttaattgggttttaattgatgggtcgattattttttcgattactcctttgttgttgcagtattttgcccattcagctaaattgatttgatctcttggtagatgggtatcaatggcgggtcttgcgcacaaaacctcgaggagaacaaccccaaatgaataaacatctgatttttgtgataattgttgggatgtgaagtattcaggatcaagataaccgaaggtaccttttacttttgtgcttatatgtgattcttcgggaggacctgatttggagagtccaaagtcagcgactttagctatgagattttggtctagcaagatgttggctgacttaacatctctgtgtatgattacttgaggggagtcgttgtggaggtacttgaggcctctggctgcgcctatgcaaatgtctagtctttgtttccatgacaaactaggtaagtctgagttgtaaaggtgatctgttaaggaaccattttccatgaattcatagaccagtatcatttctgatctttcttcgcaatacccaattaaggaaactagatgttgatggcggattttggagagaaccattatctctgtttcgaactcggacaagccttggcctgaaccaggtgaacttctttttattgctacttgtgtgccatttgaaaggattcctttatagacaattccaaatccacctttgccaatttgctgcgttggactgaagttcttcgttgctgacttaatttcagagaaaggaattttcaggcccaagtttaaattttgaacagggtgtttagtggtgcttgatcttttgctccaaacggaattttcgatagcttttgaccttctgcgtttagaaaagaagtagaaaccagttgccaaaatgcagagaaatgcaacacttccaagaactgaacttacaactgtagtcttgggtgagttgctctctgtggctgccgccggcattgaagtcaatgtgtccattatctcgaatatttccagcccatttagaaagggagatttatcaatttctggattcacagggcctatgctcacgttcatgactccagaatcgtgggaaccaacttgaaaatcaatgtgaaatggggaatagttgcggagatagttagtggcattgatctcttggctgatgttgctatttatgtacaccttgaacgctaaggtattttcggatatactaataatgtcacagaagtgtgtccttacaaggtgcccagcggtcttattaaccacaaaactccacgttactttggaatttccggtagtgttactcattactttggcactcatgtagactaattctggggtctcatcaaataggtttttaaagctgacggttgtcttataagtatatgcactgcttttgtcgacgagataactatcatctgtttcccagtttctccatacagtgtctctatctgattcaattcttgggccaccaacattgatcctgtaaacggtttgcaaaactgaagtgggttgctgttccccagcgttcttagcttcaccgaggctaaaatttaaaggaggagcagggaaaacttctatggcatttacaaatgcaaaggatgattgtttaggtgtaaaagatatttgaaacttgctagtgttagttgggataaaaaattcttttattaatggaaatcttttactactttgggcagtgaaattatgcaacaacaaaaacccagaagcagaaacatcaaagactgctgtagaaagatcagtatgggaagagaaagcaaagaaatggaggcgtaccaggtaagtagtattaacacctccggtattaaacacatatgaagattgttccttgaaaattcttgctgtgttgtacagagctgatatattcgatggcgactgatttatgtttgtatcagtgctactgggttttgtaaagaagaaaccagttttggaggtgctagattttttgtccccaacgaagttgcgactgccattgtttacagtttcttttgagccacagttgatgaaatacttgactgggatttcgtaggcagaagagatgtttaaatgaagtgttaggaagtggagaaggaaaattaacagaggaggtttagggatattaggtctgtggctctgatgcttctccataagacttgtcctagccctagctataactatacttatctgagaatggtagagatttgagttgaatgatcaccatatgcataaagcagcaactcaggtcgagttttgtgtctagtttgaggtaggcatttgagttgacttttcaatggtaaattttgaatccagaaatatcaaagaggaagaaaaagaagaaggctaattgggtttttcattgctgcttttatttttcattattatatataatggatcccaccaaaaaaggcaggacgaaagggacttctactttggttttaagtaataatgaaaatgaacatctttaagtggtaggacaagtttactgctgtttcctagcagctgccactaaatgccatttgtacacaagtttttccacaatatatatccttttggtatatcttatacttaagaattagttaaaagtagtctaattgtctttgtgtttggccttgagttgatgaaacaagattccattagcaaaagaactttcgaagaagaaaccatctagatttataaatgtgagtcttttcatatacataaaaatgaagcttgagtggtgctaaattgacaccaaattataggttatttgtgaatctttgtaattcaagtgatatgtatgattttatctttttgcttgagagagattgagtgagagagttatggacaattagattgaagggaagaggggtgaaagaactacattttaaagagaaagggacccttagggaccaaactttgtgctttgtttagagtagtttcccttttaaaaaaaataatgaatttagtttttactctttacacaagaaacagagtattagtatttatattaaagagagcataggaataagtatagtgttacaaagagagctataggaaaggacttcaatgcatttcagattgatattagaagaaaaatgaggagaaaacacatgaaaccaagggaactcggaaactaaacaagacttatcttgcgtcatctattttcaattgggaaaacacttgactatccgtcaagcatgagaaatcggcgctcatggcaattgtatcatctctttcgtagttggacccaattgatggaagcctttgggcatttggtaacacgaatgccgatgaaaccgtggttgtactgtcctcattgagttctttgggccctgatgtttgttgcagctgtaatgcatactcaaggtcccatatcacgtcactcatggcaggcctactagacccatcctcctgtaggcacttctctgctgtttcgctaaattttctcaatgaattgggattgattatacccttcatagaaggatccacaatctcttcaatcatccctttcttcttgcatctcattgcccaatcagctaagttcatttgttctcttggtagctgtgtgtcaatggcgggtctcgcacttagaacctccagaagaacaaccccgaatgagtaaacatctgatttttctgtcagttgttgggacctaaagtattccgggtctagataacccaaagtgcctttgacgtttgtgctcacatgggtatcttcgagaggactcaattttgagagtccgaagtcagccactttagcaacatgattttcgtcgagcaagatgttggtggacttgacatctctatggatgattcctccagatgagcctttatggagatagtttagcccactggctgcgcctatacaaatttcaagtctttgtttccatgttaaacgaggaagttttggatcatgaaggtggtctcttaaggttcctttctccatgtattcgtataccaatatcatctctgagctttcatcgcaatacccaattaaggaaacgagatgtcgatgccgaattttggagagaaccattatctccgtttggaactcagagaagccttggcctgaaccaggtgcacttctcttcacagctacttttgtaccgttcaaaagggttcctttgtaaacatgtccgaatccacctttaccaattacaagtttggagttgaagttctttgttgctaattggagttcagcaaaagaaatcttcaacccaagtattaggtttggaataggagagccgttgatggtcaactcggtcaccctgctgtgagagctccctactccatatgcagggacatgaccccaacttgaatgttcgactgttttcggttttctgcgtttgcaatataagaagaatcccaccatcaaaaccgaaacaagagctaatcctcctagagctgaaccaactactataggaatgcttatcttacttggctcatcttctttgggaactagagctgttccatccataatctgcaatatttccagcccatttagaaaggcatttttctctatacttgcatttgaagggcctatgccgatgctcataactccagaatcaaaagaatgaaccaaaaaatcaatggtaaaaggcgcagccgactgggtgacataggccaacgaattgatctccgtactgaagttgccatttatataaagattgaaaataagagtattgagagaaagactaataatgtcacagaagtgtactcttacaaggtgtgcagcagtcttatttacatcgaagctccaagttatttttgattcattgtttgcgttcggattcatttctttggaagtctggtacaccaaatccggagcagcatatgcactatccgctaactggtaataaggcttgttcgagtaaaactggctattctttgcagtgttcttagttctgagataaacatcatcactatcccagtttctccatattgtgtcactacctggttcaatttcaggtcctccaacattgattctgtaaactttttgcaaagatatagaggatggtattttgtaatgatccccaactttgtcagtttgattggggctgaaattcagaggaggggcaggaaaaacttctatggcatttacaaaggcaaaagaagattctttgggtgtaaaatatattcggagcatttcagtctgggtggtgagtaaaaattcctttatcaatggcaagtttgtactgtttttggcagtgaaattatgcaagagcaaatacccagaagctgaaacatcaaaaactgctgtagagagatcaggttgggatgaaaaggcaaaaaaatggaggcgtaccaggtaagtagtattaacattattattgaatttgaatccatatgaagattgttctgtgatggttcttgctgtgtggtacaggtttgatgtgttccccaattggttggtggctttgacagtcttgcttggctttggaattgagaacaaattcgagttctcgtctccaataaagtttctggtaacttcatcaacattttcatttgatccacaattgatgaagtagttttttggaacaacataatctgatgagattaagtaaagaagggtagagaaattaacaaggaaaagaagtaaaggatatattgggatatggatggtgtggctctgaaatttttccatgattatttcttactactctctcatgagtttcaaggaacaagtagcactctcatttgataatatggtagagtcagtagactcagttgttgacttctcaactagaagaatattcaaccaagaaaatgatggtattgactcaattacccctttattatttatagagcatgcatatgaaacagaggttaatattggttttgtctgattcttctttgagagtctgatatgggcaaagaatagtctgatatgaaagagactagtacttaaattggtgggacaggttatgcaactagctgtattgaaagttcatgtgttgcttctcaattggtttcacattatttttgcctttttgttcagtgatgtatcttttgtgaaagttgtaagtcataataatatgaaaaaaaaacaggttttttttgtaacagttgtttatggccttaaattaatatcacacagctatgtataagagcttacataaataattgaagtatcttacatatgaccaagtcatatttaggataggttcataaataaagagaaacaacacttgaaattttgactcgtgaactttactaattagtataataaaagtaaactcctactaaaatttttttggggtcaattggttgtaaaatctttttatgttttaatatttactatatgtatgtatggtttggtaatattttattttt

SEQ ID NO: 299543 - DNA, 2837 bp, Cannabis indica
tttagtgaaaagcaaatagctacatacaatagatctttttccaagctggatgatgatacatatgattgattcccaagacttttctgtcaatgtatcctactgcgttacaaggtggatccaattttcctcggacattgcaagttacctaaactcaacatagagtacaggtatgtcaaaaatccaaaaatatgcatgatttgtttgaattttacacttaaaaactagacttggagttaagggctcacagggaaactttttccataattgatattatctttatcgtgaatggtgaaatgccaatcaggaacatatgtcccgtaaattatagccaagtacactacaattacacctgctcccagaatcctagaaaatcataaaaggcaataatgtaagatttgttgtacacagaaaaaatcaatcaagaagaataaacaaagtcacataccaatgccatgcatataacttgaatatagagaaccatctagaggaaagctcctcggcttgtgattttcttgtaaatatttccacgagtgccacaacaagatatgaaagagctattctctaaggtgaaaaattaattaatccatcatttgatgccatgggaaactgagttttgtaaacacaataatatgtaagaaacattacctggagaattccacaccaccttatctctttcatgtcaacaccataggttaacttgtccggtgcatgtgagaaacctccttcatgtcatagtaatatgtaatgaaagtgaggtctaaccatgccagctgttttcgacactccattgtcatgtcaaagaagacaaatatgcagctaaagttgttttaacaataacaagatgctacagaacctaatgatttcccctttgagttgtccttgatttgaaagttgaaaggtataccatctatgacttctttcccttaattctcattgatctaaacaagaagcaaatgaaaaactaaccttgcaacagaagaccccaaaataggagcttcagagttctgagaatcactcttcttattgctggaaattggtcaggtattctctataaagaaaataccaaggagaaagagaaaaattacacgaacaagtagctatatcaaattatcattaacattctctccatccaataacataagaatatgtattatataaccaaccttgagagaaagggcgatagccattcccacaatgaacaaaaagaagggcattacaaagtcagcaagattacaaccattccacggtgcatgcccaatcatgggccattctccgccagcatcatccacaaatatcatcagctagaatatgcatgtgaacaaaattatacaaatttaaactcttagacatcactaagcaccaaagtttaatcctaaaattggttagctacaagtcaacaagaatttaagccaactccattaaaaaccatcacttacaagtcaaacaaaaatcctaaaagcacctctactgtctgtctactatccaacttgccactaattcagtttcacacacctaaaaataaataaatctataaacaccaacaactaattgaattaccgccacggtaaggccacggaagatgtccaaagaagccaggcgctttgatttaggaagcttttggtcggagatatcaggctccggtaccaaaagactgtgctggtgagtagtctccggtttgatttcagtcattggtaatggtagccccccaatttcagctgtgaccagcttattttcttagctaagttcttctgttttttgtgtagcaacaaaggaaaagatacaccaatattctgattcttctgataaagcagttgttggggcccgcataacagcccattcaacaaacgtatggataagacactatgtgccgaataaaattatggctagtaatatcaaagtattgaagaaagagatgttaaatggagtaagatgggcaatgagggtgagaggaacgcatccacacgcaactatgttcgtcaacatcataaaaaaggagggttttttaaggaacccatttttcagagattaaaaataggttgagaatgtgcaattataaaatcactgtagaataagtttggtcagctaagaaccatttctctgatttatcaccaaatggatgcgcttctacaaaagtcatttttaactccaaagcttgctcaagttttaaagaacaagcttagaataacatggctaatggagcacatcattgtctgatttggctaagttgcatcattccaaacagtacaggtaaaacacttttttttcagttaatgaagaaaaaccattttcaagtactggtgccataagcaatataatcaattaaaaagagagaacccatttgggatttcacaaaatcaaatacagcacaatactcatccggttagcttaacatctgaaaatgtccgaaagtatggattggataaaagaatgaaaccagtaaagaaaggctttccacattttcagtgtcaataataataataataataataataataataaagcttcatcagaagggtgattcctttcattgttcttggttttctcggtaaccaaatggaacaaatctgaacgatcaaaattatccttaaaaaaaaaccttaacttatcctcacagttgcggcagaggagcaaactcagtaactttatactcaaaaattaaatacctaaatttcaggtcaaaaaagaaaattcaatacctaaattacagttagtagataaaatagtacatgtaatttaaattttaatagctcaaagtgaaacatcaatccgttgtcgtccagcggttaggatatctggctttcacccaggagacccgggttcgattcccggcaacggaa

SEQ ID NO: 299544 - DNA, 1929 bp, Cannabis indica
atatatatatatatacacacatacacacacagccacaaagccacaacctcctctctctctctgtttttctttcgctttcaactttgcctctgtttcatacataataatatctacctttgttttccctttcttttggaacaacacaacacaccttaacaatcacaactcacaagccctttaatctgctttcacaaaatggctgaaaagactcaaactttagaagccgtagtcaaagaatctgtcgatttggtaaccacaaacaaacaacagagcattccatttccatggctatgttaacagtttcctcagtttttttctttaaactttgattttcaggagaacgtgccacttgaagaggtttttcaggctttggtatgtaataaacatggccttaccacagaggctgcacagcaaagattggccatttttgggtacaacaagcttgaggagaagaaggtttataattctttacaattttttcagatgaatttgcttcccatattcatggagccttcaacttatttataaactaaaagaactacaatctttctgttctttcttcttcttcttttaaagaaaaaaaaaatgatttttttctcttttgtcttttcaggaaagtaaatttttgaagttcttagggtttatgtggaaccctctatcatgggttatggaagcagcagctattatggccattgcactagctaatggaggagtcagttcttcttttccttatctgttttagttcttacgcaaatttagttaaaaaaaaacaaaaaaaaaggtcgaaattttgtcattttgtgataaaagtgaacactcaccaatgattaaagatttttcctttttagttactattataatctttgctctgttttagggaaaaccacctgactggcaagattttgttgggattattattctccttctgatcaattcaactataagttttattgaagagaataacgctggtaatgctgcagctgcactcatggcacgtcttgcacccaaagccaaggtatctcatatctgaaatgtcctattcaaatggaaaaaagcttgctttttgatcattttccaaatgaaaattcccattgttgataggtttttagagatgggaaatggcttgaggaagaggcttccattcttgttcctggtgatatagtcagcattaagctaggtgacattattcctgctgatgctcgtttacttgatggggatcccttgaaaattgatcaggtcaaaatcaaagacaagaattcttgtttttttgttgtttgtttggataaattatttgactttctatttgggttttttgcagtctgctcttactggtgaatcacttcctgtgacaaagggtccaggtggcagtgtctattctggttcaacatgcaagcagggagagattgaagcagtggttattgctactggtgttcatacctttttcggcaaggctgctcatcttgtagatagtacaaaccaacaaggacactttcaaaaggtaacaagtaacaaaattaatttcaatagttcttgttcttgagttgaatgtgactaaattatttggcactgctatacaggttttgactgctattgggaacttttgtatttgttctatcgcgatagggatgatcattgagattattgtcatgtacccagttcaacaccgcgaatatcggcctgggattgataatctgttggttttgcttattggaggaattcccattgctatgcctactgttttgtctgtgacaatggcaattggttctcatcgtttgtctcaacaggttggttataacttatagtgagtgttttgtgtggtctttgttatttcgggtttgatgattggtcatttttatagggagctatcactaaaagaatgacagccatagaagaaatggcgggaatggatgttctttgcagtgacaaaac

SEQ ID NO: 299545 - DNA, 2193 bp, Cannabis indica
aaacctacttgatcctggtttctcaacttctctgacaatgtgagtcatcccagccttgtatccaaggaaagcagtaaatttgcatggctttgttgggtcatcttttgcaaaagccttcactgcaagcattactcaaaaagatcaacacttttacagaaaatcaaaacaatcaagacttgcaaaattacaagcatgtcgatgataaattcactaaaagagcacaaactaacattttaactctagaaaacataacaaacttcttaaagacaacaattaaatcaaagagatctcgcaaatgaattaaaattattacataaacatcagatcattaaacacacagaacctattcaaaacagtcaataattcagaaaatattcaaatgtagaccattataatcaaattagtttcggaagctgaaagaaaccttttcccctatggcgagcagctctctttcttgggaggaaaccaagagaaccatgtctggggtgctcaaacttacgatgagacatacttcctgctaaacttaacaaacagtcaaagccttagttggtgacaattaataaaaagaatacaattcgatattaaaaacaataaaacaaatcaacaatcaacatccctttcaaagggaaaaaaaagaagcaacatcacacaatataacatgacatttatcccagctggggtttgaatataagaacaatcacacaatgaacaaaaccaattaaattataaacaagcagcactagtctagattataaaacataaatcacatgtataaaagcatttacacatgaaaaaaaaatagtataactaaaatatacaacaaccaatgcatacaattaacctgcaaacaagggcaataccaattaaacccaacagctgtaacagaatgatccccacaaccaaaggcctatggtaataatttataccaattctcaagctcataagtgtttctttccatataccctcaaaaagggtttatggcaaacagagccgcttcgagactccagccttgattattaataatatttttgggggaaatcattccaaacagcatttgggaaataaccacattaccacatgtttgacaaaatcaaatacaaaacagaaaaaaaaaaaaacaacaataccaaaaccttgttcaaaatacaaaatttcccatatatacgaatccagatctacaacacatataaatcatggcaaaaaaaaatcattttatctaaaaaccaaaactttaaatcaggaaatgacacagttagcaattgacaacaattgaaattgaaataacataattgaaaatcaaaagcattcacaattcataatctctatctaaaaatcaaaactttaatcaggaaattacacagctagcaattaacaacaattgaaattgaaataacataattgaaaatgaaaagcatgattcagttagcaataattataaaaatagtgaaacttgattaaaaaattgaaatagaaaatcaaaagcttctacctcggaatcgaatgaaaataaacccaaagagtataaaaaatttggatagaaggaggaagatcactgcggcgactcctctcaatttcagtgctataaggaagaaagtgaaaccctatttgctaggtctcacttcttataaggctttgtaatgtaatcaacggctacgattaattttatctgtcgtcatatccgtcggattaattgtttgactgacatgtcgttattatttaactgccaattaatcatgtcgttttcagtaataaaatacgacatgtcgtttaagatgtttatttttcattaaaatttccctgtcgtttttcacatgatatgtcgttttcattttctttactgaacccaattaactctaagtattcttagctaagacatacatgagcaaaagtatttacttctctataagaaagttattaagcctaacttatctgataaatctagcttgttattaagattgtttgcacattaacaacaataaataaattgatattggagtaccaacattgtaaaattggggatgtttaaaggctaattagtaatttttttccttgaacttttacatgtattaaattatgcccctgaacttttttgacctttaaaaattctccccgaactattgagattattaaatttaaagacttttgtctaattttagtacaaaaattctaacatggatgaaagttcaaggggca

SEQ ID NO: 299546 - DNA, 764 bp, Cannabis indica
ataaagacaagtactaaatatatattatgcaaagtgatgatcataaatttgactatatatattagaaaatatattaaaacatttaatatcctaatagacaattttgaaaatgtcccacaccactatatcaaaaattgtatctagacatattaataagctagggttataaatttgttgaaccctacataaaatttatgaaaagctagcaagatattttattagttggtcctctaaaatccatcttatgctagctccaagtgtccaactaaatttatgaactaaaatatatataatatatatatatatatatatataaaagttgatcatgattatctaaaaattgtaatgcatcatcccactcttttagctcaatgttaattagtatacattaattgttatttcaaattaaatttcattttcaacttttctacattcaatgaaaatctttttgtttggggaaatcacatcaatagtgagactgaaaattattgttaataagtgccctaaagagaagatgacccacaaatataacaaataattgatcctttgaccacatcacatatcgatctcttgctagtagtgattcatataattgtagttattgttacacatgtacaacatatatatatatatataaatgggtgactattcaatggttacatttttattgtaaccatatagttacatttttttttaacctgtaatagcaggttaccaataggtaaactttcctttttagatttagttaattataattaactatt

SEQ ID NO: 299547 - DNA, 2441 bp, Cannabis indica
actaaaattgtagtatagaacgtaccgtttacgttttttttttttttttttttttttttttttatatatttagatacttataatcttaagttctattatattacatatattatcattattacacactacaaaatttgaaataattaaggttaaaatagtctagtgcatcttttattttatatacatgtaaaataaattatttgaagtatatatacttttgtattataaattatatctttttttttgtaacatttgcaaaatattttaaacctaactacgatatattgtcatataaaaaaattaagattatacctctataatatagaggtgcatgaatacaccatagaagtgcccaatattatttaatattactgatattatatatactaacgtgcatgcatttgttaaattaaatatatataatattgtatactattttgacttaatgaagcaaaatttatattcattcaatgatgatcattgagaaaagcgttttatttctttttttgagtacaaagagaaaagcgttggatgagttgaattttatatatataaatagttttattataaggtttccttattatatcattatttgatccagatccattttaatatgtatttttatacatttaatttaataaataatataaaaaagttaattataaaaagtcatttaaatttgatgttaagaacttcaacatacaaaatatctcaaatgctctagctagtagctagtatatatattgtgataaaagtggaatataaataaccaattataagaagaaaaggaggaagacggaatcatagataaaaattaaaatgtaagataataaagagttgaaatattcttactataggtgaatagttttataggataaacacatatatagagggtgacttttaacattatatatatgcatgattattcattaattaaattagagagagtgtttccaaatcatgttttaaaaattatatactaattcgagactacactagtattatcatgtattatgtatataatatataatgcgtgtacagcatatattagatcgaaatacggccatgtaatattagctgtatatgagtttcataatcatcacaaacctgtaggacgacaggccaagaaacggtcaagcagctgcaacagatgctgagccttagagaagacttgttcagttttcatctccctaaccggtgtggccctcacgcacacggccaactggttagtgggaaccacagcctgatcataattatcatcatcctcatccatcccaaacacgctcctcctcccccggcggctctgcatccgatactcgagccgctcgtccaggtagagcgcgtaggtcctaacgaaagccgagtaatcccacgaggaagagctcgagctgtcgcgaaaatccgacatgttgaggaagcgcgtgccgcgacgcgttgagaagaatatctcctgctcgtaggctgggtctccatctgagagaaggcggtggatgaggacaagggtcttgagagctacggtccagttcttggtcttgttgaggcggcgggctagggtgttgacgcaggcgctaataaaggcgcgtgagtagcacgtcaggctgaggatctccctgatgtgcttctcctcggggggctgctcgacgtggcgggtggccttcacgatcgccacgtcgaggtcggccagtgatgcgctgctgcccacctttgccaggccaatgctggtctggtcctttactgcgcccaaagctcgtctcatcttgcttggagccataatattaatgtatggcctaaattgtaattagtgttaaggactatataagaaaaggtagaaagcagaatagtttggggaagaataggaagaagagagaagaaagattatgactttgatgggattttaatcattatttttagtagtaatctctcttctcctcaatgaagtcctttctttgtttatttctttcattttctatgtttttctaattctcttctcacaaaagctctttctgtttttttaattttcttaaccaatgaatattaggccattctcttcggccatgcattatgcgacattgtagcatagaaatatggaagctcaatgggagatagtcagccacgtggacattcataagtaatcattggataataaatacctacgagggttttcatttttgggacttcattagaccatgagtttagacgtaatatggctaggacacactgctagagtcatgggactccatatgaaattttaaatataaaaaatcaaggcgaattaattagtaattttttcctttaaactttgacattgacatgtattaaatcgtatccttgaacttcttttaccgttaaaaattctcctcgaattattgagattgttaaatttaaagacttttgtctaattttaattagtaaaaaaattctaacatggatgaacgttcaag

SEQ ID NO: 299548 - DNA, 5864 bp, Cannabis indica
ttttttattttttttttacaagaagcttgtcctagatttgatgttggttatttttatggccaaatattttaaatgagatgtaaaactgagaactttcatgaactttgaaaaagtaaatatttgaccaaatcgacaaaattgctgcaggtgttcaatgatcaatgttcctcaatttaactaacatgaaaagatctaaatttttacaaatattacatatcaactaattagtttgagtaaaacatattcaagtatgatcaagttgacttgaagaaagcatatgacacaataaaataaaattttattgaaaaaatgctatatgtctttaaatttcttagtctgaaaatattttctcaaacttaaggcttgtaactaagtgaagtagaaacctccatttactgttgtaataagaaagaagaagaggtttgaagagtgatacatgtgtccggattcaagagaaccaacctcccttttaagtacctaggtattcatatttgtgcaaagagaataccaactgctcaatgttaggtgattgttgaaaagatggttcaaagaatttgaatttacaattctaggaacctatcctatgctggaagagctactcttgttaattcagtactcataattataatctgtgtttctggcaagggacatgtggacacaagatagataattaaagcccatcaacgggccctaaacgacaaggattgggccaagcctaatgccagttggcctttcaggagggtaattgcgttattcacctaggtgagctaacgccaagaaaaatttgtatctagaggacttctagctccacgtagccagaagtgtttaccagcatattcctggaagtcagcgatagtttcccttctaccaatccttgcagaattagaaaattactttccacagatctcagacaaggaatactatcaagctaaaatgagaaactacataattgaagatcaaataattaatgcacaattaactatccacaattaaaggacacggtatgaacaactatcaccgtgattaatctgccaagtcagcatacagtcactgcctcatgggctgggctttatacgataagtctaaagtactgtattatttataaacacccattagaggaaaaaaggtaactaagtataacctctattactctataaatacacactaaatccttcataaaaagggttagaaattcttaactcacaagcttgaggagaaaatagagcaaatatactcattgtaatcctttgacttttctagcctaacagataataaaattgaattgtggactaaggctcttttgattgtttttttcttgattattatattaaaaaaatcatttttgaaaaatttcagtaaatattttagtgctttcattgagagctgaaggaagcaataatactatttcaaattacgtttagtaattatggtactcacccaaaataagtttgatcttcaccatattgatcctaatgctaagacaagagatacagaagatccaactgaggtgaccagtcgccacaagaaggatcaatacagtaaagattgaaacccttaagattctatggttgaagatgatgagtcaggagagaatagttttgaaaattttgaagatgatcactaagacacacctaaagatgatgaccaatacatgcctgctaacggtgatgctggaaagaaggatcatccatacaagttagatcttgtggtcatcatggctaaaaaattacaaaatagctgaaaacaaattgcttgggaagaaaaattttctttgctaatgcttgagaagatgtcgacagtggaagttgtaatgacatcactgacagttggagacgaaaccaaacaaaaggctctgacagacaacaccaccgataaggctaattttaacaacccttgacttacgatcctcataaggaaaaaaggaaaaggaaagtaggtgaaacttcaaagaaggctcatctggctgaaaagcaaaagaaatataaatctgccagccaacctcaacagaaaaagaaaggaaaccatgtcccatggtagagtgaccaaactaattctaggggcagagttgcacagaaagacaaatctaatgctacagcgaaaaagcctacaacctagaaagatacaaatcactgcgatgattctatcagtcaaagtgatgatgttgaagagttgcatttgttgtcagatcacaacagtgaaagtctctccacaaatgatcttcagagtagattaaatgcaaaagaaagaaaaggcaagaacagagaaagctagacctcgtggagaccacttaaggaaccatgcttgattcatctattgtaccacctactacatccactacagtttctagtatacagactaccatcaacccacgtgttcctgaagttacttgtgctcctgcacctacaactcgtgtttcatctttagcaccaactaatctcattgctgttaacaatgacaacaacaaatgcaacaactactgctgctcttgaccacactatagtgcctgatgttcttactgacatcactataacaatagttgcaatgaattaacaaaaaatgaagacgggtgccaagtctggcataagaaagctcaaagtatatttggattttaaagagacaacaagtgtgaaacaagccttgcaaagtgaacatgggaatcataccatgtctgatgaaatgtttattttaaagagcaacagaacatgagcatatgctatcttaccagaaggaagagaagccattggttacaagtgggtttatagaaaaaaagagaactctgatggcagcgtgtcaaagtttaaagctcgccttattacaaaaggattccatcaacaacttggatttgatttcactgaaacttttagtctagtggtcaaactagtcaccattagagttgtcatttccttagtaatgtcaagaggttgggatatcaagcaattggaatgtgtttcttaatggtgattttcaagaggaagtgtatatgcaacaactccgtgggtttgttcttcccacaaccctcatctagtgtgtaagctacacaaggccatatatggcctcaaacaggctcttcggactaggtttgataagtggcacaacaacctcattaaactaggattcacttcctctaaatcagataggacactgtttgttctacacacatcatcatctactacactaacaatggtctatgtaaattatatagtcatcacaggaggtgattccaagatcattgccaacattgtcaacactttgaacttggattcacttcctcaaataagacaagtcactgtttttctacacacatcatcatctactacactaatattggtctatgtaaatgatatagtcatcacaagaagtgattccaagatcattgcaaacattgtcaacactttgaattttcaattttctctgaaggatcttggggatttaagatattttcttggcattgaagttcaatctactccacaagggcttcactctctgaatcaaagtatataagggatctggtcataaaagctcatatggaggatgctaaatctcttccaactcccatggtgagtggtttgaagttgtctacccatggccatgaaccatttagcaatccttagctaaggtcaattgtgggagccttacaatatctattaattagtcatcttgagctagtcttcactgttaacaaggtgtgtcagttcatgaaaactcctatacaaccccattggcaagctgttaaaaggattctcaggtaccttagtggcacaaaagagtatggcttacatattcacaaatctacatcgaatgatcttgttgctttttgtgatgctgattgcacatcaaatctcgatgataggtgatccacttcgggtttttctatcttcttaggtggaaacttaatcacatagcaacgtaaaaaagcaacaaatcattattcgatcgagtacaaaagcagaatattgaggcttagctaatgtggtatctgaactcacttggtttcactccctattcaatgaactttagattcctcagtctaagcctccagttgtttggtgtgataactttggcacagttcttcttactgttaatcccatcttacatgctcgaacaaaacatattgaacttgacctttatttcgttcgagaaaaggttttttgccaataagttcaagtcaaacatgtccctgccacgaatcagttagcaaacagtctcaccaaatctatcccatgccatagttttcctacttttagatccaaactcacaattgcaagtccttccaattatgagtttatggggaggtattacggtctccttgttaaagttagttgagttagttaaaagtttgttgtaagttagttagtgtgtaactcacttactgttatttgtttttagctcactcctctatttttggttgatatataaagacctcctcttatactctatataatgtaatacacacaataatacattgatctctcttacaactttttctgttctttctctcatcttcttcctcctttcaatctttcattcttatctttgaagctcttgcagctatgagtcgaaggattaacaatcctaatagtatcaaacattttcttactaataagttatttatttgcattcagatgttctgagtctgttttgagagaatgatgaaagtgatctcgatgatgatgttctaagatgtatgttatattcttatctatattttaaacttatttatttcttacaaatctatatttagtgacattttaaatctattttcaggtccaaccaatgataaacttgttttagaagaagtggaagcccaatattctaatagaatgaaaaagtagggtgttgtttctttcaatatttatttggtcttcgaaaataacaacaaaatttgtttatgttgtgttttggtgttaagggactaattatatgagccatttggaaattctagggaagaaaacactaaagtgcaagctttgctagatgtcaatatgccttcagagctaaaatgctccatttggaatttgttttttaagaaagcgatgataatctcttgttgctagcatagttttgttcacaaatataagtgtatatctatatttagctaatctcaatcaatctttttgtcttaaattgcacaattttagtcttcaaatcatctttgtacccagctccaaatgtcgctgtatttatggctgatggcactaatgctgaccatgccacaataaaaacatcacagcattaagacgaggaaaaggatatggaaagaagatattataatattattgtgacatgcacgatgtaagactaatatagtttgttataatttaataaatttaaatattttagtttttcttataaattttaatattatattaattaattaaaaattaaaagttttttttacaaaaatttattgtatactattaggggcaacaagttgctactaaaaaagtataagtggtccctaaaagtcccttaaatcttataagtagatttcactaatgggcaatttttatatttttagggatgatttttgtcgtctctaatgctcacatttaagggaaattttttgttgcttctactaaggagtagtagggacaaagtgttaggagcgatattttaaaggcgacatgtggctcttaatatcttgtaagggtaaagttggggttttgggagcaacataaaagtttcttttcttgtagtgaaacttgtgtcaagattttgtatgtatccttttttatgtgcataaattatcaaataaataaataataataaaaaaggattattttgtaaagggaaaattacatagaatattgacttttctaattttattacttttataaattacttttatattatatttttttttt

SEQ ID NO: 299549 - DNA, 3484 bp, Cannabis indica
aaaagaaaaaaaaaaaattacattgcttgaaatcacaaaatttagaggacttaacactagtaaccacacaacaaacacaacagttctattgttacatttatcatgatacaaagtagaccacctaaaatcacatcaaaatagttttttcttttcccctagtctagttccattttatttgatcatatctgaacatttcctccagaagtagtagtagtatcatcaggaggatttatcgaaattaacagcaaagaaacagtaatagagatcaacccagcccaaacaaacacaatcgtagggactcgtcctcttcttcccatcaaccctttagcaaaagggtacatatgagccaaaacccaaaagctaaagaaagtcccacctaagagcttgttccattgaggtaacacactgtataaggtcctaaaacaactaatcaccacagcaactatgttgaccactataatagtcaacggcattataaacaaactggtccacttaacaacatataagtcagcaaacacatcttcctcatcctcaccacctgacttagaagtcaacttaaatgaaatctcaataccagctatgattttcaataacccttgtactacagctacaaggtgggcacttgtcccaccaatgagccaaaactgttcgtttctccaccattcctctagaccaattccagaccatttcacttctaggagggaaattagagtgagacagattgtgatcgttaggagataggaaaggaatgccacactaaggccttctactatgaactgtccagaaaggagtgatagagctggaagaaaacaataaactactaggaagattgaggtgaagggatagatcccgacgtttaggtaagccacgcgttggaggaacttgaggcggcgcgtggctagaagtgcattgttctttgagaagaatatctcgactgagcctgttgcccaccttagcacctggtgtagccggtcagtgaggttgattggagctgtgccacggaaggcgtctcgttttgttatgcagtagactgaccgccaacccctattgtgcatccggtagccggtcaccacgtcctctgtcactgacccgtatatccagcctattctctcaccccattctgtcttatcctcgtacctgttttttttttcaacaaataaaaaaaaaagtttatttcgtataaactctcttttggttaatttgtagaagaaaatttagacaatgcagtaatctgctctcgtattacattttactccgtataatcattaaaactcttttttttcaaaataaccaagcgtaatttattacttagatttcaatgcactgaacatattactcaaaaatccaatgtagctgcttagcttattgaatctgtagagagtgagtgaaatacttaatacataccagcaagagatgacggcaacagcttcggcgacagttggggcatcaagaggaggacgcgggaggaggagtgcgcctggagggcggccattcttgacagagctgtgatcagcaagaggacgtccttggtactcagcaacggcaatggtttcagtaaacacgtttgagtttccaaacttcttaggcaaaccaagatcagggtgtgaatttaatggctgtgtatctgaatcgtcatccaccaagtgttctgattggtaatttggagctctctttttcgattggccaaacacgcctaagtattcgtttgctctcggtgggtgaaacccgtagagtgcatatcgcctgaacatgcacccggttcccacgtacaccgggccttgcaggccgtcaagagctctcatgttacctgttaaggtaaaatatttagtaggagaagtgggtgaagtactcttatcatcatcaagtgacatcgaatagacatgagaatatcaaatcgttattgaattcttattgtcaattagatttgagatagaattaacgaaatggatgtaacatttgtatcaaccactttctaaaccttcattatacttgtttagatcattttttcaattacaagcttaatggctaatccaaataacaatagggaataagcataatatctctaatgataagaattcattgagataaagaaaaaattaagaaaattttgaaaaatagtctaggtataaagacacctaagaaataagaatagtagcttaagaaactacaacaaaaacaaaaagctctatctacactagttttaaaaaacacaacaactttgaaacaataaggaggcgtttggttggagataatgaaataattttcactctattgtaaaatgaattttctaccattttgattaaatgactattttattttgaaatggaaagaaaaattatttattttttttttgaaagataaaaaaaattattatttttttttttagtaaaagaaaaattattttatgcagattattttattctattttatttctatgtgttcattactaccaaccaaatgccacctaagctaatagaacactagtgaaagtttggatacatcatactctcctttgtgatgacattgttgtttagaaaagtaagcctatttggtagaggtttcaaagtaaagcattattataactaactaataataagataataaaagtgagaaagaagtaataccatcaaagaaaacagtgttgtgatttgcatatcgatcagatgggtcaatcccttcaaatctttgtgggaattgtatgtagcaaattctgtctcctccacggtccatcatgaaacacattccttccttaatggccaaacagttgtagatgtaatggtcacaatcaaggttgagaataaatggtccattggagagtattgctgaggctctaaccatggcgttcatggctcctgccttcttgttgtgatcgtaacccggcctcttctctctcgacacgtacgcgaacatcggcagcctaatgtccactcctgtgaaatctagcttttgttcatcgttgtaacccattacttgctcattctctgggactttagtcattacctgcactcaaattcataaaaaatcttaattcaaacttggtttcatgattacactaattactcttttttctttggacaaaactaatttgggccattatcttcactactactttttgttacatggagcatgagcatgggacttcttcattttttttttcttaaaaaataggaattttgaacttttttctcaatatatatagttttcctaattataaattaaccatatgagattgtatatcttttaattaaggtttctcatatataataacaaatttatgtataaatgggagagaattttgttccgtgaaagtatgtatttttgcagtctttataactattgaatcaagattgagttgatctaacagttgtctctataactattgaatcaagattaagttgatctaacaactatctctataactattgaatcaagattgagttcatctaccagttgaaacccaaagtatactaattttttttttttt

SEQ ID NO: 299550 - DNA, 4024 bp, Cannabis indica
aagaaaccgatttcttggtgattttttcagtgatttttccggcgacaatgccaattccaacaaatttttggcgtcggcagcaactccgacgaatttttcggtaccaaccgctactccgatgactttttcgatgccgggagtaaactctggcgacttttccagcattagtgacaaataaaactacctaaacaaataaaaacattaaatatggcatttgaaaacctaattacatatatatatatgacatatcaaatactataaaaagacctaaaaagaaaaaataccatataaattggtcaaacttaaatgtgccatatatttatcataaaaacctttaaaattttttctattatccatggtctctagttatgttatcgaggtaagtggagagtaacctctttggaaccattaaatgcctatagtgtcccttgtactacctataaaggccaagtatcatttgaaaaatgattaaattttttggttctaagcttaaatgcaagccaaatcgatattgaactttaacctagaaaacttcatcttacagctgacttgtggattagactgaaccaggtaaaaagttgtctgacttcgtcgtcttccctctctcttcaatctctaatttattttcttagttgatggaaaatctgatcaataaactttacttttcttatcttcatacctcactttctttaacctcaatttctatccctttagaatttatctgtcctcacttacaaaaaattaaataaaaattaaaatgaaatcaccattacatttacattttttttaaaaaattaaaaatcaaaatttgttaataaacgcacccttagtttattaataacgtaatcacaacaaattacaaaaaatttaagttgggagtatttcgatcttaagtaataagtagtgacattgaaatacaattcattttgggacaatattcataaatattcattttcaagatggtgactattttttttttttggatatgtgtgaattgaaagtagagtaatctatgttcttatatatggctcaatacttttacatttaatctatttggaaacaattctccaataattcggaagagtagttctccatatataccataagccaagaaacatatcaacaaaatagccaataaattaatagcaccgctctcaattaaattaattaatttgcatactatcatggtcaacaaaaattagtgatctccaatcattcagtatggtgataaaaatttcgcattcaaattgtttgctccatctaaggaacatttttcaacctacaaaaaaatcgaaaaaaagaaaagattaatacttattatgataacaataacaataataatattttttttgggcgttttggatcaggaaattggaatcatattcattagaattttatttctatttttataaaataaaaataaaagattacctgtaaatgaatattatagaagaccctcccaaaaaacgactcaaaagaattaacgtttagtaccgaaaatccatcttcctctagatcaatcagaatatgggacaatggagtttgttgaaccttaaaacaggaaatttgaagcactatttcactatcattaagcctactgactgaaacattacacaaagatctccaagctgataataaggagcttttcttatggctttcttcataaataagctccactctctttgacatgctcgataaaagctcttcctttttcttaatcagtccttttacttgattttgaagctcaggtatgtattttatggttcttgaaattgttgatggattgcttagttttttctgagccaacacacaaaatcaaaataaaatattaaattttaaaaattacaagtaattaattatgtctgcttaattgtaataaaataaataaaagctcttaattactgcgtaaattaacaaaatgacaggcctatatattagataaagaaaaataatgaatatatatataccatttggtcagctgccggaagaagagagcggagagaggaatagagagagttgattctctttctacggtcacgctcactagcattgtgacacagcttcttaatgatcgtggggtcatcaccagtgacagctgtcgtggacggcagagatggattaagattattctcttgttgctgttgttggaaaagagattgaatattgtcgatattattgtgagcaaaaaaggagaatgaatctgcaaagtcagtagtggttctgccatgatctaataatgccattgatggtgatgaagaagagtacaatgctaacattgtgttatccttgagagaatgactactaattattagtatccgtactttcagatctgacggcgaaaattaacttgtttaataggcgtacatgttttctatatatatagtacacaaaacacatgtatatatccctcttcgtccttctctatctgtacattttttattagttggtgaatataaaatatttatgctaataagaaaatgaattatatataatatatccattaaaaaaacacacacacacagagttagttgatgtacttgtggaaggagtgtgtgactccatttctataatataatatagtgtggtcaaatatgggaattaatgaaactatagataggattcaaaaaaccataagaaaacataatagagtcaatgagttgatcattttctagctagctagcacaaatatgcacagatgtcatttcttcatgccataccacactacattacatcctcaaattattcatgatgtttaaaatgtctccctatcacattacgaaaaatgactcaagaataaatgtctaaaagaaggaaaacaaaaatgaattatatatttctatatataaatataagaaaatgaattatatatattaggtaaattttgtatcattttataaatataaacaaatgtttgatgatgatttataatcatttactaaataacaacatttgtatatattttttctctttggtttaatatatattctgttatccaaaaatttcactactttttcaaatgttaaattcattaaagtaaataacatatattttgtagtctgaacttcttataccttattaatgttatatacattaagattgatagaaataaatagttacaaaattttagtactcaattttttctatataaaacaaatttgaaagatatattatttatttaataggaatggaaactttattagcaagaagcttcaactattgtattcaactattacaatagataataattcagttagagcattattcttagtgaaaatacaaatgagataaaaacaagaagtacgaacgatgctatgaccagctttgtttatagaacatttaacaaaataaatctcaacaaattttaaagaatctacaatatgttatttatttaaatttaaaaaatattataaattataaaataaaatgacaactttaaaactgaacttatatatgtatcaattaataatattttttagtttttatttttgcttaaataaaatttgaagagcatatggaagtacaaattcgtgtgtcttgcacgtgaaataagtaagcattagagttagaagcgcatggaagggttgatgaaggcatgtggttggcgggtgctgctaaaagccagacagcagctcattgacgatgcaaagagattccctacctctctgtatgttccatatttcttatttaattaaacacaaacttctatattcttccatttaaactacttgtattgttgttctatgtatctgtgctagctagtaaatttgatcttaatttaatccaaaaccctagcctttgttaatataaaaatgaggaacagattgctaagtactaggcccattataattaataagctttggtacatgacaaataattacaatatagtaattttacaaaacagtgagataatagcatcttttgaattaataatattacaatacatgcaatcattttctttttcaaaatgtacgtacttgactaattttcttgaactgttcaaaaaaaaaaaaaaaaaaaaaattct

SEQ ID NO: 299551 - DNA, 2892 bp, Cannabis indica
tcttccacaaccatttccgtttttccatcttcaggtccttaattttaacacagctaccacatcaaggtgcatacatctgcaagcaaattaaatacatatgctctctcactatgttctcaaacggcaaaactcattatatatacataatacatatatctataaacaggaagcgtgaaaagaaatattcccaagtaccaaaaaatggtcaagctttttagaaatacaaaagataaacagttaaacaatggagaaaacgttgctttataatattctcccagcttcacttcaaatctatactccttcagcttaatcttctaaccccaaaattattattttttttagcttaagagcacaaaaagagaaaacgttgagaacccacttacacgttagtacatttatgaagatatgtagctccacaatggcaggaaaaataaaccacctttgaatgagctatgaaacactctaaagctgtgagcttaaagaaagctttgtcttcaaattttgaacttcagggaagccactgagaacgaatgaaacagtagtttgagggagaaagaatgaaggatataattcaaaaatctgggaaacccaattcgaaagatctcgaatataaacgacccaccaaagagaaaatggggaaaaaatgaggaattttaaattttaaataaataacaattaggaaatataaaataataattgcagtttattattatagaataatggagcaaagagaaaagaaaatatttaatgaaaaaatattatatatatatatatatatatttgaagaaacaagacccagattaagtacctttgactggattgtagagacaagagaagagaacatacaagcaataaatttataatttcaaagcactaataataaatgaatagagaaaatgggttgaaagaggcttgatatttaagatagctgagcatatatttatgaaaaaagtttacacaatacaataagtctgcacatatctctgtagaatgtcagtttgggccttttttttttttacagataatattaagttataataataaaccaaatgaatgtactatataacagataatatagtattggcatgcgttttctatttcttgtttttcactttaccttacttatttgtttgaatacaactatattctaaaaatccaaactcattaaaggtggagcatgtgattgtggactcgaagttgtcaaattcaagattgacacttgaaaaaaaatatatagaaactttttcagctttttcttataaggctccaagcactaacttgtttcgtcattgagttttcctttttccttgtttcgttggtgtttggattttgaaattgttcccgcccatgactatagtcccaatggattttaaatattatatcatattatataagtaggtagtacattttgatcaaaatgcatcaaataaacattatattaactaagtagagcttaatgtggagaggagcataaatttgaactttttggcatatttacctttgtgtgtgtgtgtgggaagggtgtaagtagctgtgttgtctggttgtggagagtgtgagtgggtgtggggtctgtggtttgctctcagcttttcatatttcaacgctgttagttggcgtttcagcatagtgaaggaatcttagtactagaaggtgagagaaaaaatggacggttgagataccatcatcaccctctttcatatatcttaattttacattattatatctctggaagaaattgattgttttttaaaaaatgaagtaagaaagcgcgagacaaatttatacgctattaacaatatttgagtcataaatatatttttaattgattaatttgtgacataaatatttaagtttaattttttattacaaataaatatttaagtttatttaactatattaagttgtatttttagaattgtgtaactatctaattgttgaatgttaagtaaattgctacctttaattggtccaagtcatgaatttttatttttttaaaaaaaataatttaaatatatcaataataaaatgatacgtggataatgacttgatatttaacggtcacgtacttgcagaattctaaaaatataacttaattattattaccgccaaaaattaaacttatatatttatttaaaactcgagttaaacataaatatttatgctgtaaattactctttttaatttcatacacttatatgccaaatattttttttagacgaattaaatatggaaagttacattttacctattttcgttaacacaattttgttaaatataatagagattgatattcatctcgcgtgttactctattattagtccatgtgatattatttttacacattattactttatttataaataaaaaagtaattataaataataataaaaacataattataataaataaataatagtaaattgcgggaaaatccctcaatactttcacctcgctagcaattaactccctaaacttaaattttgtcggaaaaactcccaaaacccttgttctgttagtgttatccgtattttccaactagagacacgtggcatgattagaaaagaagatttgtcaacctcccggatcagcagagttaactaccaaatttcctcgcggaggtatctcggtaatctaagaggagccttatggatattcgatggggagagtcatccccagctcaagcagcgtctttgggacacagaagaaccatattcgtccccaactcaaggaagtcttagaacacggctcaagtaaatgacttttgggtgaagatttctacggactagtcgtggattgtaatcgctatctcaacgtgaatggccacgtcaactccatatggaaatcgacctacagacggttacacatttttttgacacaggatcagatctt

SEQ ID NO: 299552 - DNA, 2370 bp, Cannabis indica
cagcaaattccatctaaagagagttgagagagcgaggaagcccgaactccaataccgaagctatcgcagggattgaagctcaaagatcaatggctggaggtacatcgatcctttcattgcatatattattgatatgattaaagtttattttccgcatttcatatcattgtatatgctatattacatacactatatatatagtctaacagcttatacctatgctagttatatataattataagctttactcagtggtgggggagtagtcttggtagttcagagatggtaaaaaaatacctacctttagaaccaaatatgactgttcctatcatataatataaagttgaactcttgctccatcctgcatcataacaaattactatcacaataaatttacattattaagtcacaactagcagaatgttacactaaaatctagcagaaccaataacaaaatgacaaaatttcatttgagataattcattgctttctattttctgtcaacatacatatacatcatacaatttaaatcaatgataattgaatacaaaatattttagaagataaaatttagctaaaaataattcaaaaagtagtgtaccaacctgttttaattatttgacacagtagtaatggttgaatttccaaataaaattttgatagtttacacaatagaaacatcatcaataatataaaactccaaaaaaggaatcaccagaaagataaatcaataccttaataatttagccatgcgtatttatgcaaatctacaccaacaattattagagcctacaacacaaatacataaatggtttactttataaagtatgccaataaaaatcaattaaataaagcctactttcatattgctagctacttgaatgaaaaaaacatataacatagttgtcgtgtcttaatatcaagtggtaaacttaagaattctgcttcaagaaccaatttaattgtttgtccaccttgtaatctctctttctagaaacttatcaacttttaatattatcctttcttaacaagatgtagatattttgaccataatttccaagtacaaggaatccaggagcaataacttgaaataaataaataaacattaagttacagaattagtctaatcaaattaaacagcaaattacttgttagcttgagcattctgtactaacttaaaagaaacactataatcaggttatactgatggtcagaaacacaaccatactataagagggattaccaaagatgaccatgataagctataaattaaacaatcatctaaagtaaagtaacatgaaataataaagttaaggacactaattgataatgtaaacatgccaaaaaaattcttttattaatggaaaagtacatacatttatacacccactaagaaccctatagaaagcaacttttcttctcaaacaagtgcaatcatgggtattaaaactagctgcccaaaaatgcagaataatataatgtatcaaaaattatcaaaccatgttgagaaatattgtaacaactaagagatgtgtttgtgtataaatttatattaataagagtaatgattaactaaaagtaaatacacaatatcatagtgtgtgtacatagatattgttactcaattaataatattatacaaccttatagagcatacctgacaaatggtttctgcaataacaaattcattcacactgtactttaaatgggcccttaagaaatcctgtatgagaaagaaaccaattcttaacaccatacctaaccaaataaggaacgacaccacaataaggagaatttctgaacaagctagatccataaacattatacctcattaaaattaatagaatatggatgtcgcctataaaccaaaatgtatatacacatttcaggatgcagagactgaaatatcccactagtttaatagagatacatatatacttatttggggaaataacgccagcaataaaaaatcaaagcatctcaccacttcggaatcttcatttattcattcttttttacttgaaaccaaatctaaaacagatctgcaaaagcaaaaaatattaaaaaacatatatataattatttttcttcttcttcttcttgaagtcaaagttgaacaggtctataaagaaagaaaataactcgtaaatgtaaaaccttggtcatttgttgaatacattccatcctcggcaaagcataagactgaaactcatttcgtcggagccattccctcatcaaattgctcacctgccaacgtagaagctcatcgcctatcgacgatacacatattgacagaatagaatgttagacttttatttgtgcttacattaaattttatttgttttattaaaacttgggttgattggatag

SEQ ID NO: 299553 - DNA, 3273 bp, Cannabis indica
atgacataatcatgcatttctgaattccgtaaataacagtactaaattatttaaatagctataaataatttcataattaaacataaacagctgctaatttctaaattaactaagcgggctttacatagaaggctcgtcctcgatttcaataaccttctctttttctttgtgtgaatcccttactggagaagaatttttagtcacaatagctttgtccttcttcgtagacttctttggaagggcagaaaaagcggcatgaatggcttgcacgacctttagattaggaggttggtcagtcctggttggaggtttctttctcttggaacaggaagccatggaagcaagaaaactaatcttacctgtgaaataaaagaacaagtggttagtacataagaaaaatatggaaagcaagacaagaaatcaagttaatgatgactatggcaccaaaaccaataaataatcaagctaatcaagacaaataatcaagcttcaatgcgacccaagtttcaactttggcttcatcactagaaccaactccattaacattttggtcaagagacatagatactctccttgaataatttgagtcaatacgaggaggaccatcgtcttcagacatcacttcaaacccgatgacagcaccacttagcccattttcttcatcttccaagggcattattcaagattatcagcaaagcgagcatcaacatacactcgctggcaagtcgctatcagccctacatgatgaaggttgtcatcagttaacaacatctttccatctctctcccataaatcaatgttagccaacgtggcacgagctctttgtttcatgtcaacccatagagcaagtcttttaaaggggccagccttttggaatgtgacatatcttgaaggaataatgtgagtttatagagactatagttgatcataatgatgttgttaatgtacacactaaactgatagatatggtagacgccattttctttatggatggcacttcttttcaaatcacatagaaaattgatctcatgaggagttgaataggctagttctgcatatgataaatgatgaaaaaagttgactgaatttggtaactgtttggattcatttgataaggacataccccgaagtaattagcgatcgacacaaactacgggtgtagaggcaagaatgcacctacgttcatgtgaaatctcaaccaagcactacaatagggatttcgagaaccactaggacacctgatcctggattttttgacaacagtgtcagataaattatactcatctcaaactattaaacccatattttaccaaaatatgtagcaagcgtacggggatccacgtggcagaggggggccattcatggagagatcaacattctttgtagaattactctacacccagactccctgagtaaaggtgcatttgggagtaggtctccaatatcaagataaatgatcaagcaaatatttagccatttgggaggtgctatgctcctggattataggtcctccgagactccatcatttgcctaatacaaattccaaagcagatcattatacatgactgttgcagcacataattaacatcattacgcaaccaaactattttgatgactcattcacctaggaaagaaaatatgcactgccacatcagtcgcacatggaacaaatcttctctcacaaaactcctaccacgaaggctaagtagcacctagagacttaagggagatgtaccttttttcctcccttaacccttctttttcctataaatacctggaactgtaatgagaaaaggaaatttttggactcacacacaaaagtgagctctcatactgtaacttgaatattctctaatcaagagaacattccaaccataaataaaaatgactcgtagactacagttccttaatactagaaccaagtaaaaatcctttctctaattttctcaatcatctttactaatacttattatgtggttgtcaaaaatctcggtcaatattttggtgctttcattgagtgttgtaaaaaaaaaagcaaacaaacaaacttgcatctgaatggcggcaacaagaaacagtcagcgacctccaatatctcttgatgatccaatacacctagaagagggggtagcctcctaagtagatggtgaagggggtgatactaatgatcctgaatattcataagaaggagaaacctatgaagaaggtgaagaagacaagtatgtagaactcgtgtcacttagaaaataggctacacaacaagatgccaagttggcaaagcaaaaagaaatgaaaaggagaatgcaagaggcattagctgtcatgcagcaagctttggcttgggcaaacctccatgttgatccaacctctctcccaccaacacttggtgaaaatggaaaagaccccttgcaacactaagaaaatcatagacggacagaaaaaatgcacaatcccatccgatatcctttcgaagatcctccattcacgaaaggcaaccctaccacaatacctagggtgagcagaactcagtaggactcttgtaaggtccattctgatctcccacaagggaaaaatctacaaggggatgtgtttcctcatagtaaacataaaccccaagagagtaaggggtgtcaaagtgtgtttgtacattagggacaaaaaggaaggggaaggcaaagcaagcgagacccgctagtggatttaagagaaatgattaaagaaaaacaaggggaacttagggaacacattaactcttgaaaagttactcaggtagtgccaaagaaattttaaatgaaggcatcttggcataaatggtcatcctcaggaaagacataactaaagtgtcccaaagacaaaaaggagacaattctgagtgtgattgtgagaatagggagtcatgcactagaaacttcctagaggcgaagctccccaaaaacttcaaaatgttagagatgactcagtacacagaggacacggatcctagtgaccatttctcaagattcaatagagtaatgacagtgctgagagtgagcaatgatgcaaagtgcatgtgcttcccattaaccttgagaggatttgtagaagaatggtttaaaaagttagagctaggttctgtgagttactggaacaaactacaagctaacttctggaggcagtttgtagctgctaaaaagataaacctcaaagtcaatgccttgacaaataccacaactacctacagaaaccttgtactaataaaccttttcctttgtcctttatgggatcagaagttct

SEQ ID NO: 299554 - DNA, 5685 bp, Cannabis indica
gtgttggaatgtcattccaatagaatgacctttctaccatttttggtggaatgataattcccaatttgaaatagaatgaaagaccattccaatgcatgatgaagtaaaaattttaattaatttttttatcaatttttttttatgcattttaaattttatttccattccattgctattctcattctcattcctatgttttcattcctcccatccaaacgccaccttaataaattctaaagaggaattgaactggagaacatggggttaataataatttgggaatccctaataattgaatacggagaggtgtaaccatggaaactctagctagactatgagctaccatattaactagtcgtttaacaaaacggaacgagacatttctcaaatcattaagtaaacacttaaaaccacggctaaaaatactaaacaaagaaatcatttccacgtgactatattttgcttgtaccaccgtaagacaatctatttaaaaaaaaaaaaaaacttagttgtcagtttttgtttttgagccaactcaaggcttctctcatgctcattgctttggcaagatcaggttcaaaattctcatgataaactttagtgaaaccctcaagtaacagccccttatcatcacgggcgacaatccccactcccgaccaagacccatcttcgaacaaagctgcatctacattaatcttaacactgtttacaagtggacaagtccattgctcagctccatcactcacctgaagtccaagccacgatgtctctatttgagatttttgagcatttctgcaccggtcaagataatttttagcaacagcaacaatatccaaatcacaaaccttttattcttccaaacgacctcattttttgcattccaaatagcccaacaaagagtagctattaatcctcttcggtcagcctccaactaatcaaacaaaccaacaaaccagctcaagaaattgtctccatgtaactggtgtgtacctatgccaactctgtcccaataatgatgcaccgcgttacaggtgaccaaacaatggaagatggactcctccttcaaattacacatcagacgtgtggcacttacaacaactcttttagttaataattgacacatagtaggaaggaaatcagtacctgtgcgccaaatcatgttcttgaccttcggaggaaccttcaatgcccaaagatgcttccaaaactttgtagtagacacttcgttaaccaacctattatcttgttgaagtaacatgtaagcacttttgactgtataaagccagaaaatcaccatatgccaaatgagttgattcacttcctgagacatgtaatgaaactttagtaattaaattcttaattgatgctattgttaaatggttgtcttgctcttagggatggtaattatacccgcagggcaggtactcaaatggggttggggcgggggtaggcaactacaaaaaaaaaaaaaaaaaaaacgctaccttagtgacaatttttgttatacctatatttcgagcaataataagaagttgacacgtgtatcagagctggaatatgaactaactcaaatcacgcattattaaatgcacttaaaagacttgtctcaagaaatacagttaatagaaatattcaaactcaccaccatatagacaatagcgagacgtgagtaataactacagactattgagaccggcgagatagacaagtccatctcgagataaataaaacacacaatcaaactatttgaaacaagtaaataatgagtttgcagctcattgatccacatactcgtgagtatatatttgcagctctttgatccacatactcgtgagtatgttcaaggaataaaaataactttaacattcactcccctcgctcttaacgtgttaaagtaaccacctcactaatacctctttcaacagttaaagaaggctagaagatgcatcataacttagcacttaatatttttctttggagatacttaagaaagatatcactcaaatggcgagaataattgagcacagtcagtataatcgtctatagataaagacaaagagtggttagacggttatttattattatcccatgtgcacaaagatgaaacgtgaagaatatccacgtttcatgagcagttacaaatgatcaaatcccaagagaataactgtcactctatgcatctagaaatagggacagaacccaggaacaaaggacgaccgatcttgaagaaaaaaaaatagatatattgctattattcatccctgaaatcagtaccattgtattatgtattcaaaaatataaacccataataagatagactcgtggactatgaagatttaacttcaaaattacgtaaaaactttcttgttatttattaattttgtagtgtatttattacaaaaaaagttaaaatatttagttaacgaaaaatttgcgttaatacttttagtcacaacatacattttgtgactaaatgtgacttttagtcacaataaaaagttacttatgattaaagcatagtagatacaagttgtcactaatttagttttagtcataacaagtattgtgactaaaaatatatttatttgcaacaaattatatttttgtgactaatacatttaatcacaaaccttttagtcacaacataggaatatgatttataattagtcacaattttttcattttttgtcacaagttttgttgtgactaaaagtaagatttttcatagtgggtatgggtttaaatgttcatacctgagttgggatcggggcgggcggggattagatacctgacccgatgtgatatatgtatatctttaagtttcaaaatcataactactataattaaaataacttcatgttaaggccttttattgactacattaacaagacatttcattttcataaaaatgtctacggttatgcatattaataatcatgcttaactgctttaaaaaaataatacttaaccacttattttcgattatcaattctgtatttactaactacatttactatacacactattctatttacgtttgttgttttaatgaatttatatgatggttttttttaattctctttgagaaataattttttttttcaaaaatatatatgtaatgggtacccaatgggaattcttcctccgccgggtaatttttgtcccattcccgctttaatttaaacacgtattggggcgagaatagggtgaatttaggaagtcggtatgggggtgggggagcaatccccgcccctgccacgctccgtttacatccctacttgctctattgtaaaaaggtcatgttgttctaagattagtggtgatttttttagtggagctgcctcttttgtggaagttgtttgttagtttgttttcaataaatttacttaaataataatataaatatagggaggaatttagtctcgcctcgagattcttattctgaaacaatatacaaatattactaatgtgatattatttctaaatttcttaaacaattcaagaataaggtggctcattagttggctcgctcttcatgttctagtcatgatcatcttatcaatggaggtatttttcctattgagttgaatttcattttattagtagaagtttaatgaatacgatatgaatctgtataagaaaaatagtatttttttgatggcaggtagagaagtgctcatcaaggtaattgtcgatccaatctattcctatctttactgtgaatctctttaaaatattcaagcattttgtgaagaatattcatagaatgtgtgctcagttctagtggggtggtaacgatgtgaagatgaagatgcattggtgcacatgggaaaaatatgatggcacaagaatggtggtggtatgggttttaaaaacttatatttctttaattaagctttgttggctaaacaagcttggaggcttttaactccttggttgttatggtgttgaaaggtttgtatcgtaaaaacaaatcttttggatctatttcttcttcaaaaaaaaggctcttatctttggagtaacattctttggggaaaataactctttaatttgggagctttgtggagggtgggcaatggtagtcaaattctcatttttaaagatgcttagatccctattggggtgtgggcccagattctatctcctagtgttcttggagaaaatagtttggtgactctccttcagtcttctaacggctgttaaaataatgtggctttggtttgtgactccttttctccaaatgaagttgtagctattctttctatgccttggcctttacatctaacgcgtgataagatgatttgaggtcatgaggattcaggtttatacagtgtgaaaagtggttactggtttacgcttcataaggtgggtcttgatagatcttcttcttctatttattatttgggttagtggaagaaactttgggagctcaatatttctcctaaggttaagtcttttgcttggcagatttcttctaattggattcccactaagaaaaatctcattagtcatggtctcttgaatgatggtgtgttcccagtttgtgatgaacaattagagactatacaccatgctttatggagttgttcttctcttgctcagtgtcgtaagctttgtgattttcaactgggtgatccgcttgcgtcctatacatttttttttttggtttatagcttagctttgtgttatagtttcagatggaatggaaaggatctttacctaaatgttgtctgttaaccattacatctttattgactttcttcccaagcatcacattgaattaatttcggttatcttatggagagtgtggtttcaaagaaataaataggttcataataataaattcatccctcttgacctggtgataatatgggcttatgattgcttggctgtctatcaaaagaaagtcgtcgttatttttggtggagaggagttgattgctgctgttcagcgtccctctttgtcgacgcgactggagagggttatccattggagtcctcctccttttggcttcgtaaaagccaactttggtgatgctttggacttggctaatgggtgttgtgggttgggcatgattgtaagaaatgatcacggagaggtgttggtttcagcatattcgttcttggatggagatttcttacctaaaatcattgaaactttgcctcttagaaatgtaggtgctcaatgttgtttatttaagtttaataatgttatttttgaatctgattatcttaatttggtgtctaaatttaataataatttgttgttggagtcttctttaggacttgttttggacgattttagtttgtcttttaataattttagtgtagcgagtctagtgcattgtcttggaactcgtaatatgacaactcatacattggctaagtgtactttattagctactgttagccagatttagtagtctcactatcctttttgtattcattctcttgtattgcatgaagcaaataatgaatgaatacaatttttttgtgtcctccttccattcttagaggtcttccctttaatggttggaagggaacgtttcaaaaaaaaaaaaaaattaaagagaaagattagatctaggataataagtggacactactcaaatatattatacagtaaaacttttatccaagaatacatttagaatcaatcaaattatattctaattgagaggtt

SEQ ID NO: 299555 - DNA, 915 bp, Cannabis indica
tattgtaactataacgaataacgttgtgaaaaaaaaatatttcgacatgtgatttcgaacatgaaagttactaaaatattataataagagattgtaattaacattcctttatcatttaaattgaaattcatgacatataattagtaatattatttataagtttggaaacaaaatttccatgtactgtagccataaaataatatacaagtacatatataaaactgtaccaaaaaacatactactaatacaagtacatatatgatatatgaaactgttatatccacaataaaaaaaaaacattgttttgaccaaaaaattatttatcattcataaaaaaatcagtcattttcttaatcttctctctgcctctttaacccccacagacctccctctacttttataccagtagtagttcctctacttatataactcttttactcaagtgttaacttaacataacaagatcttactttatcatatgtctattatttcttataaggtgtctttacatacattgacaagtgtcatttattttatcttaagtatctataatctatatctctcctgatgtgcaacttcttttaactaaattatttaagtctttagtcttatatatattctccttcttagatataagtaattcattttggttgtatcttctatcttggatgtaagtcatccattttagatgtatcatctattttagatttaagtagtccatcttgtttatgtttatatcattctatctcagatatgtcatcccatataaagtatgtcacatccactgtctgaatgagatatgagtcattccaactaggggtgagcaacggtcgatttagtcggttttttacacacaaaaaatctaaaatttagttttcggtttttatggttctaatccaaaaaccgaccgaccat

SEQ ID NO: 299556 - DNA, 3487 bp, Cannabis indica
atttgtactattttagaaaatacagggtccattttgtcatttaacaaaacacagggttcaattagtaacttttacaaaacacagattccaaaatggtatttacccttctttttatagaattgtaaaacaatggacaactcataaattaatgtttatgtttaaaaccccataaaaaatattaactatggcttaaattgactaattaaacaagagatggttttaacaactgtcaaagccaagaatttttatataaattagtggtacttacatgcatatagtaaaaaattaataataaataaataaaattgtatgcataaaaaacaaagaccaatccattagtagagaagaagaagaataatccaaaaaacttttcatctcattatatagatgaatcaaacaaataaacatgaccccatttgattttttttttaatttataattaaaaaaaacatataaactataacacttatttttacaaaaaataaaacccaaaaaaaacaccccaaaactgcatcatctctctctctttcttatctcagctctaattaaacaacaataccaatacaaaaacacataaataaataataattaaaatataataaagaaaggggtgttgtggtggtggtgttggatctagatcttcttcttaagcttcaattcttttctttctataaacaaaaacatgttacaatcccaaaacatatcactttgttcttttctctcttctctcaaaaaaaaatgcctaacattctaagctatctcaatttcttaattcccttttctcttcttcttggttttgtttactccattgatgaacaaggccaagctcttctcacatggaaaaacaccttatcaaacacttcatcatattccctactaagctcatggaattcactagactcaacaccatgtaaaaattggtttggtgtccaatgcaattccaatggttatgtcattgagattagcttaaaatcattagatttgcaaggttcatcattgccttcaaattttcaatctctcaaattcttgaaaacacttgatttttcttcttctaatctcagtgggaatatcccaaaagagtttagtgattacactgagctcacttttcttgatatttcagagaactttctctatggtgagattccttttgagctatgtaaacttgtaaagttgcaaactttatatctcaatacaaactttcttgaaggtgaaattccttcttgtattggtaatctctcaaagcttgtgtctttaacactctatgataataaattgagtggtgagattcctaaaagtattggtttacttacaaagcttgaagttttcagaggtggtggtaacaagaatctcaaaggtgaacttccatgggagattggtaactgcatcaacttggttatgttaggtttagcagagacaagcatttcagggaatttaccatcttcaattggaaagcttcaaagggttcaaaccatagctctttacacttctcttctttcaggtcaaatcccagatgagattggtaattgcagtgagttgcaaaatctttacttgtaccaaaactcaatctcaggtcaaatcccaaaaggaattggtcaactcaaaaagcttgaaagtcttcttctttggcaaaacaacttggtgggctcaatcccaattgagttgggtgattgtaaagagcttaaagttatggacttttcagaaaatctcctcattggttcaataccaatatcttttggtaagctttcaaatcttgaagagcttcaattgagtgttaacaagttatctggtgctttacctaatgaaataacaaattgtacttctttgactcatcttgaagttgacaacaatgaaatctcaggtgaaatcccttcacttattggaaacttaaagagtttgactttattctttgcttggcaaaataagcttagtggtaatataccaaagagtctagctaattgtgtggagcttcaagcacttgatttatcatacaacaacttatttggttcaataccaaaagagttgtttggattgaaaaatctcactaaattgcttctactttccaatgacttatctggtttaatcccaactgaaataggtaattgtactaacctatacagattgagattaaaccagaatagaattggtggtactattccaactgagattggaaatttgaaaagcttaaactttattgatttgagtcaaaaccatttagttggtgaaatcccattatcaatatcaaattgtcaaagccttgagtttcttgatcttcattcaaatggtttaaaaggttcatttttcccaactactttacctaactcacttcagttaattgatatctcagataacagactcagtggtcaactaactcatctaagtgagttgaccgagttgacaaaactcaatctttgtaataaccaactttctggtcaaatcccatctgagattttttactgtaaaaagcttcaaatgcttgacctttccatcaatggcttctccggcgagataccaactcaacttggcttaatcccatcactcgaaatctcactaaatttaagctcaaatcaactcactggaaaaatcccacctcagttttcaaaccttgtcaagctaggaatcctcgacttatctcataacaaactttccggcgacttaaacccattaacaaatctccaaaacctcgtaactctcaacatctcattcaaccaattctcaggccaattacccaacaccccatttttcaaaaaccttcctttagccgatttagcctcaaacaaaggtctctacttcgccggaaccgttctaaccccttccgacgccgtcgccggaaaatctccatcaaaaacggtaatgaagctttcaatgtcaattctgatcagcgccagcgtagtactaatcctactagcaatctacgtcttaatccgtacaagaatcgccaacagagctctaaacgaagaagacggaagttgggacatgactctgtatcaaaaactcgatttttcaatcgacgacattgtacggaatctgacgtcatcaaacgtcataggcacaggaagctcaggtgtcgtttacagagtgattattccaagtgggcaaaccttagctgtgaaaaagatgtggtctttggatgaatcgggtgcttttgggtctgaaatccgtacacttggttcgattcgacataagaatataataaggttgttgggtttcggttgtaataggaatttgaagcttttgttttatgattatcttcctaatgggagtttgagttcaatgcttcatggaggtaataataaaggtggttttgattgggaagggagatacgatgtcgttttgggtgttggtcatgctcttgcttatttacatcatgattgtgttccttcaattatgcatggtgatgttaaggctatgaatgttttgttgggtccttgtaatgagccttttcttgctgattttggtttggctcgagttgttgttgatgatcatcatg

SEQ ID NO: 299557 - DNA, 1617 bp, Cannabis indica
ttttttgaggaaattggaatatttaattaataggtgtataatgatggtattttcaaaggaaagagtatgagggttagtaacccactacttaatcatattgcttagagttgcatgatttgtacataattccttgtcagatgagaaatgatgttgtatccaattctaggagccttatgaatattatatatcattgaaagtaaaatctctgagtgggatgtcaaataaagatgattatttagtggcatgaagtcatgaaagcctgtcctataaatttatatatataactctttaagctttgacttctcataaaacttcatcagtccgtgtaatatattataacaaacacacacatatatataattagaaagtgttatttgtaattgaattcgatgttgtatatatatcatactttttcaactaaaaaattgttctaagtggcctgcatttggactaaattaaatgtcaactaagtctaagaaaaacaagagttgcaggcatgaactcatgagccttgacattattaattaattacatatatataataatgtgcaaagttcatgtacaaacattcatgtttatataaatttattatatatattatattataaggcactaatggagtcaaaacacaagtacatgaaattggtactcgtacgcaaacaaacaagaataaaaaatgaaatcccaaacttcttcgacatttatatataaataagaaaataaagttaggatatcaactcaggtataaaaaaattatctgtccaaattaattaaacaaggtatgatgaccttaaatatgtgatttggaattgttatatattagcataaaaattagagtaaaaatctccaaagaaatcaacccatttatgttttgaaaattgacatttgaaaaagaaatctccgatcgatcttgaacttttttctcataataataataatagtcacaaaagttaattagataagctaagtaattagtggtttagcggtgtgccaccttggctacatgtaagtaaagaaaaaggtatctcaattaccaattgaattattattatgagtcctaagctttgcatttcttgtgatgcaaactttgggatattattgtggattgggttcttttgggatttttcattagtccccacaatcacaatttttgaacccttaaatatatattatgggtaaataaaaaaacaccctacttgcggcatgtgaggtgcatgatgaagaggtgtgaacattaactgagaaacaaaatgattaactcttttgtggggtcagaactgatagagaatccgacataataatctttgcttttttttactaccaagtgagaatatatatgaatttagtcatcataccctcccaaaaatgttgcataaaatctagtactttcagaacagaaacaaattaagctcactaaaagagagtttggttcttctctctctcactattccacaactcaaatcatttcccaggactgcttcttcgcttgttgactccgcaactaaggatttagtgttgaagtaaaaaaggaccagaagaaaaagctagctactcatttatggtaaactcattgaccccacaattatattgggtgacaaatttttatatatatatata

SEQ ID NO: 299558 - DNA, 2461 bp, Cannabis indica
caattaccttaacgctggaagcaagtttatgtgatacttccatactatcaaacattaactatctttactcgctaccataaagtttgaccttttaaaaaaaagtcatactaaattaggcttggtaatggtgaattggtgattgtagcttttttatttgtatttttggcaatggtgaaggtagattttgaatgataaggtagctttattttttcttataaactagtttattaaaatcgtttattatcttttttattattatattgggtataactatacatcataaatttacttttctatctctttttctttatttgttattttttaaaaaaaacaaaaaagttcattcaatagttaaaaaaaatactacagcctatttaggcaacactcaaaaagtcttataaatctcacaaaataaataacttcaattatggcaaattatgccaaaaatactggtaatacaaatcagctcagaatacgagaacacccacataagaataactaaacggatataataatcaaacttcacatagaaataaattcattaattgagctcgagagttataagacaaaagataattaagtaaacaagtaattaaaatcaccataatggaaggtgggctcgggtgagaagattaatgtgctaaaggatcatggtcgctttagactttagagtcccttggtttacaagagaggcttatgttgtcaatcttataaaaccaagtgaactagcttggaacatggaattaataaatgacatgtttaatgggtgtgctagccgactcatttttagtctttccctcaatatgtcatctcccatggacaagttattttggactaaagaagtgtctagtgtgtatttggtaaaattggactacaatctcattcaagaattgaatggtaattggagtgtagaaagttcatcttatttctggaagaagttcaggcagctaaaagtccctccaaaaataaaatatttggtttggcgggcttattcaggcactcttcccccacgatggtgcagctgtgaactaagcatgtggatgttaatcttgtttgtcgtacatgccaaattgaggctgaatcaattcaccattgtcttgtttttgaacagctgctcaagtggttaggaatcgtgtaggaataggtatggggagatggaaaatactgagtttttctgttggtttgaagcttgcttcatgcgtctggcagcaggagaaaaaatgtttgttggctgctaaaaatgaaaaagtttggaaccaaaagtgtgtaagtcctttgaaaatagcttcctctgctattagctatcttgaataatggaatcaagctcaaatatttagtttggaaatgtcattttctagtttgactgagtttgatggcgcagagctttggaccgttccaccaccgaatagtatcaatattaatatagatggtgctatttttgaggaggttaatggatttggttttggccttgttgctcgaggcgagaacggtttgttcattgaaggacgggctggtttttttggggggacagtcgcggttgaagttgtagaagatgtgagcattcgggaagctctcagctggattaaacaaagttcatggcagcaagtttaccttatgtctgactgtcttgtagcggtgcaagctttgaggagttcattttttatgatttcattaattggtgatatcattaaagattgtaaaccttttctaatagatttaccttttgtgaaagtttattttgtaaaatgatctgcgaatgtagttgttaatagtttcactagggcttctcattcttatcctgatcgtagttttggtatgaggaatgtcccaactaacttttatcagttttggtaacaaaatttgatggttaataaagctttaattttccattcaaaaaaattaccataatggatctaacaacatggaagaatctttgaaaatatgagcatataaaacgatcatgataaaagataaagcctaaaatgtttaaaaggcagtgtgataatcaccattattcaatacaccatcacaaaggcaaaaacatataggtaaaaacactaaacaaagagagccatagacaaaagtatacaatacccgcaaatgtgaagatgaacttgcattgcaattgtcgggcttgagctctaaccttacaccaagtcccaacccatcctcgttagccctatcatgagacaaatcttaaacctgtcacacaaccacaatattgttgggttttgtgccctaaataaaacccatttcaaaccagatttactaattaatataagatcagaaatcacttttatgttgcatggttcacatgatttatttcatgattatgtttaatgtataaattctattaagtctagaacatatatataaatatgtatatatttgttcatgattatagtgtcgtcagcacagtgaaatataatcatgattatatgttcaaaagtttaattcccat

SEQ ID NO: 299559 - DNA, 1711 bp, Cannabis indica
aacaaatatatattatatataaaaggatataaaaaaatgggcctttttaattttggggccttgtgcaatggcccaagctgctcaatgcttgggccagccctggtgccaccctgtttagctaactggttgcgagcgacgactgggtgcaatggtgcacaatagtgcaccgaaacaccccatttaatcccaaaacccaaatttcatctcaaaaaatttccaaacttaatttattatgtaatttttaaccaaatcatcttccaatatttttaaccataaaattaacataacaaaaatattttacaaaaaaaaaagacataataaaaatattttatcaaagaaacatgtataaagattacaaaaaaaaaaatcatattgcatacaactaacatgaaaaccatccaaattacaaataaacatataattttgttttaacatgttaatccacgagaaataaatattatcaatgctctgaggccaattgttaaaaaacatatctacagaatcttattatttttcatataaattattatttaacataaataataattttctataacatgctttttaaaatcatgaaattgatactatgtttgaatatacttacaacataatttttttcattccattcagtattctaacccttggatggtaccaaagtattatcaagtactaaattcatttcttcaataacttgaatttgtaactaatttcatcacaatctttcacagtgaccaaggtatcaaatagaatagtgtgggttattcttcaatgccttatttaaaaaataatagaagaagaataaagttatagtggcggctaggaagagcaaaggagagaactttgtcttttctgataagaaactcagacttaaaagcttagcttaaaattctctcttcctcctttttcttaagtaggcaaaccattaagtattagggtaaagctttattttccaccatttaattaactaaaataaaaaggaattttaacttaagcaccaagtaatcttggttgggttttgaatttcgctcttcaatttctttaagcccaatgaacctaaatttactttacctttttaattttactataattaattaaatctcttatatttaaatacttgttttattctaataattataaataattatttttaataaacataagtaaatatttttattaatttgataataaaatgtcataattaataaaatgcctttttatttttcttctcttctttgttttcaccaaacatagtaaaaccatttaaaattgaataagtcaatattgtgaattctaattgattaaataaattaattattgagaattactatttgatattttccccgtatactgacgggactatgggcccatgaaattagtaggggtgtgcaaaaagtcatccaatccaattacaactgaccgatctaatcccaatcaatccaatagaatcagatatctaatcataattggattggatcagatgtaaattttgaaagtctaatcagattggatcggttgctgaatgggacattcgatctaatggacagcaaaactgaaccgattcaattatcatccaatagtaatctaaatatatttatatatttataaaatacatttataattttatatatttaatatattttatttaaaaaatacattaattgatttatatatatttaacacatgagattaaaaaaaaatcttaaatctaaaa

SEQ ID NO: 299560 - DNA, 4551 bp, Cannabis indica
ttttgaggtcaaacaacattcaatctgcacaagtgcagattttagatttttcaatccaatccaatccgcacttgcgcggattaaattggatatcgtgcggattgaattggatccgatactttgtgaacacccctactaatttctactttaattaatgggctgagttattccgattttgggccttattgtgctttaccttattaagtaaaatcaatggaccgaaacattttgggcacaatagtatgttttgtggtggttctcgatcttggatagagcgatttgctagcttaatatatgtataacataattaacatatgtataaatttctaaggtttaattttaaacagattttgttttaggggtgataagattgagatgtatgcagtgtctagcattatgtggacacaaattaattagctgtcctgtattgaaagggtccattaatattctataattttcactattaattattttcttcaaacaatatgttcttcaacaataattgatatattttcataaaattaaaaaccctgcttaataatgtccatataaatggagaggaataataataatgtataatagatgattatatatacgttaattatatatgtatatatagatatatattcttccaaattagtttgcaccacagacaagtttccacatatacagtgaccctatacataaatataccttgggtgattgagatatatagtcaatttgtcgggtgtcttttacagttaatgaatttgctgcaaaatggtcccacgtatatacaaggagatagaataattcaatttatgctaatcatttggaaaaaagaccttgtgtgtgacccatatataagcttagaatattttgtactgtggaataaatgcttcgtatctttgacacttatggattgagaatcttactcaagttaatacagtacagtagtcgatcaaatttgattgaaaaagtttgatggaatgtgtatatattgctacccacttataccacaatatatatatgagaaaagaaaggagacatataattgaattatttgatatagcttcctataaaaaaaggaatatagcttaaataaaataaataaataaaactctgcatggattttagctttctttagctgatctcatgacatacatatatgttagtgtatatatatatatgtagactatatatatatatatatatttatagataccacatgcaggatgtatacacaattaattgctttcttattgtgtctgcttatgagcttttcaagtttctcaaaatcacatgaaacaaaacctattctcatgtgaccaaataaaaaaaagtataatggtcaaaagaaaaatattgaaattgtggtcatgtacatattaaaagagaaacgaactgtatagaattggggccatatataaatttctcagaaaataacagagatatactaacaacgctaacaagaattagcttatataaacaactaacggaatggttgagagacaaccactaacaaactagtcaatacatgacaaagagaccgtgactaactcactataaccaatattaactaactctaacagtccctcaaagtacgtgtggtttgaaaataatacttaggtgggtttggttgaaggtaatagaatgtaaaaagaaatattttttattctattttattgtaattgattgcattataaagtaataaaatgttatttcaaccatagattgaggaaaagggagcatgtggggtcatttaccctctcaactttttataatgtatattttggatataatttttttgtgtaatttatattttaacaccagaaaaataatttttttatctatgcttttacatagttttgtatttattgtcataaaatttatattatttttatttttattgcacctatttttgtttgtatccctatcaaatttatatttttgtttttattttcacatattttttcttttttatttccatgaaatttgtattttcttcaatagaaattttattttttttattattacaaaaaaaaaaaaaaattacctacgaaaagattgaagtggctctaccattgattccaatggaatgactttttcattattttaatggaatgattattctattttgaattatggaagtaataaccattccaatgcgagatgagaaaattttttataatttttttaataattatttttatgcatttaaaatttgatacattcttattcccattctcattctcacttttattctcatatttcaattctttccaactaaacactaccttaatttatttctaaggctaagaaattggattatagtaagacaatcagctagttgacttctagcaagtacatgtggcatttgtatctgtttgtgaagtatcttatcccaaagaaagtatagatatttcaataagctttgtactagcatgtagaacaatgaattcaagttgtcacaacatatggaaggaaacacaatggattgaaaacatagttcttgtagtagagattgaatccatactatgtcaaaaaccacatctacaagacttctaaattctacctctcagttgaacgggaggatggttctttggttcttggatttttaggctatgacattacaccaagaaagatatagaagctagtagttacctcttattatttggatttggtacacaggttgcatcatagtaggctttaattttgaaattatatactctcttaatcaagtgcaaattgtagtctagagttccaggtaggtacttgaatattctcttgaatgttacccagtgagattgtaaggggttgtgtatgaattgacacactttattaacactaaatgtgatgtcaagtcgagtgattgttgcatattgcagtgcacctacaacgccgaccttgagatttggtgagccttaagaaataagaaattattataaaagaaagtttggtatatgaaaacaactagaaaatgtgtacttttcaaagaaaattaattattttaaagcctttaggtttggtgggccctaggcacaagcttagcccaccttagcccaaggtgacctatcacctacaatggaccagtataggaatacatcctctattggattaatttcatagttggaaagtcttagacaattattcattagactactttgagttgtagcgccttagatttgatcttacatagatatttttattgggacaataaaatgagatacgggatgttaaacacttgtataaataattcaatatactacaaaaaaaaatatatcttttagctataatatttttgtgatgaccgcatgcagggccggccttgaaatgtagtgggctatagggtaaaaataattttttgggcccttatttagaaaaaatggtatttttaaaaattagcaaaaaaattgtgtaattttaaaagggcaaaattttttttttgggcccctggactaggtgggccctaggcacaggcctagcccgcctatgcccagggccggccctgaccgcatggttagattatggattagtaaatgcaattagcattaattttttattaagcctggttattaatattatgggacccattttcaaaaaatggacattagagctgtaatttcttaattctaaaaattttattaaactctatgtgtattatctataacatatagaaaatttacaatttttatgattttttactcggtgacgatagaatatgcgacggatatagtcaatttagtcatatgggttagcttagaacctttttatgtagtaggattaaggtgttggactattttatccctaagccatttaataatttcagctttaaatcaagggtaaaatttggaatttattattttgaggataggtggcttatcccttttagtggcagcaggccattattttaattagtagactaagttaagttagtttgatttatctaagttaaataaaaaaacaaagacaaaaagacaaaaaactaaatccacttcttgccttttctctctctttcttcggctcaaccaaaccagtggaaaaatctagccttctttcatcaattcagaggttgtttagcaatattcgagtagtgtaatccaaagagaagaatcctagaacttgctcctttaagctttgataatttgttttagtttttgagcatgcaagtgatgtatgtgttgctgttcgagttagggtttaggttgttgtattttctgcagtttagtagggtttttctaagcttgtttgaagtggtaaaattttcatattgagtttattgttggttttgttgcttgggaatggcttataatgatgtgtataggtgttctggagcttagtgtggagtttatgattattttgagtcgaattggaaactctttgtgtttttgcagtgaaaaacggtaggtcgttcctacaaaaacggtctacagtttttactagcacagacctagaaaaatggcttgccgattctatagaaacagcctaccgtttttcaggcagtttccccatttagctgattttctcgtgtttcctcgatatttaaggttttgccatgctatttatcgatag

SEQ ID NO: 299561 - DNA, 2313 bp, Cannabis indica
ctctctctctctctctcctaaacttcatcgccatagctatccgaagagatcagcatgcgagcttgaatgtccagagaaaggtaagtgtactattacaaatctcttaatcaataatattacacctctttattcttataatacattaattatgtatgtattaataattacttttttccataaatatgtatgatatttttgtctgtatttattaatcatatagtcgtcatcaatattatggatcatttaatgatgtagttgttgtgttttattataaactagggagagatttgatgaaataggaaagaagataaagagagaatattcagcatcatcatcatcatcaacatcaacagatgcagggggaggccataatcatcatcatcaacaacaacagcaacaaatgggaagaagacacatgttgggtcctccaggaaccctaaacaccattactccatgcgccgcctgtaagctcttgagacgaagatgtgcccaagagtgtcctttctctccttacttctctccccatgaaccccacaagtttgcttccgtccacaaagtctttggagccagcaacgtctcaaagatgcttatggtacgtacgtaatatttataaatcaatattaatttaaactaattaaccaagttatcagtttatgttataattaataattaaatatcaaatgatttctatatataggaggtgccggagaatcaaagagcagatgcagcaaatagccttgtttatgaagctaacgtgagactaagagatccggtatacggatgcatgggtgcaatttcggctttgcaacaacaagttcaatctttacaagctgaacttaatgcggtcagggctgagatacttagaaacaaatatagagatcatcaacctaataataataataacaatcataataataataataataatataactcctaattctactacttcttcttcttctcttcatcatcatcttcaacaacatcttgctttgctatcttcttcttcttctaataataattctcatggggcggctgtttcggttgctgctctaccgccggtgggagccataccacaaccaccaccacaacaaccgcctccactgtctcaaatatccacagtacaatctcttcctattgctactactactacttcctcctcctcttctatgtacacgcaaattactacggctgatcaggattataacactatttcaagtgaaaatgttcccttttttggttaattaattattattcacgatatatacctatttatttatttatatatatccccccattttctatattaattatattatgaataaccactgaaataaaaacaaggaacatataattcggtcggattcattgggcttaattatatgtatatattcagtccacatgcattgtgtacatatatatataatatttgttggttaatatatgtctattaactaatccttaaatttttttttctggcttacgagaggtccagtactctttgccgatgtctacttgataacatattgttatttattgtacaatatgaatgatttcttaaaaaataccatattcttagttcattttccattaattcagatgtaatacatacacggtagtttaagcattaaagcatgaagagtgcaacacaagcgtattttcacgtggtatactgatcatataatatatattaaacacttaatatatatatacataaattgcataatttcaggtttttttttttcttttttggggttgtagtttagctctgattttgtgagtggtggtgttgtatcgtttgatgactcttatggcttattttgttattgtttttttatgcttgttttttatattctttatttttttttgtgttgttttagtttgttttagtagtgttttcttatgttttttttataggattgggaatccaagtacacccgatcgaaatactaccattccagagtttttttatgcttgttttatgttctttatttttttttttttgtgttgttttagtagtgttttattatgtttttttataggattaaaaattcaagtacacccgatcggaatactaccattccagagttataaactctaattactctgttattgaatatattaaaaaatttcttactgaaacctaattaaatatgttttcaaaaactgtattggagattatttttgattgcgtagtagctgtaaactttcttcagtgtttccttgtctttgtatgtctgaccttttcaacttctggttgttgtttatctgttattagcttcgagttgttgatgtcgatttctggatctacttt

SEQ ID NO: 299562 - DNA, 2051 bp, Cannabis indica
tgatagaaatcctatcaaatggtatcagagcatgtcgattctttggggcaaggtgtgatggaaagtcggttggagtgtcaacaagctcataaccaattgaaactactgaaatcaactcttgaggctgcgattggtcccatcgtgaaacggatggactacattatcaatcaaatacagatatccagagagacatgaaacaccaatgacaccccaatggcgaccgaggtcgaaccgctggtgtctgcacaaagttgtttgaagatgctgcttccacaattaacaccggcagtgaacaccatcgaggaggacgaacaacgtgatgaatccgataagggtgaagcaacggcggtttcaaatctgagaagcgcccagcaaacgcttctagctaaacaccacaagatggctcttcgagagacgccgtcgaagtcgaaccgcagctcaccggagctaaaggagatgataggcgctcaactagaggatactacacatcggtatattctttgtcctacccgatttatgttggtcggaggttcttagttggatgggtcagacacgatatcgcttaacggtggaggagcagcgtggtcgactgtcgacgtcaagctcatgggagttgtgctgccgaccggtgccggagaggttaaagaaaccaccaaatctgtatgattgcgattttggtcgcaatagggaggtcctggtctctattgaaggatttcagctcaatactttccttaactggttagggccatcccaagttttaggcccaatggccaatttaggtcacagattgcaaaagaggtggaatccagataaggtttccacaatttcttcttcttcttctaatcgcacgaagcttcttctggggctgagacttgtcgattgtgattcacaaccaccagtgactgagcaaagtgtggggatcgctgtgagggtggaggaaggggcgcgtacttggccggaattaattgacgaagagttggggaagccattttctcgctggatttttgacaaagggaaactaatcactttcaaagaagaacatggttgtttatactaaggatggcttgcatggctccttgacaatgagggaaatatcaccaggagcgaaattgagaagtatgaattgatactgccaggtgctcttcctacactgatggggatttatggcaaatattactggtttgcccacaagaattatcctgtagaacaagccataattgcatatatacatagtaattttgtagttctcaattagagggtcatcaagactgctgaatattattttcaggaatgggataagcttaacttggcttatgaagattttattaaaaagggcagggagacatttcctattgcagtaaacttctgcaacaaaacaacagaaggtttagttcgtttagtgagggagcaaagtggagttcagcttgatgtattctatttggaaggaagccactacaacccacttactccaacaagcacgatcttcaacattcaggggcatgataagaaattgttgtgcaaattgcatttactagactggttctttgatagggttcgataggataattggtttgggaacacgagatcgagcaggtggaggcgagttgctaaaacttggcgttttttctcacaatgtcaacaatacgcattgctggcttggtatgtgacagaggacgagcaaggttggcagttgaagcttcatgttcttcaccttgaggacaaggtgaatttcgggtggtcagtattgttaggccttagggtattaaataataagggtatatgggtcattgtaatgggagtatggagatggtattaataggagagtaatagaagggttttgggggaatgattttagttaagtgagcttttagctcttgggagagagctgggtctctcgaatacctagcaaccttgttcttttatcttctaatatcaatatatcatctctattatctctattttgcaactgtttgtaccgaaatggtaggaaattcctatcaatagcgtatagggttcctgtgtttaatgactgttacatgtttaatttatca

SEQ ID NO: 299563 - DNA, 4920 bp, Cannabis indica
aaagcagccagagtgacatactcgtgataagagccatcattctgtggtgaggacccaatggaggctgaagcggggacgttacattactagccctattgagccagccatgaagtacacacatggtcaactgaactatcttattcaacaaaacatccacatgcaaaattatatggcacagaggagaatttttaatgaagggcaagttcaacagctaaattcttcgatcactcagatgaatatcaggatttaggaccctaattatttaacaaatccacctcgattttacccttatgaccaaccatcactaccaaaccccttctgatgggggttgcagataagtccctctttctttattttgcatgacacattggggataatatgcactttatttttggagcatgggacttataaatttttgctattttttttttctgtttttgcttaatgttatgtttaattttttagttaagtttaaagtgtttagagtattaataattgagtcgatgataactgattaattgaattaccaatgttatttgtagaatggattgagatgtaaacattgtaattaatttgtaaactttttagattaatttagttgctatttgaaattgtgtatcgatgtaaatgatcaatatttggagaatatcatttgtattctagtttagtccgtggaatgtttgcttggatggaataaaacttgcatgatttatttttttgagaaaaaatcctggatgcatattacttggaacatgattaaggtaattttattagaccgattgagccttttgagcctacccttgtgttgtatccttagtttacttgaactcgagccttagcctgttataaaattttaactactttttaagtcgatgttattcccattcactacatgtattctcaatgaacctatgccataagtgtactgataagtttaggggagtggattgttatggagaaattatgtgaaaagtgggagattgagaaaaagttatttaatgtgaaagtgtttctaacatcactgaaaaaaagatactttctcgctaagaaaaagaagttcaattaatgaagaaaaaattagtgttgttggattcaaaaattaaactgtctcaattgttaaaagaatttttcttgagtaaatgtggagaattgggaaattatatgggttcttaattggtttatgatgtgcttatggtataattaaggtgaaatgacttttcatctaccttttacctaagccgtgatattacaacctaaaaagaccttttaattctaagtgagggttgtcgacattagtggagagagataggtcatgcaagcatattaaacattggattgtggaaaattggtgagatgtataatatttgtaatgcttttgaaatattgatgttaaatttgcagttatacattgtatttcaaaagaagtatccatgttaattgttagacttttttaattaaaaatctggtttaacctattgattgaagtttcataagtggcggcggtagtttgattatttggaggcttagttatcttatagtttgttagtttatttttttgtttgtctttagttttagttttactcaaggacgagtaaggaattagttcgggagaatttgttaggctatttttagcctaagtttcaggttgatatttagaattatttttagtattattaatgcttttaggacagaattatgcatgtaatctatattttccaggctctcgtgatttttacaagtcaagtgcatcaatatttgaaaaagaatcgaggcaggacaaatgaggattaaatacatattttttatgtaatcttgccgcgacaattatgacttatggctgcagcaagatcactatagaatgggggttttcaaattttgttagtgaccgcagcaaggaagaataaggtcgtagccaggcgatctcgccacgacaaccacgacttatggtcgcggcgagatggtgggtagagacatctaattttaactttgtgaagtcgccaaggcgaggacattcttggccactgcaccacattcagatttaccttctgcagctcaatgtcaaaaactgatttcacttttgagtcaacaatgaaccaaagatgctcctaacacttctttagctcaacaagtggccactaatttctttggtaaccatgtttctcgccataaatattagattaaagacactggtgctaccgatcacgtttgttgtgatatgacatgtttttcttcttttacacataccattaatgataaacttgttaacttacctaatggcacacttgttcccattgtcaacataggcactgttcatctttctaatgccataatgttgactaatgttctctttgttgtgatatcacgtttgatgtgatataacatgtttttcttcatttactcataccattagggataaacatgttaatttacctaacgacacacttgttcccattgtcaacataggcactattcatctttctaatgccataattttgattaatgttctctttgttctacaatttcagttctacttttttaagtgtatttatgcaaaattcttcttattccatgatcttcactcatgataaatgtttcttacaggaaccccgtcaaattttgaagactgggattactaaaagacatgggaatttctattatcttcagcaaatgtctactttttttaacacaacttcttgtaataatcttgagcaaaaattatgttatgatactattatttttttataatattcaatgtaaaaatcaccaatggcattctcgccttggccatccttcattgactgttacaaataaagtcaataaattgtttgacattcccattgattcgcatcattcatttcattgtcctacttatcatcttgcaaaataaaagaaactttcctttgtttctaataataattttgcccccaacttatttgatttaattcacattgatatatggtgttcattccatgtaactagtattatcttaactatagataaatcacaatttacttggatatatttacttgctgccgaatctgatgctatctcaatcataattttttttactttaattcatacataatatcacactactatcaagtctgtatgtacagataatgccaaaaaactcaatttaactgccttttttgctagtaaaggagtcattcagtataattcttgtgttgataaacctaagcagaactttgtagttgaaagaaagtatcagcataaattaaacattgctagggtactcacatttgagtctcatactccccttgcatattggagcttcattgttaaggctgctgtttatctacttaataaagcttcatctattcttcttaatgataaaacttcatttgagcttcttaataataaatcaccaacttatgcacacttgagacattggctgccttgcctatgctttcacattagatagaaataggcacaagttctctctaagatcaaaagcatatgtttttttaggttatcctgaaaaatatgaaagcttattgtcttcttaatttacaaagtaactagatttctacttcaatagattttatttttcatgaagacatttatccatttcataattgccttgctaattatcttgttgataaattttatcatacaactattattcctactaatattgtagatcctagttcacaacctgatgatattatatcagaacaatagaatacaaaaacatggcgactttcgaaacctccttcctatttataaaattatcaatgtgatcttactgaagtttcatcttctactacttatcctatttcaatatttttatcttataataagttttctccatcatttaaagcagccattattattgctaacacaattgaagaacctacttcatatacccaagcatgtagaattccaatatggaataatgttatgaatcgtgaaataaaggtatcagaagataataatacttggattatcatctcactgccttctaagcaacacacaattggttgtaaatgggtcaatcgaatcaaatataaagtcaatgaagaagtagaaaggttaaaagcttgtttagtggccaaaggctatacccaacaagaaggtatagactatttcgacacttatgctcgagtagctaagttcaatactttaaaacttctatttgcacttattgctataaataattggagcttacatcaattagatgtaaataatgtcttttttacatggagatttaaatgaggatatttacatgaaactacctcaaggatatagtactcctaagggtaaactccctcccaatctggtatgcaaattacaaaatagtttatatggtttgaaacaaagcctcacgacagtagtatgcaaaattaagcaccactctcctttacaaaagatttgcacaatctccttctcgaccattctctctttatcaaacataatttcaatgtgtttttagttattttgatttatgttgatgatataatccttgtttctaacaatgataatgctcttgctgatttcaaatctcagttaaatactgaatttaaattaaaaaatcttagtcccttgagatttttttgtggtcttcaaataggcaggtccaacaaaggtatctccgtgtctcaaagacccttcactttaaaacttcttcaagaatctagatacctcagttcaagagttactccttccccattggaacctaatgtcaaactcaacaatgatgttggtcaatctttctcaaatcctactccatatagaagtatcattggaaaaattttatatctcaccattactagacctaacatctattttgtagttaacatattaagtcaatttgtttaaacaccaagacaacctcatttagatgcagcccatagagttcttcaatgtaacaccctactagcataggcgtattacgtgatt

SEQ ID NO: 299564 - DNA, 1399 bp, Cannabis indica
aaaaaagaaaaaggaaaaaaaatcataaaagtaaaagaatagatacttcgttttattaagtctcaatttgcgcttacatatcacgaaagttaaattcctctccaaactaaataaaaggagacaaaatatatgtatgtaaaaaagaatatgaatcaatatacaatatatattcatgtaattatagaatttaaaccaaaactcagtgtattaagtatgtgattgccagagccagtgctaaaagaacataagcaattccttgatcaatagcttgccctgaattaaccaataaaaaaatttagcatattcatgtttgatcagattagccaaaatcaatttcagaaatatgcacacacatatatatatatatatatgcatataaatattattaaagaagaagaaactaggaactaaccatcgctggatggaccctctgctgagggggaaggagctgttgtgctctgcccataactcagcttcatcagaaccaacaaaaataacccaataattggaagagcaaatgatttcgccgaagtcattgctgaattaaataagatacttccggattaaaggaaagaatagaggtgggtatgattgaaaaaggagaggaacccaaaaatctagagctgaaaactggagagagatgaataattagaatggtgaatttggaagtagtcttctgtatttatatgggggacagtgggacgagaattttcccggaaagtgaagacgcgagaaaatgaaagagaaagtgagagagagagagagagagagagtgggttctaaggtaagaaagatacgcgtggttgacacgatgatttattaggcttgtttatttgactggcttggcggcttactgacccagaattggacacgagagtgggagaaagtagttatttgggtttggaggtactattataacaaaatttgctaaatcccacataaatggcacaaactcaaccaaacctgtttcaaatcttttctttattacgtttgaaattttataattatggttcaaattgagccgtaatatagtaagttttcaaatgaataagaagatcgcgtatcgaatttcgacttgtattttatgtattgtaattgtaaaagcctttttaatgtttttgttgactaatcaaaaagtccaaggacttgactatatacaatataacactccaaatttcacgcaacacgcaatagtgtgatgatgagattatcaattatgtacatatataataaattaattcaaattatgcacttgaattgaattgaaaataatagcacactctagttaagataaatttacttcactttataggttggttggaaattataagatttcatcttaaaactaattttttttttttttttttaattgaagcgtttatatattacaatcatgttt

SEQ ID NO: 299565 - DNA, 4213 bp, Cannabis indica
ttaatgcccatctagctacacttcgtgacttggtgccttctaatgaaaaggtaagctaatctcaacatacttgtttttagtaaatatatgagttactggattaattgatatataattgtgtttcaatctaaaatttatcaaggcacgttgtctacctcaaatggtttttgtttttaaacttcatatggttttacattaacttctttctgagaaaaattcatggtcaatatatcgtggctttcacaaaaaatagaaatctattggtaccttctgtagatataataagcataaattgtatttttacttcttttttttcccatttcaagtctttagaaataacatgagttagcctttgtaagttgtagcaagtgtatcacacttgtggggtcatagattaaagtataattttgtcctctaaattgctgtgttatgataaaaaaaatagtttagttctaattaattagtactgattacagacgaccgataaggatttctaacatctctgaattttgatgaaggttacatattcccttagatagttagatattatagcctgcgtatagctctgaataattttgaaattgttaatgtaaataggctctcacaatttttaatattgtaattggtttggcttgaaaagtgatttagatgcacacttgaaaaaaattgagtaaaacctacattttgaaattatgttgtatggtcaactcagaatatagttacaaaaaaaaagtattgtaaagatagaagcagctaaaagtcaaccagaagatagtctgttttcatgctgtctcaaattttcaaaaattagattgcattttcgatcatatggagtactctcactggttcctagttttttttttctttttttttaaagtagtagagttttttgaaagagtactctcactggttccagttacaaataaagttaggtgtaaaagtcaggtgtttgtaataagtttcctaaaataaccaataagttatgaaattttgaatcatgcaaagtacatgtatgtttatcttttgagacattagtcaacttcacaaatatatttctcgtctcttcatccataattggatcaagtcaactcctaatatcggaagttacaaaagtcaactataaaatattagttttattgaggaaatttaaatttgtaaacaccaagatgtaactgactttgcaatctagacaccttttataggcctgttttagaaatattcaatatattttaaacaacattgagcaagctaggtgctattcgacctgctctttctaattcaaatttataaatatatgaaaatagtctgctaacaagtgcttttattaaattgaaaaaaaaaattgaactgttctatcctaatctcatcataattataatatatatatatatatataattatatatcaagggacggcggggtatgagatattaaatagatataattttgtcccctcaagctttcaaccttttggtaccatgtaccaatttagattattgtaaattgaatggttgggcacatagccacctgtggaagagactctacatcttgactagttacatatgtttatgtatatgtatatatataaaaaatatatggcttagttgcttggcggtgtacatgtcaagtgagtagtttgacatattatattattaatggggatgtaagcagaaacatacgtctgggagaagaataaccacttcattttttaatctcacaagctgaaatgatttattcttttattattaatgaggtggcgggtcactaaataagctgttccttttaagaaatcaagcggattagtttaatatattaacttatttatgtgggctgaaactaagtttttttttatagttggcctaattcggcttctttggctgtaaatgataacaaggtcaactattattatagccaatgataagatgtattgaatactaaatttattttgtgtgaacatactttgttatgttatacataattgttttttgtagaataattctaagcagaactctacacttgctatgttcaagctatgataaatatatgtcttgcaatacgtacttaacttagttgttatatattacagatggacaaagcaacattactagccgaagtcataaggcaagtgaaacaactgaagaaaaatgctgcagaagcaagcaaaggattgcttattcctgcagatgatgatgaagtccaagttcaacgatttgatgatgacaatggagcagggaatggaaatgtcttgttcaaagcttgcgtctgctgcagttatcgaccagagcttctctctgatttaaggcaagctcttaagggccttcccttgcaaatgatcaggacagaaatatcaacattgggagacaggctaaacatctcatttgttttcgcctgctctaaaggaaagagtaatgacgctgagacatgccgaactcttgcgagttctgtgcatgagactttgaactctgttctggataaggcttctgctttggctgagtactcgccaagaacaacgctcttatgcaaacgacgcaggatttcttacttagattcctcgagctcatccagctaaatcttactagtcacagaagtttatatagaaatccatgtatagatattatatatttttataactttgtaagctttattttaagaagcttttttcagtgtccaacgtttcagctctattttgtgtatttattttgttgagggaaaatacttttggtgttcttatagatgtatatttgtgttgctaaatcaataaattttcttcaagcctatgtcgagttgaatttaataacaacatgcagggatgagaagcaacatttcagttaatggatgtagaagcttaacagtggcagaaagaaacagaggaaagaagaggaagagaaagagagagcagagctttgaaaatattgccaaagaagcgtaaccaattaattagcttagagacctttatttatactaatttccaatacaagagccatatacaagttgcttaacggaaagctaatagaattatctaaactttaactatttgtttaactaactttaactaccaaaagactaggtaatcagaccaattagtttattggtttatatctcctgtcatatgaaatagcgaggtacctatttgatgtttgcacttgagatagttgaattcatctgtagctaaaggcttagttagtatatcaacaatttgatattaagagggtacataacgaattgaaagttattttgcaaggatttggtctcttccaaaatgatgatcaatctctatgtcttcaccctcggcatgaaacacaggatttgcagctaaagcagttacactttgtgttaacactaaaaagtagtcaataccagctcgctaaattggcaagataaataatgaatgtaagtacataatttagagggacacaaaatttataatagttcactccccataccacgatagtaatagagccatgtatacttcgagtttttatttctcacaagatggtattatagaaaaaggctaagtgtctaaactctggtttctagagagagaaactagagagagatgctctgaccttgtaggtagttttctaaatctgacaaatgaacaatgaactaagggagctctccttttatagatgaaagaagccatcgaaaataagagaaaaatacaagttggctattgttgatcgtagataatgatctaaggatgaaaattaatttttgaggttaatcgttaattttgggagcctgggtcgcgacggcggaatctgctctgggttaaacgaagcttatttctgtaagaattgtaaggcataacttgattgagcattgaaatatcttcgaaacacaagttgaatcgcgtcaatcaaatcaatattgagtaagttatggttattttactgaaggttgttcatgacccagcacccaggttgacatcccaacgcctacgtttacatatgatgtcaacttggacactgggtaagtgaaaaaatgtccaaaagatttattttatgatacctaagggatattttaacaccacttagtctattttcgtgttttggtgaaggtggtcaccaatattcggagatgttgctaaactgtagaattgtgatacacaattttttattgcaagcgtacaacattgttatagcaaagttttaatactaaaaagattgtcgaacccacacggattgatttttaaattttactaattattatac

SEQ ID NO: 299566 - DNA, 1570 bp, Cannabis indica
acacacattaaatttactctgttacttcagtaaccaaagtaaaacatccaaaaaaattaatcataaaattcaaacctcaattcgatataatggtatgaaaaacgaaagagtcagagagaaaacagcaataaaatgtaacgtacctggaagagagtggcgagagcaggagcagcagcacggcgaccagtggaacgagaagcctcaatggcgactcgggtgacgagagcttcaacgaaatgaccgggccagtcctcgttcgtgggctcacgccgctgtgacgaagagggtccttcatagcctctatcccttcgcctactcgaactaccaccacctgtgcttctactacttgcacccgcattaatcccattattattattgtttcctcctctgaacgacgaggataacgatgatgacgatgaagatgaagacatagttataacactgataataatatataacgggaaaattaagctggtgtgagaaaagagagatcagaccaagaagagaagagaagacccgggaaaatagaacagggacaagaaaaaagaaagttttggataaagacacaaaagtgagggacccaattttagtgtttttttggatttgattttgggtacatcaaatcaaattcttccttccttccttttcttttgtatatcttgcttttgtgttttgggtcacagttataacgttttttttttaaaaaaaaaattgactgaactctcaagtgttgtttgttagtttcttataactttctttctttaatgcatgtatatatatacaatgttactccaataccgcgtggcctgataaaggaaataataataataattaattaattaagatgttatgagtggagggtggtactattttgtgtaaatatttatatataatgtactaatttttttttttttatttgagatgagttttattcgggttatcgctcttgaacgttttcccgctctgcaaagacagccagtggtgttggatttatgttaagtgtgggttctgaaaaaacaccagaaacaaaaattcagttgttaattaacacgaacattctctatatcttatttcttacattttcatctacatgtatgtgtttttttttagtgtatatgttatattgattcctttttgccctcttgtagcttgcaaaaatatataagctacactatatagtggtgtagaatgtacattttgatcaatatataaataattaaatataatataaagcaaagaaaagctcgctatttatatgtttttaattaccagcagtttcgaatgcaaatggagcaaggagaagaggaaaagaaaagtcatagctgagaatacttttcaacgaataggtaagaagcctaacgccacatataaattttggtcactgtttgaattgttttttcctctgataacttctgttcataactcaaaagtcatagagttcagtgagttgttcaatctctatcactggtcagagacttagaagaacatgcttggtattgtttttggggtgtctataggaacgatgcttatttggtacttgtattttaaaatcatacatatttagtacttt

SEQ ID NO: 299567 - DNA, 3785 bp, Cannabis indica
gtagcgtgccttagcattagggcgttacaaccagcatcttgcctagccctaaaaagagaagataaatctttagcacaaagaataaaaagataaggagataaatgatccccttccctaaggcccctagaaggtttaagagaacctctgacaacaccattgatcaaaaaagaaagaatagtagtagaaatgcaattaataattaaattaacaaaattaataggaaaattaaaatgaaacataacactctccaaaaactgctaatcaactcgatcaaaagctttggccatatcaagtttgagagcagcccaaccatgcttactatttttcctagaattgatggcatggacaacttcttgaggaataagaatgttatcaaaaatgactctaccagacacaaaagcactttagaaaggggaaataattttatctaaaacaaccttcaaacgattagctaagacttttaaaatgactttataaaaggttgtacagagactaatgggtcgaaaatccttaagagtgtcagcatgctgtttctgaggtatgagagaaattagggtggtatttatggtagaaaaatcaacaccattattaagaaaattttaggacagcattagcaaatcaaacccaatagttaaccagttcttttggtaaaactatcaagacctggagccctatccccataaaggttaaatatggctttttgaacctctttaacagagaaatgttgatcaataaaagcaacctcagagtcctccaaagaggttcctaagcaatccaaaattaaattagcagccttagcatcacaaccatcacaatgaaacaaatcagagaaataagaaacaactaaatcacacatagcatcaaaattagtaataacattgccacaatcatcctaaaggtacttaatagtattagtctttttttttagatggaaactgatggaaaattttagtatttctgtcaccagctttaagccaatgaactcgagccctttgtctccaatagatctcttctttataaaggagagcatcaagttgagattggagatatttaatttgaaaattaatatccctaccacaagaaaaagagagccctgaagcctatcagtttccttatggagatcattaatttgagatttgaagagatgattagcagacttattaaaagatttaagagaagatatacaagagtcctgacagagaagaaacccattgaaggcacccctattaatattgtgatttatactatattcccaggagttcttaacagtaactttaaaaatcaaaattctcaagccagacattttcaaattgaaatcgttgattaataaagggaagacaactaggactattattacaaagaatgacctttagagctctatgatcagagccataaaatggtaagtggtgtcaaaccgcattaggaaagagattacaccaagaatcagaaccaatggcccaatcaatttgttcacaaattgaattattatgccaagtaaacttattccccacataaggaagaggaaagaggaaaaaattatccaaaaaagtagaaaaattatccatatccttattatcataataactactaccaattttatcttcatgaaaaagaaaactattaaagtttcccataacaagccagggaagattaggagctttgtaaaaagttttttcaagaagactccaagtaaaatgtctttgagaagaaataggggaaccatagaaaccagtaaaataaaatatttcattatcattaaaacatatattagagtctatatgattacagtaaaaatttaatatattagcaaaaatactagctttccataaaagtaaaagccccccaccaaaacgcttctgaggaacttcgaagccattatcaaaaccaagagcaacccgaactctatcaacagcacgcacaagcaaatgggtttccatcaaaaaagaaccacaggactatgatccataaccaaacgggagttttcggaatgcacgcgtactccccaaaccatgtgcattccaactcaaagcactcatttttctgggcaggtgtgttgtgatcaatagaatcaggggaaggatcatcctccctatcaccagcgcgagcacgtttaagcatagaccttaaagaaccaccaataacaactggttggggttagaaagaagggtgtttaatcccagaagcagacgccaaaaacttaacacggacagtagaattaggctggacaacaaagagagattagacctcatcgtaaaggtatctcctgtggaagaaaaactactactgcaagtaacagagagagcagtgtcaaaggagaaggccaccacagggcttctagcacgaccaacaaccaccaaagactcagtggaataagaagtgaaagcatttgaacgcatagaaagatcaagaccagatctgttgaaattagggaccatactatgggcatttaggttgagaggaatagggatcataacaatagaagtggaatgagaggaaataaactaagaagataaactagcacttgcatttattaaagaaggaaaatttatagtgttaccaagaaaattcctagaagaggggataagattgacaagtcctcatcaaccatagtaacagcaggggtgaggatattgaaatggcattgatttctctgatttcttctctttaaccctaagaaggatagtataatgtcagagaggagcagagagattctcatcacacttttgcaagtagatatgacagtatcttttagtatgatctaacttgccacagaagaaacagaaatcaggaagactttcatatttgaaatctaaccatttgacaaactctctttccatcctaatgaatcttatactcataccccttcggataggaaaattgacatctaaaaggatcctaattttcaaataagggccagtaccctccttgacagtatctttatcaacctcaataagatcccctacctcagtagctataaacctagcatgttcatagaatttgcacataaatggtgtgccataaacttgaagccaaaatagaacataatatagattatcaggggtaatgggaaaggaacttttacggacaacaaaaatagtaatactctgggcaaaatgttaggtttggccttctaagattctacccttatcaccctcacaacaaaaagtaaccaaaaaagaccattcgcatgctcaaaaactgacacagggaaccgacactgtgatgaccagatactagatagggttttcatgagagaagggtgattatagggtcagatagtatgaagcttgagaagaggactaatcgtagtaggagaagaaatagaggagctaatatcttagataaaaatagtactttcatcaggtggaaaaacaaaagtgtttgaaatattattaagaaaatcatccatattcagagaaaaggaatcactggaaacaacagaaattaaagcaagaagaaaagagaataggtgagggaaatgatacccaagcttcgctatatatataaaggtagaaccaaaacccacatagaatccttctcaaggaccccctattcacatccctaatctcggccataacagcaatgatgaaggagatctgaattgctttgggaacccaatcgtccaccccattttgcaatctccaagggtagaaagacatggtacgatttaatggcaagaagacaaaaaaggggtgatggaagaaatcaaaaatcaagggaaaatgacaaaatggaccctatattttttaaaatagtaaaaataggacactgagcttaattttcaa

SEQ ID NO: 299568 - DNA, 5048 bp, Cannabis indica
taattacatattaataaaaaatatacatatattttttaaaattatttacgtagaattaataattttattctaaattgtaatacatgtataaatattacatttactcaaaaataattctattattatatagtattataatgttattattattaaattaatatttattggtgttttaattttttttcctagtgtacctctatatagttataatctctcaattagaatataattttcttagtcccaagtgtattcttaaatagaggttctattgtatattgcatttcaataaatctctgtgattttaaaatatcacattttatgagaaagtgtaagatattctaacagtttaatatatattacaagaaacaaaatggtcaatcatcccaatcaacaagtcctatttaacctttaagaatacctgtaaaaattctaaactaacaaatttatgaacttgaagaagaaatttaaaaaacaatcaaaatttgattttattcaatattcatagaaattaaggcatttattccaaattggaacgggtaggtaattttaaaaacaataatgattttgatttttattcaatatttatagaactttaggtatttataccaaatcgaaaagctacatagtttcaaaaacaatcctattttaattttatagatttaaattgaaactttaatcaatagtagagaatataatgagcaaaaaaaattgcttctaatcaatgaggagactatgaaagagatggtagaaaatgaaaaagacacgatggaaaagagggtagaaagatcgcctaacgtcatttaatccaacccatgtgacattctaacccaactcacatattgatgtgacaattttaatttaattttatttttaaaaataaataatttaatttagaaatatgaatctagtggagagaagtaggcacaggtcagacaagataacatgacttgaaacccgcacgagagttagcaggtttgggtttgcctcaaatggattcgggtcgtatttggattgactcgtcttacccgtttaataaatggatcatcttcaagttgacacgactaacacaaaattgacccgttaatgacctatttaaagttattttaatactttaacatgtcataaataagttataaacgtgttgaacacttcataaacgtgttattgctttaacatgtttaaactaaatatgcttataaacgggttacacaggtcatgtcgtgccaactcatttataaacgggtcgtgttcgggttttattttctgatacgattattaaatggatcgtgttcgagtcgagtatatacctattatacataagtctcgacacgacacgaacacaacttgcgaacacgaatcgccacccctagttaaaagccccgtttatgttttctaaagatgcgtgcaatcattagttcgtagtgtgtcgaaccactgcaaagaaagagtgtaccgcgttgtagactctccttatataaatataaatatgtatatatatatttacattttataaaagctcattgtaattttatttatactaaaataaaagaactcaatttttttaaaataatgatgatcacttttcaaactactaggtgctggttcctgtgtaataatacccatttttttcatttcgaaaatggtcacaagggtatgggatcttggttcactttactcgaagagatagaaattatgaatacagtctcctctcgtggtcttagaaaagtctttttacgccgtaaaatcgatgtacagccctactttagtgctttaagcattactgaccagttattactaaaactcaggttagcctttctgccactagaaacccaaagtgagcaaagcagatttgatcagttgtatttacaataatattagtagagacctcaactttattgctcatagtaatcccatggacttatgaaatgtcagagctataagtgctagagtagatcctgctccgtctaaattaactccagataaattgaataatagcttcacagagtactctattcaatgtgatatatttcttattcaattacgtccaacgttctctgtcttactcttcaggagggaatgggttctaaagctcaaatttttatttttcattctgtttttattgttcagtttggaacaattcgatcttatacatatgtgaatatgcacgcatacataaatttacagagtacaaggagcaaacaaaaagccccattacctcatagcttggaggcacaagaagtaacttttctcaaggcagttgctgcctttgatccagacggatgtcccaagtgactcgaaatgaattccccagccatgatgagcttttcgagatccacgtgagtcttcactccaagtccattaagcatgtacacaacatcctcagttgcgacattgccagtagctcctttcgcatatggacagcccccaagaccggagatagaggaatccacggtggtgatccctatctgcgaataaaactaacaagatttaactaaaatcattgtgtccaactatttccaattgcagaccttatcaataagttcaacgcaaaatggccagaacaaatttttgctatcctcatattggtactaagtaaaccaaaatccataaggatgatgttatatatctacacacaccaactggtttatgtctcttaaacctaagtcatgaagtctgcaaacctggagggagaccagtgtatttgaaagagcctgtccatatgtatcatgaaaatggacagctagcatatcaatagggacgacgtcaataacagctttaagcattggaataacggtacctataaagaaatatacaggcaaaagttaaacatcagactgggagggttgataaaccacagctatacattggagaaattaaaataagtgatcaaccaattaaattagtaagggaatttaataacatttattattcatcgatctaaacaggtgaccctagacaagcctagccagggttttggaatgcttctttgtccttaaagctaaaacatgctgaggggacagacagcggacgagataaaataacatccactaaatgaggaattttacatatgaattttactggacatacaaaaaaaaaaagaaagaaagggacgtaaccctttaagattaccaggagtaccgacaccgatcgtatcaccaagagagatctccgagcaacccatatcatacagttctttggccacatatgctacttgtgatggagaaacctttccttccagtggacaccccacaacacatgaaatgtatctaacaagattaatgtatataggtaaagggatacacttctccttttcatctcataaaaagaatttagcatgtaaattttttagttgattaataaacagaaccaaaaggataaaccatgctccagttgattaataagaatagcatttttctaagatctttggttctaatcttctaccaaaaagaggtacaagaatactaggtgttcaaaaaactaagcaagtagagtatttttaaaaacaatatatagttcatctacatgtaagagcatggaccgttagagaccacatacccacgaacaggaattgaaagctttttagcagcaagggcaacatcgcgataccgaactaaactatcctcaatgctacagttgagatttttttttgaaaaggactcggaggccgcagaaaagatggctactgccttagcaccagcagcaacagctgcctcaaaaccctacagaaagaacaagagcatgtcagtaattctatgctgatatcagtcagttgcctatattttgcataaaaaatattactttaagattaggggttaacacagggaaactagctccttcaacatcttgaattgcttccattacatccttagcatctgatagctgatagataaacaagatagcagtaaaacataagtccatcaaactaaagatgacaaaggtttagagctccaactacaattagcaagaatcataaactaaagaatctatgaccagaaaaatgagaaggtaaaataaatctgagacaagaagattcccaacattcaatgagagtgaaagaaacttttgacaaaaaagaccacaacaagaaaaggaggaacaagtatagtaatatttttacagctctagcaagcaacgcagctacaagtgtacaaccaacaaaaagccaaaatgaaagtttgactaacatagtgaaattcatatttcaacataattacagaattttttacctgtggaacccattttggtgagacaaaacttgtagcttctacaacttgcaaccccgaagagactagcattttaatcaattcaacctttacagaggtagggacagttttcttctcattctgcaatccatctctcggtccaacttcaactacctttacagattctggaatatttctaagaacctgcagcatcaatagattaaaaagttgcaaaatccatgaactgtggagtgcaaaaacaaaaattgaaacttctatcaagagataactagtaagaacagaaagaggcaaagaaatgtacctaaacatattaatgagttagaacattgccattatatttttttttccatccctcctgcccaatattatatcattcaaagtgatttttccaatgaagtaaactggaccaacaagcaaagttaatacaaaatcaaaagcaccttatttgttaattcccttgcgcctttgttattgacgtgagagctataatgacgaacagagaaattttcagcatcatgcccataaccaacaatccatctataattccatccgtgatgtgccgattcaccatttttcgtgataccaaattgagacacatttctggactctctacaccacttgaacacatctcttgcataccctttactgaaaaaaaaaaatacaatgaagaagttgggagaaaaatggcatctgctaacattggaaatttcctaattttctcaaaattgacttttgattgctaaatcattttaagatatcttaaaactcctaactgagagaaaggtaaaaaattggttttcgaaaaacataccttaatagtttacg

SEQ ID NO: 299569 - DNA, 2001 bp, Cannabis indica
aaaaacttatttaaattttattcacaagccccttaaaatctagagatggttatgcatcaaattattaaaaaaaaataatactgattagctgatatatagggttaaacataattaattatgattaagagaaacaacaccagcaataataattaattaagttaatttcataatttgttgaagcattaattctcaatttctacatcatttctttttgtagatttagtatacataaagaaaatatgcattaatattatgtagggactggttctagatttgatgtaccttatatatatataggctctgtatatttatatattataatattttcgaattacaggagaaaataattcatagatcttatatattattctctcccattaatataaaaaaaatagctatttctaaatatatacacaaagttgaaaattattcaaagggaaaaacaatagtaaacataaataatgatgtgatgtccgagtgatcaattaattactttcaaattttttaaaaaataaattaaaaaatgtaaaaatgtacaaaatatccatccaactctagcaaaataaattaaccattttatcatgatcgagatcgagtttcccagccgagccgaataatttactgagccaagttcaagccatccccaaaaaaacagtatctaaaaagtaaccatctcaaagcaaagctatgaaacttggctaaacttcattgagccgatccagttcttaacatgatgagccatatttcaacaactctttttccaattttacccttcatttttttaagagctctgcttagaagtggtaaatcagccatatttactcactggtagccataattcaaaacttaagccgagccaaaaaatttcaaggagcagcaggagcaagactaagatgcaagtccaggcccaatgcatcatcaaaattgggcccaccatctcctttcgaaaacctactcaacgaaggcccatcaacccttaaattatgggcccgtgagtgttgttgttgttgttgaacctgagaacccatcgtcaatgtagaattatcccctacatcgctaccatacgataacccaactgaacccgcacctctcccaccgttcatcacaggaggaaacacacagccatgcgacacgtggaaaggaggagccgaacgcggaacataaacccacgaaggagaagccgccggtaccattacctgtccagctggcgaaagaagatgcggcggcggcgcaaaagccgagattatcgggtttctagcgtaagaaacggcggcgtttcggctcgcttgaagctgagctcgtttaagctgttgtctttcttttttatgagcgttttgatggccacctagggcttgggaattagcgaattctctacaacagtactgacactcgtatttccggtcaccggagttctgaaatccgttgccggattccggtgaaccagacggcgtcgtttttgctgagtcagctacggcttcttcgtagtcgtcttgtacgttgaagccgaataattttaagcgcgtggtggttggagttgggtttttggtaatttggtattctagctccgccattttagagagagaaagtgaagaaactaacaccgaaaaaaataggagagagagagagaaaattttgggttgtaataagggagttggttcatgagttaggggtatttatacacacatgtttaatttttatttattattaataatatttaaaaaagaaaagtaaaaagttttttttttttttaaaaaaaaaaaattaataaatagaaatagagagagatggttgcggacatcccaaggaggaaaaaaaagtgagtgttgtaaatatatgggaacacgacccgagagcactttgggtttgggggcccatgtaaaacccaactactatatatatatgttatatctatctttccaagtgtctaattctatgtaaagacaatcctaatttttagtaaattattattttataattaattagtaattttttataatattt

SEQ ID NO: 299570 - DNA, 2486 bp, Cannabis indica
aaaaaaaaaaaaacctaaacaataaaccataaaattttctaatttaccacacacccattataaaatttttctaataattaatattaatttttaaaatttctcggctcaaaacccaaccccagccgcgccaaccccaagcgaagccggatgatgcggctcaagcttcctattcttccaaaaacaagcctcctgagctaacttagccgccgcagtcgatctcatcggctcagatttgcagcgcgtgagcacaaacggctcgtacggcttagcagagccaactaacttctgttcaataacgttagccatagattgcggcgccgccgccgtaatcggaaacgacacagaagatctcggcggctgaataggcggcagaccacgattagggccgccgttaacaacaatactgggccgttttttgggctcttccacacctgggcctgggcccaaacccaaacccttcttcgaattgggccttcgatccggtatccaccggataaagtccgtactacagatccaagtctccttagacacttccatggataacttcggctcacacatcattaacagtaagcaatctggtaaacccgacccgcttttccgacctactttatcttcgctctcttcctgtttctcgggttcgggttcgggtttggatccaggtgagtcttcttcttcttcgtcttgtaccgttgactcttctttgactttttcttctactggttctgggtttgattcttcttcgacttctagggtttgctcttcttcgacttctagggtttgctcttcttctttctcaagtactgatttgactgcattgtcatcatcttcaacctctggaatttcagataaacagccataaaaatcagaactttctccacctaacttacctgtttcttcttcttcttcttcactatctttctctggtttttccactaaagcttcaaaattttcaactttctcttccatttcttcttcattttctttctccagttcttcttcttccattaaagcttcaattccagaacttaacccttctccattatctccattctcattcaacaacacctcaaagttctcaactttctcttccttttcttcttcttcatcatctccattaataacaacctcaacctcatcagattccacagctacttcttcaactgttgtaattacttcctcttcacatttcaattcttcctcactctcttcatcatcatcatcatcaacaacaacttcttcttcttcttcttgttctttcttaggaggagattcccaaaaccgattagacaaagcagccatttttacaggatcagatctacatctcataagcaacaaagcattcttaggtggaatacaaatactaaccctacccttctcctcctcctcctcatcaccatcaccatcaccattatcatcatcatcaccatcatcatcttcttcttctctaaactcaatcccttcaaaaacttgccttctttgactacttcctctaaccatctcaggcaaagccaatcttctctgttgttgttcttgttcttcatcatcatcatcatcatcaccaaccacaagctcaatctctctcctcctaccattttcaccatcttgaacagaaaccaaccacctagcaaaagcaccaccacaagaagaaccaccaccattctccgatctaactctcttctctttattaccatgttgtttattatgttcatcactgttattagtacaagaagatttacaaggtaagaaacagttcaaatcagcactaaaagctcttaaagcttcacaaatcgttaatggaagatgaacccatttctgatttcgatgattatgattaaccgaacaagatgaagaagatgatgataaagttgtctcatttaagcttttctcccctcttctaaagcttgcttctcctcctcccgtaccggtaccggcgccggactttcttttcgatctgtttcttagtttcttgctctgttttttggtcttcactctcacttgaccgatacaagtgactttaggagaagacggttctgggttttcgaaagcagccgagccacgtttcttcccgccggtgggaaacatcggcgaggcttgaccggctccggctgagctttttagacttccactggttctgagccggcgactgagtgaagaagaaagggagatttgagaggaagagtctctggcggctctgccgggactgagaatcgatttagatgagagtcgagaagtgaaacagatgaaaaagctcgcttgttccgccgccgccggtactggttgttgtgagatgggggtctctctctttgatcggactccattgatttagtgttttttttttctagtgagttttcttcgacatttttggatgaaatattgaaactttctttgaatctgaaatggggtttgttgagatttgtgagaaagattagatctttggggtgttttgttaggttttgtagagagtagagagtagagagagagagaga

SEQ ID NO: 299571 - DNA, 3196 bp, Cannabis indica
agtccaacatttttgaattcagagatagttcctttccacatcaacactaacttttcacggttaaaatcatctggaacaccttgttgcccacgagtttcagaataaggatctgcaccgtatgatacttcttcaattcgatttagttctttcatagctgtaatgttactaagacagttgggaattcggctagacatatcatttgaagacaagtctaagaattgaagatccactaagtgacatagttgtaagggtatacttccattgaagctattagaacgtgtactgagaataagaaggcctgttaggcttgttcctatccatgttggtatttctccagacaatttattccctccaacatcaaatataaccaactgagtacagttcttcaatgatgaaggcaattctgctattaaattgttgtttctcaagtgcaacacattgatggaaactaagaagccaatggaaattggaatttttccagataacttgttatttgccaaaacgagaattcgtagggagcgtgcttgtgaccaacaatcaggtatctcgccggacaactggttatatgagacgtcaagaaagatcaaaggaattaactctatggcctcacatatggaatttagctgtgaaaatctattgttgaaaagatttagtgaagcagtcacttggagtaaaaagcttggtactgagccttctaactgatttgaactcaaatctacatcagggtatcttcttctgtattcataggaaaaattgacactctgtttaatatcataaagtcttcctctaatttgattattagacagatccagaagacttaagtctgacctgaagttccataaccaatctggagtataatctgaaattccacaattggagatattaagttcataataattcttctgtgtctggagccattttggaaaatgaggacccaatttgcaagattcaagatgtatatactgcaactgaaagggtggaatccaatgaggatcaactctcaaaactatatccgagttacttgataaatccaaagtgtttaagttgaagagttttgaaaaatgagcttcggataagacaccttcgattttgttctcagaaaaatccataatctccaactttgataattggcctatactttgggatattccactgaacaggtttgaggaaagatgtaactcaactaaagagggatatagtgtgaaattaggcaatgatcccatgattctgttttgcttcaagtccaaatactccatggggaaattggcacatgagttgttggaagatgattctgagaaatggagctctcccccaaggctattgttgtatgcttcaaacctcactagttcacatatcttccaaatggattttggaatttcgccttcgagctcgttattgctaagattaacctgagcaagagactgcatatttccaaagttttctggtatggatccttttagatgattgctttcgagattaagatatttaatggcagtcatattctcaaaagattttggattgagaaaatttaattggttaccatgaagatcaagatatgtaagggcaatcatacttccaaaggactcaggaattgaaccttttagttgattgtagctaagatcaaggtatgcaatggcagttgtgttcttgaaagagtgtggattaaaaccctttaattgattttgtgcgagatcaagatatgtaagagaaaccatatccccaaaagattctggaatgattccttcgaagtcattcgagctgagatcaagataggtcaggccagccatatttttaaaaccacttggaatggaacctggtaatccgcaaccagagaggtcaagatgaacaaggctgctcttatagttgaacaaccattggaatatagactcagagagtgggtaatttctagaaagatcaaggactctaagagcttttgaagagttagcaaatgaaggtgaaacaatatcaggaagttcacaagaacttagtaccaaatttgttatgaaatgagaaagataatcaactacatgcacccaatcattaactaagctcatgtttgtgccactcaggtcaagtactcgtaaggaagaaagatgtaaaacccaattcaagtttttcgattctaaattattagtactaagatcaagaaactgcaagctagaaaggtttccaagctgaggaggaatatctccagttagtgcagtggaagagagattgaggtaccttaatctggtgagaccaccaatgaaagttgggaaatactcgcccgcaaattcgacattactcaagtccaaatgattcaggtactttaagtcaaacaatgaggagctgactttacctcttaaaacataatcatatgtttgaaaagacaaagttgaaggagaaaggtcaagtttgatgacatgaccggaattgttgctgcagccaactccaatccattcacagcattctcttttttcttcttcttctccccaagacgaaagtagatcaatgccaacttctgtgtcactctcagttctaaatgaataaacataaagctggtctttaatccttagcaacgcttgtctctcagcttcattgcaccttgtgtttggagatccaattccataattttgtctcaagaaaagcaaaagtacataaagcaggacaacacaagggactgaactgctcatggagtataatagagagttcaatgtttgatcagaagaatatagaaagatatgtgtttggtttttcataagagttcatctttgaataataaatacaaggcacttttacgtacctaccagtttgaattttgtgtattttttttctttgtgttcacactcgcatataatttctttccctatggtggccaatattcgtgacactattggtgcaatttgataatttaatataattgtataaaactcaataattcactagtttgaatttggatgatggtatattgtggattaacgtgactgtgtagtcaatggtggaagacttgaaagatctactttccttttattaagtttcttctgagtttcgttggaattggcggcctgcataaaggtcaatatttaaagtgatgactactcacctttttaatgatcttagagcatctccaagggtagcattctttgaagatgctctatatcttcacatcatctaaaatataatattttattttgtttttcttccatattatttttgg

SEQ ID NO: 299572 - DNA, 7008 bp, Cannabis indica
aatagatcagaggccaaatctgtcgaggaattatagcctactggaggcgtattccactgatgaaggcattcgtaacattctaggactcatgtggcaacaaatctccgtcttcggggaatttccatcctaaagtattgaaggcttcatagcatggagttgggcccacatctcattcaaagctcaccttccccttagaacatatttcactcaattttgtatcaaattcatgctcctttctagcgccttccagttgcatacaaatttctctatatgtagtttgtattttgtaggtcctggggtcaagctagcgtaacccctgaggagatattgtactttctacgagctgaagtcgcagcccatgcggatgcatccttcaaaaattggattttactatctctagaagtataagtgtacccaatgcccatcaagtgcttcttcccactgccgagaccatcgctagtattggttctttaagatcggcttttctatgacacgggttccaaccctttcttcagacttcaaaaatccaagtataaccctcgtccttcttcaattttgtttttgtagtttaaaaaaggtaatcccatttttaagtcggattttgacttgttcttcacagagtctgtccctagaattatgctatcggatgagttgaggcaatgaataaccttctatgaagaatttttagaggaggaattgaaagtgaatgacttggtaactactgagtgggtcgttagttaggcacccaaataactaggaatatgacatcttcattggctaagaagaagtaactttgcttggaagaggggaaacttataattacttgttccatggtggcaatcaaatgacatccatgttgttttaatttgtgtggtttaggttgctattacttgtctatttgactgatttgattattgtggtgttttgattttttccaaatacacttgcatccaggatgataagtgatttaatgagcaccatctagaaagtcaacactatggcagactgcaaaggaagaaaaagaagtgcagcgccaaaaaagtcagcaacactgtggaacctccagctacctaatttagaatcaaagaaagggctaagacccagatggatccttgtagcaaaagtagcagagcaactcaagcgctagctccattaattatgcgcttgaagaaagggaacccatgattcccttgaatgaagaagactctagggaagggttagtgttcccgaaggtggctgcagcgtcaaagttcacaaacactgatcctcatcccaaaaggaaagacaaaacagccagacacgtacctcctagagactttggatcctctagagcggaagacttttggatcaaaatcaacaaccacaatcatcaactcaaccaccaactgatagtgccattgaaaggcagctagtccttgtgaccaccaacactttaacaaaacttcatttgaaacaacaacacaatcaaccaaaaccaccaaattaaaacccaagcaaccaaacaatttaagcctcgacctcctcagccaaccctgccaagccagctcagggattccaaaccaatatgtcgagcattttgtcatttccatttgaatttcccatgaagcccactcatcttaaggatgaagttctaaaacatgtgtagaaagttgatgcttatataaaatttaggcttgtggaggaaagtaggtgttgtccagtttagcactgatcagttatctaaatttaagagggctaagatcatagagggtatccgcaactcggggtattctgcacccattacagatctctgacctatgggcgaatagctcatcccatgcctcgataagaagttggcacaattcagtgctaaagcaatcgaagacatcgtggtcaaccttactgagctaacaaccgaggcaacaagcggttggggtatctctcatttccacattagttttcctttttacttagtgcaaaacatcactcctttctttgactattttcttttgttctagatggtgttcttcatagagtaaacttggagttaggtgaacacaatggtggtccagctggacctttgcttattcgcttggaggaacctagagatcaaaatcgaggccatcaagaaggaagctaaatagtattgcactgaaggtgatgttatagccaacaaaaagcacttgtagaagtacaaccagtataaggaatctttcacggatcaaatgaggaaaaattcaaggctcaacatgaggagttggaggctaccaaatatgcacttactaaagagcttgagaaagctaagaaggccaagacagaccttgggaacaaggcatctgccaagagcctacagctcttaaaaaagatcttatcaaagggctagaggacaaggtcagcatggccgaggcattggaaaaaatcgttgaggattaggtcaccactttgaaagctagtgtgaaggggaaagataagcagatggagagataggtccaaaccataatggagttacaggaaaccaaatccatattccaataaggcaaactgattttctggaagaggtcacctccttaccaaatatctcaatagtgagagggaagagcaccaagaagagcaagaatccttccaacaagccctaacccgctccgagaacttctcaggttagcctgccttgaggaaagtattcccaacatctacagttatcttggtgcggatgctaagaacttttctaaaaggatcgagatttacaatagcagtgtcgatgagtatctggacactaatgatggggccatgggagaggttttgaaggacgttaaggctggaactaaggctcaggcttcttgctataatttagaagattatttttttcactgacaaaatttaatttccctagtccatggggcagtataatagctttaggcctttatattttattttttttcctttcttgagcttttattccgatgttttggcttgttagatcattttaagggttgtcatcttaggttgttttgaagtttttggttccaacgactaacactttgaaccctagattttactcaacttttaatcgctccactaattttggaagtatttgaaaatacttatgtcaattttcaggtaggattgtcattcttataacctgttttgttagctacaaacttcgattaattaaatatccttacaatgtaaatgggcttttaaactgttctcggaccatcaattggttgcggagtcttatctcctttctagtacattgaatatttaattactcattcaaaatgctactcgctgaatgttagtcagggatagttttttcgtagaatggcaggctttcgtgttccaagaattccatgaccactagtcttttgaaggttaggctccaagaaaaatggttgaaaatgttatagattttaggcattatcccttgctaaggaattaggctaaaactgtaataacattcaagcacattttcctatccaagacttcatcacaaagagtatatcgccacttgggtcacatataaacttgggggccggctttacccactacggaatgtagtcagtatcttgctaccaatatagggctaaaaattcataggggcttaggcttggcctccattttttctttgaaaaattcaacaaatttaagccttaggcaatccactgaaatttttgagaagggattcaagtgaatctttcccttttgggaaatttagctgaacacacatctcattttagagtttacactaattttctaatcttaagaaggaatttaagcatgtctttcccttaggaaatttttttgaaaacacatctcatttttgttttgaatgcaagttatagtaaaaatttaacatgcataagcaaagtaaataaacacgtcacactgtacgcttttgggggcatacacagctaggaatagtaccctccaagtgagctgaaaagtttagacatctctaacttcttagtcacttgtttaaaacatagcttgtggcttagaaacataaagaataaattttaatgtaaactgcttctatttttattttattatacccaaagttttttacacaaataaggaaattatacaaaagtttacacaaagcttaagggaattaatcaaggcctagtcaccttagcctattcgtagtaccgatgtaagtggtctgcattccaagtatgagggaccctcgatccatccattctcttaagctaaaaagttccttggcctactttctcaagtatctcaaataagccttccaaattagggccaagtacccccactccaagtacttacaaagttgggaatactcttctcaagatgaggcttctaacatcaaatgtatgactcgttactttggaattaaagtgtcgagtgatcttgccttgctacattttaagttggacctataactgttccaaaagttcttcaattatgtccaaggattcttggagaagggaaaggttcaaggaagggtcgtaggcatcttgttaatgagaggggactgtggcttccataaggattacttcttcacacccgtaagcccttgtatatggtgtgtatcctattgaagttctctctgtggtcctgtaggcccaaagaactcgtggaatttcttttggccaatgagttttacgtgcttcgagcgtttttcttcaacataatatgaagattttgcttacggcttccacttgtctgttggcctgtggttggcctacaactgaaaagcttttcataattccatgttgggtgcagaagtcagtgaagtgctccttgtcaatctgcttcttgttatcggagacaatcttctatgcaagtccgtactagaacacaatgtttatattaacaaaatccaacgccttttttgaggtgatagtattcaatggctccacctcaacccacttagtgaaatagtcaactgcgactatcacatatttgactcctaagtttcttgtggggagagatcctactaggtcgataccccaaactgtaaaagccatgggctagtcatgagtgtgatttcagtgggtggttcacgtgtaactttagcatatttctagcatttctcacacttccagacatgctcaatgcaatccttcttcattgtaaactaaaagtacccctagcaaaggattttctttgataaactaggtctagaggtatggtctccgcaaaagccaccatgaatctcatggatcacgatgttgacttctattccagcgatgcacctcaagtatggcattgatagtcctcgataataaagcttcacatccttgatcatgtatcaaagagcttgatactgaaccttttttgaagcgaccttttttgcgagaagctcttccaaaattaaaaaattgtaaatcgggtgcaataaaagagtgaggactatcaactatggcatttatccttcggaccttaatgcttggtttttctaggtgactaattgggactacttcatgttggataatctcaaggtccgttgcaagtttggataacatgtttgtgaacgaattttgttcactctgaagcttgcaaaagttggaacttttgaacccttgcaatagttcccgagacatcatgacatatgcaaccattttttactcttcaccttgtattcactggaaattttattcaccaccagctaagaatccccctgaactttgatctattgggctattacttccttagccaactgtaagcatgccaacatagcttcgtgttctgctttgtttttggaggcgtagaaattaaaatatagggcactttggagttagtggccttatagaaagattaaaatgatcctagcttcggcttcttattaggttaatgctccctcaacatagaccttctaggtgggaagttccaggactggatcttttggaaggtcatttaagctttaacactttactatgattgacaagggctttaccttttatagacatttgtgtccggtactggatgtcaaactggttaagttccatggcccatttaagtaacttgccaaaagacttcagcttttgaagcacttggcgaaggggatgattcgtcaatacttttatggcaagggcttggaagtatggtcttacctttcaagacacagaaagtaagcaaaatgccagcttctagatcataggatatctggattctgtacccaacaatcttttgctcacataatagactgggaactggaccttttcttcctcttgcacaagtgcagcactaatagcgtgatcgaacgctgccaagtacaaatacaaatcttcccctccataggctttgacaaaatgggagctttaatcaaatggaagctttgacaaaatgggagcttgaatcaaatctaatggtctttgtagggttttcatcattgatggttacttcctctaccaactccattggttccaaatttctctccttcccaaccctgggatccagctcatcttgaaaatcctactaaacagcttcaatgtccatatgatcttttattctatgaacaacaagcgtctcttcttggaccatgaacagaactcgtgcagtagtttcttgctctcttttgatcgcgtttgatcgtgctgatacatctgttgtcgtaggggaacttcatgcataaatggctgatggaggttaccgccttgaattccattagggttggctgccctaggattgcattgtatgcagtcaggcaatctaccaccacaaaagttgagtgcttaaaagcacttgaattattctctcctttgagggtgataggtaactaaattttccccattgacatcaaggcatctccattgaagcattggatttgaatgggacaaggagttagattcgcattagtaagtcttatcacttgaaacgcgaacttgagcaggatgttgattgagcttccatttccacaaggaccctagaaacttgcttgttggcgatctatgcattaatcactaaagggtcattatggggggaagcacactttttttggcatgatctttggtaaaaggtgatgggaaaattcatcattctagggcgttgtgctggaga

SEQ ID NO: 299573 - DNA, 1779 bp, Cannabis indica
ccgtaccgtacgtacgtacgtacgtagtagtagtagtagtagtagtagtagtagtagagagagagagagagagagagagagagagaggctaaagctgtataatccgttgatgaatgggtagctggggcccattactgcatacttcgatcaatgaaatccgtacaccaaaatgtacgctaaaaaaatcaattatttaatgcgtcgacgtttgtttcttctatccatttttatctcataatttataaaataataataataatattaataatgttattgttggctttcacgaagaaacaactcatggccacttaccaatgatttaaccttttattttttccttgttcattttttatatgttaattaggttagaccaataagaaatcttccttactgataataacagaaaaccttactataagaacaaagcgtgtggttttgcatctggttttttggtttattggaaataaaacaactaatgtaactgtctcaattatttttacaaaattatatatatgtttcttaaaatgtcataatattaagagtatgaaacgtgggacatgactatatgcttgatacataagactcgtttttcataattattaattagtgtatacatatcctaatcctaatgcgacacctatctacgttcacactaattaaccgttacgatatcgccacttttctcataaatatacgttataatttattagcattttgcttcaaacattgaaattattagttgtgaatatataatttaatgggaaatcaaggcacgtaattaatgatgaccaatcaaaacaaggataagctctaatgccacaaccactggccagtagtatcactttctttattaatttcattattttcttaaacatcactttctattttcaattgaatatttatatataaatagcttagattggctgtagaatatttaccacctaaattaatttaatattttgtgttttttttatataaataaatgaaaaggagatgttgtcaaaccaaaaaagcgcgcgtgtgtaatttaagcagtaagcgttacgtgattgcatgaccttggcgggccttgcatgattattcatatcctttggcaggggaaggaggtttcccactcgcggaggctgtggttataattacacgctctctcttgatttgttgttgtttttcacgtggggtattttcggtaataccagtgagtgggctttatgcgagagtcaaactaagaaacgaaattacgaaatacccctcggctcttccgaccgttgggcgagagtggcaagggaaccattgggataaaatggaattttgcgcatgtgctaacgacgtcgacgaaaaagaagcgagtgaatttaaatagtaagaattgattttaattaaattaaattaaaataggtagtagactcagacgacgccaaagaaatagatacaacactctcggacgtgtttttaaagcctcttataaataatgttatggattaaatttattttattttctctcactacccaaacaaatataccaaaaactatttttcatctctctcaaaatccctcctttctctctctctagctttgtgcagtactatagatcaggttgcgaagaccgtagtctggattatgctcttttaagagctctgatggtggtgctggatttctagggttttatgtaaggggtttttatttatttatttatttttttctagagactcgagtgagacttgtacgagcttcgatgtcgactgcttcgtcttcgtcgccggctcctaaggtctgctacaa

SEQ ID NO: 299574 - DNA, 1925 bp, Cannabis indica
tttctaagtatagaaaatcaaatttccctattagaatctttacaacaataaccatgttggaaactcttacattaaccatattacaactcttgcaacaaccatgtcagtaacccatctcatataacaactatattagcagcccaaattcactgttaatgctgaccaaatcaaagatccatattgtttaagtaatttttttttcaaaaaaataataatgaatgaatttgcattgtctgtatcatataattctctatttttatataactttgaagtcaatattttattatttttaaagtattctgcaagttctctattatgccactttgaaagcggttgcatcattctatattatgtcacattaaactcagttgcatcatttgtttcttcttttacttttctccaatgcaaccttatattttttttccttaatttggtctacttattatattattttcttataggagggtgtacttttatggagtgaaattttttcataattttctaaaaaactaatggaatgcctattatgactaactattaaagtgttcatcatataaagattaatttggttgtaagttttttacttactcaaaatagtggcacctactacttgtaagagtataaatgttaaatccactatcgaattatatgcctaattatcatgatacgaattcttaatacaccaaagtctatcccaaaaatacacaaaagtcagtataaaattttaaattattttcattaatatctatataatttgctctattgtaaaattgtataagtaatgatagaataacgataatattagatgatcataaataactaattagttaaatgataatcataatttctaataatatttatgagttcatcaccaaataatttttgctttagaaacaagtgtctgaattgatatgtaatatgatatttataatattaacaaattgtattatggtatcagttgatttttattaaaccacggtatttttgcataaaaaagtttaaatatatatatgtgaatgaataattatttgatctgatatattttagagttgaattttgaaatatttaagacctttaaatctctcattgacttccactactttctttcaataccaattatttgttactcgggctttgtaactccaccattcttccatctattgtaaactatttgattcacaaattatcttattttgtcgatacttgatactgcactaaacatactttccaattactaccacattctaattaattatgtttcgaaaactcaaccctccttattttactatctcttaaaaataagagcaaaatatattcaatgcattatctttcgagaaatttacacaaaatattattttttaattaaaattttatatttttacgttcaaatatatgtttttattatatttttacgatgctttataaaaacaacacagaaaaatcacatgaaagtaataagaaaaccacataaaaataatatacaaataaccaaaaattaacaacaaaatgataaaaataaaacataaaaataatatgaaaatatcaaagactgtattttctgtaaataaaatcttaccggaacacgaagaggggctggaggttgatcaaaagaagaaagaagcggaggtatcgggtaattctctacttaaacattgtcaatactgttatttctgtttaatacgtgtacaagttgcagttagtttgtaggtttaactgcctttttctgttagttagttttgtctgttttccttctaatgactttgtatatatacccctttaatcaataaagaaaataagcttttctgctactttgttcatctttattcttggttcttttctctgcaactcgcaaggctttgcctcaagatcttacaaacatggatagttgtaatatagcttgttggaatgtatgaggggtattaata

SEQ ID NO: 299575 - DNA, 2345 bp, Cannabis indica
tttatatacacaagtacattccattggtgatattgactcttaattacattggatcctgtttaaccttgattttttttgttacagctcctgcttcatcctgaatcagatgattcagcacagttatcccaggtatttctcttcatatatctcaatggtttgaatgaagagttgccatccgtttaggtgcttaatctttttgctttctccagattgaaacagagaaacttctagcacatcttgtcgagacagagatgaacaagcgtcaggtaatacatttatgatgctttctatttgtacttcattctttcctccatgcacattacgagtatgggaaatacctttacttttttaataagaattatgccgtaaaattagtcttagttaaattttctgacacattagaaattctttctaatctaactgatcttcttgattgtgtggaacagaaagaagggacatacaaggggaaaaaatttaatgccatctgccacttttttggataccaagctcgagggtctttaccatcaaaattcgattgtgattatgcctatgtatgttgcgcagccgcaatcatttacagattttagattttattttcttctctgttttaaatatggtttaataatatccttacaggttcttgggcatatctgctaccatattttagcagctggattgaatggttacatggcaacagtaactaacctaaagaatccggtcaacaagtggcgttgtggtgctgctccaattaccgtacggttttctctgtttgctttcttgcttgattgttcgctctatcctctcacttcagaatgttgatatttttgtttattgtatttaatgaacacaatcaggcaatgatgactgtgaagcggtggtctcaaaatcccattgcttcatccatcggaaaacctgctattcatcccgctactgtagatttgaaaggcaaagcatacgagtaagttttacccgcttttgatctctctggatcttagatatgggataaagaagatataattaataatgtaaaatctttgttatgttggtaactttggttgcaggctgttgagacaaaatgctacgaaatttctgttagaagatctctacagaaatccaggaccacttcagtttgacggtcctggtgctgatgccaaggccgtgacactatgcgttgaagaccaggattacatgggacgcatcaagaaacttcaggagtatctcgacaaggtgtgctaaacttaacctatgttcgatcgttcttcgttttgtttatgtataaattacttgtgtcttatgtgattcttctcttcattcgcaggtccgaaccatcgtaaagccagggtgctcgcaggaggttcttaaagtagcattaagcgtcatggcgtcaataacagatgttctatctgtgatgactacaacttcatcatcagcttgaaagtttactcctttaatttcggatggcttcactactcgggaatgaaatattttgctgtgtcaatttttcctaggccttcaggtgcggaaataaagttatcgaaataacatatttttttcccatctcatgtaactctacagaataattgaggtttgtaacttttatggatgtggaaggataatttttgcttatagagcagttttgagtggttgaaaactacaatttgaacaagtgtttttttttaacaagtaactaaggaaagtttgtttccactcttatatattgctacattttagtttaccccatcaattgaagctgtcatcaaaggttttatttgatttgattttcattattattatttttagtgatttcaaggctgatccttggatttcagtcgtgcacatggcttctttttatttattttttttagatctggaactctgaaattacaatttttttattattatttattagattttgaataaatacgatttttttctcaatatcctccatgtgctaacgggtcacaagtattttaaattaacattaagggtgtgtttggatgtagtaattacactatattttaatgtacaaggtgtgtttaaatatgagatggtaattataaataaatttttaatatcttgtttggcaaattagatagtaattttacaagaaaataatatttttggtggtaattacactaaattctatacgaattggagagtataattaaaattcctcaattactttaaattacaccgttacaatgtaataacatgtcagacaattatatcactaaacatatgaacagttttaacaataaatatataatctcacaatttattaacaaattattttgattttttttgttatggattcttcatattactagatagatattatgttagta

SEQ ID NO: 299576 - DNA, 2098 bp, Cannabis indica
gagagctgtatatgtagccctatgtattagtcactgctctataaattcagtgaaatagactcagtcatgattttgagctttagattttacaattatttcaccattagtctttttttagacaaccttcatttgtccaaactttttcaagtgtctcttttgtttctcatgttaagaagtcttgtaacaaagttgttcatttttttttcttaccaatttggctctcccctctaattgtaatcaaacttggtttgggggtttcccaactgtccagatttgcctaccccatagttgttaagtaataaaagttcctttcaaaaaaaaaaaaataaataataattaacaaaaaaaaaaaaataagttataatattttcgtgaaaaattatgaatagtacttttttccaaaaaagaagtattgaatagtataggggactattcaattaggacacgaagacaaacctaaaattattaaagtatgagagaaagcaaatgtgtgagtatgactaaatatcgtcacagtgtccctttccataaaatatctaaaaaaaaaattgtgaacctaaaccaacacgcgaccccaaacccatcgacacgtgtcctcctctctttaacaacattattcttctcacacccaaatcaaaataaatagccaacttaaaaaaacaacccatggacagcacaacccgccacgtcattgtttctacaccgaaaaaatttttaatggggaccacacccaaactaaatcttccaacccaatcactaaccgcaagatctatgctccacgtgtccaagatctaatctcgaccgtccacgtccctgtttgaaaaatctaacccactggttcatacgaccccatgcggcgctaatccatccatacaaattccctcgacggttcagatttgttctctttcaaaatctgcttttactttaatcaattttctttgccctacgctttttgctggcgaaattttttttttttttgtagattctttcatgaggaaacgattgaagccgctttcgtcaccgacgaaggatcaccggagaatgacgttaaattcggtggaattatcgatcgttaaaagaaagagagctaacagaaagagagtactgaaactccaatcactcaactacacgtgtcagaagaagagcaataatagcggagatgacaacaataaacagttacattgccgtgaagatccgttaaagataacggtctcgttatcgtcttcttcttcatcgttgggagaaaacgttgacggcgtcgttttatcgagagagacaagagaggaaaaacattacggcgtcgtttcggttataggaaggaggagcgagatggaagacgctgtgagagtcgagttagattttgcagtcaaaggaagtaagaagtttgacttttttggtgtgtacgacggtcacggtggagctcacgtggctggcatgtgccgggagagattacacgaagttttagtctcggagcttgaaaataataataatggtgatgatgatgagtgtgaatgggaaaagatattggaagggtgttttggtaaaatggatgaagaggtgaaaggtaatgcggcggcgaggacggtggggacgacggcggttgtgggtgttgtgggggaggaggaggtggttgttgccaattgtggtgattgtagagccattttgtcaagagatggtgttcctttagccttgtctactgatcataaggtaaaaaaaaaagtaattttctttttagatttaatcttgtattattattatttcaacaatgtgtggaacaaacatattcaaatagcggcgtaattagaaaaaattttaagtttgcgaggaggtaagttatgttaaattgtaatttttatactgttttgtcggtagattatgttattatcttaaataaattacatataaataaattacatataagactctaattctagattataaataatctaaccagaaatatatgtagtatttttacttttaaatatttttttaataaatttaaaacaaaatctaaattaacgaaattagatgaaaattacagttttataaataataaatatttatatcgctaaaaaaaaaattaaggtgccgtttggta

SEQ ID NO: 299577 - DNA, 3485 bp, Cannabis indica
aaatgaatgtctacctattagtaacctgctattacatgtcaaaaaaaaaaataaaaatgtaaccatatggttacaataaaaatgtaactattgaatagtcacccaatataaaatatatttatatatatatatatgataactaatgaaatttaatgaaatcttaatcacttcacgttttgaatatatatgggatattttttggtgttttggtttttttttttttttttttttttttttttttattttcacttatcttttacctctttctttagaaaattgaatttttttttgctcatggtattaggattaattggattggaatactaatcctagtagtatatgccattcaaaattaaacaaacaaaagaagaagagaaaaatcctttgatcttttgcttatcatttatctttttcttttaattttctaatttttctataatcttaatagcattagaattcatgttaccttttaaatttggattcattagaacttaaggaattaaagtggtaatcttaagtgaagtttgacttgggatttatctgacctagtgtcccgccttgggaagttccagtgttgtttatgaaaaaggaagatggatcgtgtcatatgagtattgactaccaagaagtaaacaagttaataattaaaaataagtacccttggcctagaattggagatttgtttgattaactttaggggaaaggtagtcctctccaagtgtgatcttcgctggggttatcattagtttagaatccaagaaaaggacctcttaaggaatacctatcataccagatatggtcattgtcaattttttggttatgtcttttagactaaccaatgctctagtaactcttatagatttgatgaacaaggtattcaaggattttctctctatatgtgttatagtagttatcgataatatcattgtgtactctcaattaaaagcagagcatgagaaacatctacagatggttttgaagtgactatgacaacataaactacatatcattaagaaatatgaattttggttattttgagtgtctttcctagtgcacgttgttagtaaaaatgggattatggattatacgggaaagaatcaattcgatagggattggctaaggccaaagtcagtcaccaagattagaagctttctagattcagttggttactaccattgccttgtgaaagagtttccaagatctctatgcccttatctgagttaactaagaagaggcagtgtttgagttagctaaagattaagaacgtaaaacacactattacactgggaaggctaatttagtggaggaaaccctaggtaagaaatatctccggagggttttccgtgcatccatgatttctccttagttagcggttgtcatgatcaagctaactttaaaatttgtgatgggtaaacttagtaagttaacacttcaaccagattcattaaataaaaatagaaaggctcaattggtgggttcaaatttattgaaacctcgaaaagaagtgttaattggctaggttagagaattttcaatgtcagatcagaagatgttacatcataaaattcaagtttgggttccaaacattgttaagcttagaagagagactctaaagaaagctcataccactctataaattgttacattttggtactattaaaatgtaccaagacttgaaattctacttactaatgatgtagaatgcaaaaatatgtggacaattatgtattcagatgcttactttgtcagtaaattagggttaaacaccaaaaactagtaaggttatcatgatctattaattttgcccaagtgatatggaaagaggttattagaaattttgtaattgaatcacataaaaccgcaatcatgtctaattttctatggttcaatatgaatcagggtattaatttggcgcaagagttagtattgaaaatataggaaggagataatgtgaccttatgcaacactaaagtccattacattggataagaaaccaaagttcgtctctaagttttaacaaagtttacagagggccatgagtacaaaactgaagtttagtacaactttctacccttaatagatagtcagtccagaaggatgatttagatacttaatgatatgctgcaagcttacatgatgaattttaagaattcatagaaaaagtattgtctttgataaagtttttgtgcaacaaatagttatcaaagtatgatagggatggtttcctatgagatgtttaatagtataatgtaccatttttgaaacccgaggaaaaaaatacctggatttggagtcagttcagtagattagtaaggctttagagaagattatggtcaatgtgcttaaaagatatgtagattttaagctcaaaaacgtagaaatcccaagaaggggaaaacatgtctttctatgtatgttattagtgaaaggtatgaaatacgtcggagacaagggtaagatatgccctaggttcctatgacttttagagcttctcaagaaaaatcagttcaataatttctcatctagccttatgaataacattgccagtacacatgaagatttctagtaggattttcaagagtttgcaggtgtttgaccaaggtaagctctctctttcatattcttagtagaaagtttttgtatgcatttttagaaatctgatttctgttttagcttgaaatgtttaggtttacttatggagctatatttgagttatttaagctgttgtatagtcttttgcttgggtcttgtggagctatgagtataatctctcggttaaataggttctttgcttgtatatcaaagggaaagattggtggcaatacagtgccaatccaaatgatagttggtacaggaggaaactagttgctttgaagggtagagccttggaattgtttgatgtaggggaaagagaggattgttgcagcaggtataatatagaaaatggctatcaaaaattggctcctactggtgaaaaaaaacaatggtctactgtggtatggtgtcggatcaattgccccaagcacaggttcattctatggctgtcaatgttgcagaaattgaagacaaaagatagagttaagaaatacaaaccagaaagtgatagttgctgtcttttgtgcagcaataataaagatgagagtattgaacatctcttctttgcctgtccgtttacacaagaatgctttgtgttggtcaaaaactggttgggttggaggactagtgcggtgcgatgactgtggtgcgtgctatcacttggatagggaaagcaaagatgagcaagtttaagaaatcggtgttcgctgctgcacttgcagctctggtttatactctatggagcagtcaaatgccaagcagtgggaaggtaaagataacaattgtagggctattttccaacaggtacaaaatgtaactaaaagtagagtatcatgtatatgaccaaagaatgtatctaattgtgataaagcatggtttgattccttgta

SEQ ID NO: 299578 - DNA, 6759 bp, Cannabis indica
gtctagggtcaatgctatgttgtttattatatatatatatatatatataaatatatatatatatatctcagaatcagtgctattcaaccttctgataacaactgcctttaaaataaattgtcaacttaccttcgtggtactaactgagttaaaaccccacactgagtccaagtcatcattattgtcaaatgtaccccatgctggttcgtcgaaactcttatcaccagaaaatagagacccagcaccaccaagatcactgcataaattgatatgcactagttaatttttcaaaattcaaaatttagacaaaaagagctaaccagtcaataagagaataaatattattgcactatcaaataaattaactttaaaccagagttaaaaacacaatgataaaatatcaccctgcaaatgagtgtggggtaattctatccaaatcaaatcaaaatctgatgataggctctatgtcaaagatgtcttgatagtttaaaatcttaaatataagattccacagtaggttgactaaatatttcaaacttagaaacttcactatggagttatcagtaatggagatatttactgtgtagaaagataaagtcctggtttttacaaaatacctatgagtttccttatcacgaggtgaggtctctgaaccaaatgtctttccaaaatctgaaaattctccagatggacttccagcaacactgcttccaattggactgtttggagtgcttttggccaagtcatcaattttatcatgtgcagaagcagaaccattttcaacaacccgttcatccacactctccggcttatcagatttgacatccaagtcgggtgaagtagcagcttttggactctcaactactgaggattctttaatctgagacagtgtggatttttgttttggaggtgctatggtattctgcacatcaagggtgagctccttgacaaaagtgaatcctgaaaaaacaaagtttagcatcattatgaacctctcctttacaagaattaagtcccaacaccaaagtgtcacatcatgaaaatacgagattaaaacaaatgcaggtaattgatcagttcaggtcaactaagtggtacagtgataagttgacactatgacatgacagttctctacatcatggacatgatgtaaaataatagtggcattatcttaacacgaattgcctaaaaaattttgtaaaccgttataatataccttcatcttcaaacttgtcccaatcttcatcccagtcagcagctccttcttggatcccatgctgccagcctgtttgttttacaaaaaagagtgtgtgatacagcaagtaagagataggagacaataaactattgacttaggtgaaaacactttatatctatctataagaagtaagaatccaagcataacttagaagtttagaaacataacatatatgaggatcctataaaatgcagcaaagaaacatgtgcataaatgaacatatgcgagtgtgtgtgtgtgtgcacgcgcgtgtaaagcattgatcatcccacagttgccaagaacttgggcaacaatacttgcactatggaaatcctatactatttcaaatgccaaccaatgatatctgaaaaattaaatcattcagaagatgaaaattgcccctagatcagtatacacaaatgatccagtatagcaataactttccacgtattttcaaatgatcctcgatcgtggtacattaatcagattctggaacctataacagaaccaacttaaaaataaataccataccgaaaggaagctcagtcaaagttatgggttttccacgtagtccgtatttcttgcaacgctcattgagggatttcacaagttcatcaagatctgattgaatacgatcaacacgagcctgaaagtttcactccacaacttagacaaagtctgaaaagatattcattggtcagaaccaccttcaaatttacctgaaggactccatcagcgctgccatcctgttccatcttaacaatagcctggtacagctccatttttttctcctacatgtatacatgaagtttgggttatataatgaaagtttcatgcacataaatttgcacatgaatgaaataatttaagaggaaatacaatgaaacacgaaaaaatagattgtacaagtaaaagtatgaaacctaaatgtaagaacatggagaggaatgtaaaaactgatcattgtgaatggtaagtacagataccgacccaatgctggtcatttagttgtacttactagtgtgactctcttcagatattggatcaatttaatgtaaccaaagtaaatgtgagaccatggagaggaatgcaaaaatgatcattgtgaatgataagtacagataatgaacccaatgctgatcgtttagttgtacttactaatgtaactctctcttcagatattggatcaatttaaaacattaataatttgacagttagaaaggggtaaaaaaacaaacacataattgaataactggcaaaagagaaccactaaggctatcaatttgcaccaatcaccataataaagcctgatacctggatatcgcgaaatgtagcttcttcaatagtgagcttggaggctacatctccactttgtttatatttctcttcatatttcttcgccagggattcaacctgcaaaatatgcagtctcaacatcaaactcaaaataaacttaatcagtgagaaaatgtatgcaagtcaatccttcaacaatatacctcttttttgtcagctgatgacctttccataatctcattaacacgattgtcacacctactcttgtagagaaccttgattggagaaatgcaatttagttaacatcttagaaagattcaatatttttaagcgtgcaagtcaaatttcttgctaatgtttctactctcacagttatattgagatttgacattaaaatatacggcaattaaaaaatatatttatatatatatatatacaggataagtactaatcagaagcatcagtgtatatagcgagattaacaacacaggggttctacgtgttctgcatttcttgacatcaatattagaatcatgttgtggaaccaaaaagagacgtggaaagagtagacattaatggcgcatatataaattaatatgagaataaacattgtcctactgaaagacgctaatcagttatttatttaaggtacttgtcaggctatgaaggagagtctgatctagaaagtcagaaaacatcctactatttccaatgagaaaataatgtaacagatttttgcaaattatttattgtgagccgaaactgccaagataaaatattgactagtaactagtaaaaaaaacactcttcctcagccaattgtatacaagggcctgacttccttaggcaggaacaaataataataataataattaggacttacaagttcttgcatttttgtacggtaaaactcaattttctctcttgattccataatctctttctccagttcctccaccttccataacaataagacagctgagtcaatagaattctatccctaaagatatgtagaatttcctactaaaaatagcaatatatatcaatctctactcaataagggaattctcagagatacatatatagctagcagtgcaaccaaatgctaatcgatgacaactttatgcatcataaactcttttcgtaaaaagagtccaaaaactgacacaagcattcatgaaaagtttatgggaaggcaactgcagaagtacctttttatctgcttctgtcgcttctttaaactttgaattgagtgaattctgctcctctgtactgagttgatctacgaagtgtttatccaactccggaactcttgattttggctgagtgactggtggctcctcatcagccttgggaagagcaactggtactggtggtcttggtccaactggaggcatcatgtgctgagcaccagggccaggcacaacatttggttgctgaaaaccttaatggatagaagaataaaagggttaaatcaagaaagtgaattttcacaaaagtaggattctatattcacaagaaattatccttttagagcgataccagatggtctccaagctgcactgccagcattgttgtaattactagtaggttgaacactactagaaacatcaaatatcacgttacttggaagagctgctggaagaggatgcccttccctaaacctctccattaagtacaaagcaatacagaactccctaagtgatagcatgctatcattatcctggtccgataaatcccatacttgctttaaaacctctggtagatacaaacaattaaaaaaacctttcataagaagctttcaatgcaaacgcataatatgtaatttagacacacatgacaagatcgaacagtattagaattctgggttcatagctttcaacggaatggaacaataagagcatggcatgtgtactaaaaacttaccctgtgtttggttgaagagaaaaatgggaggaaagaaaagttttgagacaaaagtggagtgaataaaaaattgtttgtttggttgattgggatgaaaataggatggaagagaaaattggagagaaaaaaataaaagagttggtccaccaatattcttccctctcaaattggaaaacttattatctttgtttttaaatttcaatataattaatataaaattgttaaattgtaattttacttttacacttattcctttcctcccttcttaccaaataacaaaagagaaatgtactttccttcctatcaccttaattttctatccctccttgtttttctttctttcaaccaaacataatgttaaagattatataaaccccactttcagagtgagaagcccattttctaatccgaataacatgcacacatgaacatcaaccacttgcagaagtaaatcaaacattatcagcttataattaacagcctattatatgcaagcataggcagagagagggaaggtaagaatgatgagtgacccttgggaagtgagaagcgggtagcatcaatctgatttgacatgtggaatacacaaacatatggtccaaaacaaaggatactcaaatggtttcacatgtcaaattaaattaaactgctatacacatatattcacagaagaatatacctaagatagcatatgtaaaccgacaaccaaagacataaacaaacaaacaaaaactaagaaatgacattgtgattatatatcaaaggaatcaagaccgagtcatgtgcgagagctaagctactttgatttctaatatttttgcaaaaggtcatgcaatgtagatctaaagataaactcaaaaaattcttcaaagtgatacaatatttcaatgtgttccgtcatagaaatataaaacagaaatgtatgcagcaaaagtctttggttataaaatgataaaattatccagatttagaaataaaagtcccgaatttatgtatacaattaagggagatcctacctctcggcaatctccaactaagaaatagattgcgtgcttgttcaccagtaattttcccatctctgtctgtgtctacttcaacaaatacttttgtatacttctgaacattagtctgagtcatcttaggccatgacaattggggctgactagttgcagagttgccagttgtaggtgagactccaggtaaagatatagaagtagtctgagctgagacctccctgtttggtctggcaagtgactgagctggctgaaactgaacaccagctgtttgacgtgttggtatactctgtgctgaaacatgggcgggtggtctaactacgggctgagacccaacagagtttggaacaagggcctgtgaggcaggtaaattgcgtgcagtaaatgcaatggaagcatctggctttggttgtgatggggttgcagaaaacatatcacctccaaaagatgagtcagaagcaaacccattcacttctttagtagctgtaggaccttgtggcttcatcccagaagttatttgtggcctaggtggtagggaagttgttggccctaatgttgcaatcccaaatccatccaaacttgtggagggattaatccctgtactttggacttgtgatgttacggtaggagttccaacagtacctccactggcccaatcacttggcaaacttgagcttagaggacgaggcccagccacagcacctcccctaggaaatccttggctggccacagtcagttgagaagatgaagcagatgtgggtagtggaggcttcattaatttactttcgtgagaaatatgctggttcacgcctacattaacttgtggccctcctaatccagtatttggtgataatgtcggagtgacagcactactctgagtctgagtggtagatgctggtggagcagaaccaggcagcggttgaggtgtggccgcaaaatttatttgcggtggcggtatttttgctgcagctggaccatacaatgcagctttcacaatctctggggttagttcacgtttttgtgccacagtaatcagtttaagggcattatagaactcagcacgaccaaggaaaccggcctgtctctggtcagcatatgcccatatctggcaaaaacgaaaactataaatactagagttgaactatagcatatctttcttacaataaatctcaccaaatccaaaaacaaattaaatgaacttataatgattattgtccaaccccagtgttatacattgtaggagattaattacagcataaaaataggatcagataagcacaaaat

SEQ ID NO: 299579 - DNA, 3794 bp, Cannabis indica
aaaaattaaaaaataggagaaagatgaagcagacaatatttgttgatataattaataaagtgtagcaatgttagctatcatttacattgataaaattagtgaactgctgcactatggctgaactagctttctcttgcagaagtagcttcaacaaatctgattcacccaacttgtaaatgtcataaagatctcttttacttttgtaccaaaaggtcacatatggtacatgttgaactttccaataatgagagccttcttctggttgcagtccatccacaaattcacttgacatgtccatgatttcaagagatttcaggtttgttaggaattgaatatcacaaggcatctcaatcataagtgggaatggcccaaactctaacttctcaagcagaggcaatgctcctctctctatcttcaccacctttaacccttctaactttctcaatacaagatgcttgagtttcttaaaacccttttcctcaaaacacagttcatctccattgtaggcctcacacatctccagaaatgctaagttgggcaactgtttgaggcaatttaagggctccttggttaatctcgaaaactttaaattcaatccttgtaaattttgaagctttgaaatccaatccggtaactgttgtagtcgacaagccaacacaagataacttaagaatggaggaggagatgaaacaaaactcaaatctataatttcatcctcattgatgccatgtaagtataattgtacaaggttgttcatattctcaatcgatgctccaagtgttttaccaatctctgcagttaattgcctaatgcacaaaattttcaatttccttaacttttccaactctttcactaaatcaactgtgctgggatatgctctcagagatacaagtgtttgtaactgctctaaacttccaatcccttcttgtatccttacaccaaggtccaaatccaatccataatcagtctcaacattaaaaattggtttggctgcaagatgttgtagattttgaagcttcttaatctcaattggtagctcttcaactaaagatttatagagattcaaagtctctagatttcgtaaattcccaatagacttcggaacgatcttcacttttgttcctctcaaatttatgtacttcaagttgaacaagttccctacttctttaggaagcttacaaagaggagcatcctcaaaatccaacaccttcaaaaatttaaactttttaaacaagctaactacaaaaggatcgacaagttcatcaatgtcaaaaagaaaaacagaacgaatcttagaattatctccaagaagagttagaacatcttttgttgtgttgttgattgccagacgacgactctttccttcgaaccttagcttcccctcattgattatttggaagaaacacaattcttcccctcttgttaaaatgacatcatgtatcaaatcatgaactctacaagctctgtcaactccatctttaatctcaaatgaaaccaagtttctatggatgagctcattcaagtattctccagcaacttgttcttacttttgtctctccctgctttaataaaatcttcagctatccaaagattacacaatttatgttcggaaactgagtgatcttgtggaaagaggccaaagtacaagaagcaagatttaaggtggtatggtagatcatcataactaaaagatagaatcttagaaacacttgtaaaatgaggatttttttcaaactcattattgagattatcaagcactcttctccattctagcttggtcttttccttcttcgaaaacaaacttgctacagttgcaataacaagaggcaaaccatggcattttcttaaaatttcatacgacaattgctctaactctcgtgagcaacatccctcaatctcaaaccgaaatgcttttttgcgaaacaattcccaagccaagtctagagaccaagttttcagctcttgaacatgatcaaatggagtatctttagcatcattagcaataccagtgttgcgagttgtaataattatcctactgcccttattattactaggcacaacatgtttaatcctcccccaaaactctatgtcccatacatcatcaaatacaatcacatacctctttatctgcaattgcagcctcaaaagctccatcaactcttcaagtgtccccagtggctcatctttcgttgggcatatctgattcctcatgatggtcaagaccttctccaagttgtaagattgagacacactaatccaagcaaagcactcaaagtgttgtctcaaggcttcattactgtaaacttttctagcaagcgttgtcttaccaatcccaccttgacccacgagtgaaatcaccgaacgcatggaagagccattaaccaaatacgttatgagctctttggaagttgaatcaatccccacaagctcgtcttcctcaacaaacagagaacccaatcgagggtcaacttcagttcttgccatactacaactgctagatcctccttgctgctcaaagggtctcaacccataacttatacctctttccttgattttcttcaaagactcgttaatgtcacgaatctcagaagccaagtcataacgaggtttgagagatctaacgccattacccactttctgaaaccaagtaaggagtccattgtgatgattattatcaacaggtttggcaagatggtaaaggtattcgcctataacatcttcaatgtgctcagccaccttcctcatctgcttaagccatactttagtaacgtcactcacttctcctttggctagctttttctctgcatcgacgaggaaaggttgaatgatttcaagctcatctttcaagctgttcacttctctatgaactcctcttaataaactgactttttcagtgagcaaatcatcaagctttctgatcacgtagctcaaaaacgtctctgccatttcatcattgaagttgttcacatctttcattttagttcagataagaactttctttgctttgctttactctgtattccatcccatattacatacacgaataaataatgatttttctatatgttttcagtgagtggaagaagatacttaagtaaggggaaaccagctgtgttgcattatcagccagagttgatatctttagtgattagaacgaaagcatgtgcattaaagtctatctaggaccacaaaaacatatatatttttttcttccttttgatctaattatttaatgaatttttggataatggtacttagcataatcttcatgaaacaaatgtggacaaaagtacatatattaaaaggtggagtagttattactttattttgacatctgtattgtcaaatcaataggtactttatttagtcttaactaagaacaatggcagatgtgaaactaagatggtcaagaataatacatccaaaagaccaacaacctgcattatgccgatttttaatgattggtttcacatgattttaattttgattgattggattcacatgttttgaatgattttattaactttgactagttgtagagcttaacaatggcacacagaactggtacacaccagttggtacaaaccagaaagtgcaagaaggcaaagaacgagagagagaaagagaaagaatgccaaaaaggttaaccaaatctggttaactaagtacctttctatttatttgagcagagtacaatacaagttgttaaaagaaaaacataacaaatttaacaaacatgatgatgtgatcagtacatgatcactcacctcgcaaacaatacaaactaaagaaat

SEQ ID NO: 299580 - DNA, 1761 bp, Cannabis indica
tgtttaaacaacatacttgtgagtagatataagatcctggtaaaataaattccaacactaattccctaacgggctcttggaatagtctattctttaccggtttaacttcattaacttcaactaaaatttgattttttatgttagttaaagtttgttatgtctagctagtattcagttacaacatgtaaattccttaacgcttcaatctcgagagttaagtcagttgaggacaattctgtctttccaacactcttggaccattataaataccaacttcttctaaagatataaataactttcaaaacttcttatttatcctcttcgaaattatccctgtacaaaaataaagactatagaactcgatcctcttgtgattttatagatgttaaatcattattattataacattagtgtgaatcaataaagattgaagctaaaggttgtttcatccgaaaattcgaaaagtaaataattttcactgccaataactaatcgaacctcattaaattggcgtaatttgatttatgtttttcattctcttgattagttagttcattttattacactaattgtcatctctgtgcttaattattttttgaggtgactaaaacaccacattttataataaattatttttaattaaattataataacctagtttaacataaagaaaaataaattataaactttaaatttgcttttatgcatacgtatgattacaacataaacatatagattagtataaagaattatgataattcatttatttatcgtgactcatatttatcttgtggcggccattttgtcacatctctcgtcaaagactttttgagtgtgttctactttttctgccacccctttttgatatccaactaaaacattttttgatcgttctaaggattaatcccagccctctaaaatggtaaatccaccttgattagatatatctttgggcatatatatatatgttaactaccaagtcttttagcttccatgaactctactttggtcccaatatagcaatatatatagtagtgcatatggtgcgtgggcgactaggtcagcttggtcccgatggcccattttaagcacgccaccgatcaaaattcaacctctcatattacaacaacttcatattcgattccatacctggtcaaacacgtcgatgtaattaatttaataatcttatgattaattggattcgaattatatcgttataaatggtaattaagtcacaaatgtcaactgggactgtaataataaaaataaaatttttatgaaactaacacacataatatttttttttatttatttgtatgaattttaatctcgaaatcaattaataatgaataaaataattatttgagggaggggatgatagtgtatatatacagtttgatcagttgaaatcgattggaagaggtggtgaagttgactagtccacgctttcttcacgcaatttgccactacatatattcacaaaaactgcaccccacgccttacttttccactactctcatctattttactgctgctcaacccatataatagggtaaactatagtttctttatttgatacagtagaatttctattttagaatataataatttctaatttattataaaaaaaataaaaatttaatttgagccaattataaataagaataacctctatattgtaattagtaatatattttttatatccatatctattctatatggtttatgagaaattcatgggtgactttttatttatattaa

SEQ ID NO: 299581 - DNA, 1909 bp, Cannabis indica
caaagtcaaattgttttcaaaaaacaattttctgtttttaaaaacaaaaaatagttttttagttatgatgccaaacatgcataaagatttttttgtttggtatggagtgaaaaattgtatggaaaaaatttaaattcaacataatttgtcatatcaaacatgaaaaattgatttttttttttgttctctacatatttttcttctacgatttccttttttcttttctcattaaaatctaacttttaaatttgaccgaaaaaaataattctcttttgaatgtttaatggtggaaaggaattagttatttgaattatatataccccaaataaagaaaaaaacatctatatagtgattcaagtgctttattattattaatatcatgcaatgtattctagtgttcttctttacctaacttctaataaatttaattaccattttcattgggattagtttatgaaacaagaactttctttttcttattgaaacaaacctaccaaagtcaatatgatttaataagctgtgtttacttggtccaattataatgatacatataatacatttacttacacccataatcatatgtaagtcatatttaatcattatcatataaatatatatgtatatatttatttatatagaaatcacattcctatctggacccttcttctaagaaacttcactcatttttaatgtgtattattggttacatagcagccactgctgtaagtttagacagtgacaaataattatgttaataataattaatcaaccataaaaatttaaaaaaaaaatacataaaaaaagtggggaccatattttgctatttcatactttctctaggacattctaatctttctataagaggcacatcatactattttgggacatggatatcaattttttaatatataagcttaatattatattaatcaagttctagagatttcaaagtgattaagggagaaaaaatattgtttaatttgtttatagagtggttgttgtacctaagaagtaggcaacattgtttataatcctaattacttgaattaattagtgtaatgggaagaccttaaatatcttttggaagatcacatttaaaaaaaaaaaaaaacaagtattagttagttagtaagagagaagataatgcaagtatatatttaattttattgtaaaaaattaaatcatgaattatataatataaaaagaactacaaattaagttattaataatccctagtatataccctattacctacaaaacaatttagtctcaaagtatatacttgtacaacaagtaatctatatattaagttttttttctttctttctttggtgaaggacaacgagtttgtagtactaataatttataaattcaacaattacttatccaactacataatctagaatatatatatatatatcattatccaaatatttatatatatttaaaaaaaggaataaaaagttaggttatagagtaataagagacctagaaaaaccatcaatcaatgtttgccaaatatgtgtatgggtagcattcataaattatatatataaaataaaaaaaaaagtaaatttttttattagagatagtctaaacttaaaagtagattaattttaatctatctatctataaaactaaattaataatacataagtgagatgtataatgcattacattacatgttcaagtctttatataatttatatcacgtttgggaacaaacaaaagtatcacttttcaaaataataataataataataataataataataaatacaaaaatacaaaatatctatcaatttaacataaatatcaaacttttaagagattattaattataatttcttattacaattttttagccaattttcacgctcaaaatcatatattaaaatatttttttttt

SEQ ID NO: 299582 - DNA, 6414 bp, Cannabis indica
atattgaattgtattttatactatatttttatataaaactatatgtgattaacttttacggacacctaaatatataatattttaatataaattaaaatttaacatagttatataaaaatatgatatataatattaagagttagtcccacattgctaatgcgtagaaataaattgtgatatataagatgaaaaggctacttctcctattgtcaattggttttgggatggaacctcattcatcttattcctcaaattctaacatggtatcagagccacttgtgatctgttgtgagcccaaattgccaccggtccaaaaaaccgtttgtgatccgttgtgagccaaagtgccgccggtccaaacagatacttccgctgtctcccctttaacctctatttgcgacctttcggccaatgtgcgccaatttctagtgctgggtctttaacctgtttcaaaattcacaaatttcctgacgtgtacacccacaagtttcccgatatttgaccttgtgggattctttcaaatgtcacgttcggtcatgtggtctcttaaaggtcgttcgttatacccacactttctaagcccaaacgtgaggagggtgtattaagagttagtcccacattgctaatgcatggaaataaattgtgatatataagataaaatagctactcctcccattgccaattggttttgggatggaacctcattcatcttattcctcaaattctaacatataatccaattcaatataattcaatacaatacgacctatgacgttacaaacaagcccataatgtagagagcagtaagctttggatacgtataccatgtatgcatgtttgtatgtcatgtaaaagtaaaactactaccaaggcaggcccccaagtgtttttatcgaaagtaataacacattttattaccgggcagaaggtaagcgcatatacaccttatcttgtacatgaaatcttcaacaaaatggaataaaacattggcacaagaaatcaaaattgacacaaccagaaaagctatatggctaacaacagaaagataatgtacaaattatttactctctatctactagaggattagaaaataatccaccagtaacccttgtacaatgaaagcattaggattggtttttgagaaagaaaaaaataataattattatcttattgaatgtgttgattagttatggaggcttctagggctagttctttggtaattagtctcagcagcacttgcactgcttctcgtactctagtgtctctgttcatcgaattcacaaagaggaaacagtaaggccttagtcttgtttgactaaaatattatatgttagtgttatcactcataccttgaaataacaagttcgcaaagggaaggaaaaagaacaagtaggtgagggcgcctgtcacgattatttttctccaccagaccgcttttcaaatagggatgtaaaggaagaacagatgctgtgtctgtatgaattaccagatcagccagttcatttaggacatacataatttcatctagtcttgcagctggtagagggcaatcgcctgcacacagaagcatatatgattcaaaatggcataacacatcaagtgaacttgaaaagaaaattgctgcagttaacttcattcagttgcagatgatacgcacccaggttattctcatcaattggaaatctctttaaaatgtcttcgcatctgatcataagcagcaaaattgagatcttgctaacctcagatcgttctgaactccaagtgtcagctttcttctcggaactgtaaatgacataatcatgtgaggtttttttgggagggaaacaaattgtattagtaaaagtgaaataaaacaattaaatgctacgtggaacaagaaatccacatgtttatagcacattccaaatctaaggaaatctaaaaaactttatataggaaacccacaaagagctccaatatttaaatgatatcccacaaaacccacttccccaatgtttggtgtaagagttttacttagtggactttaattgggaatgattgagattaagggaatctcaaaactcaagtgtttaaagagtttgagaataccttaaaaataaatttgaaaatggaatccacacaatcatataccttccactaaaatcatatcaaaccttacattctcattcccaagaatttaaaccctcataacaaacagaaagagctcacttgtagatatatcagctaaactaataccaaaattgcagcttttggtaaattaactgctcgatccttcctagtaaatcacccatataactcttcactccccatgcataaatagattatccaaactctcagcatcttcttaatgtattacacaccaatcagaggatataatcaatcatatatgactttcccctacaaattaaattaaggatatttaacttacaatacactcatggccaaataaactatggtggcaccatgaaccttccaaatagttctataaggttaaactgataaaagctaattcattcattaaacaaagtaaaacaatatacaactatctgaatacatcaaataaatatgtatataaagggtgtgtatatacgtacctgctcagaaaaaataacttctgcaagcacgacaaggaaaatctgctgcaatgtaagggcataagttctactgtctcaacaggtaaagagcaggttcgtgatgcacaacgatccaatgtggtaactagtctttgcaaaatctgtggaaaacaaagacggaaattataaaacagacatagacataccattgaagccctatgactcaagtttaagtgaacaagtacaacaataagctgcactaaaataattatatctaaacattgtttgacggacaattttataatattcatattttaccatgaatcgagcattaaaagaataataaaagaacattacatcttgaggtgcatcaataggtgacttgagaatcttgtcaccaagaatgtctaaagtggtcatttcaagggactcatcagctttcactactgcagtagagagagaatcagaagaaagagcccgcccacaataacccacaaagaatatttcgtacacatctgcaacttccttccatacgcgtgttcttgcaggcttactaatactagaatccagtcctccatccaaggccgatttgcaaacatcatcaacaacaatgcgattaaagccttcaacagctaatctccaaagtgcaccattaggattgtctcttctagtagtcatagacctaagaagaacaaggaaacaaagatgctaaggatgtgcctttgtagtgttaactacgtctatgtatgacttattgcagtgccaggaacacgtcctcaaaagggacgttacatgaatactaatattaattggtccaacaatttatcaactgaagtttgtaagtcaaagatttaattaacataatggcttatctccaggttctcaaaaaacagctgggaagcaacagaagtttacaaacagaaaatcaagtatctgtacctttctagactttgaataatttcaggatatataatatacttctcaactgatggtgtttttaagaaaagatcaaccaacaaaggaataagcttttctgcaaacaaagaactggggacgcctactgtgacagctgtacttgaccgtgaacttgaaattttagcttctctctgatgtgaggatttggacactgttccatttgatcttccatactttaaccctaagttagtatctgcaaaaattattaatcactttgaatttctgttgtaagatgtaataattttttttttttaaaaaaaaagaaaagtacaatcaaggtaatgacatacctggaattcggtcaacaatgctggttggccctgcctcatcttcctcatcctgtactggggtgtctgatcttggcagatattgcagaagatcccgaagaagaattagccacattgaagaaaagtgctcagttggaaccagcagaggtatgatctcaagtattgtgcgtaatacgtgtgaaatgtgtccctagtgaaaagcaaacattaaattatagaacagagtttttatcaagagaataatacaatgattgtggtatccttctcgttactacagctataagtataactatctcaagaaaatgaggcttagttcatgatctatttaacagcaatactggaacagcctaaaataaataatattctgaatgcaaaattatactggtaaacgcacatgcacacgctttataggtatgtcaatttctccttgttgcataaataacagcaaattggccaagcagtagcactattacttaatttggccaaaggggggcacacagaaaagggttgagtgcaaaagctcacttacaaattcactctcgaagctttcatttgtagcaatggcctgcttgatggaaaaatctacgatcccaagcaattgagtatacaaacgaacatcaaacattgtttgtgcttgaacatataactcccctgcacatttccaaagtagacaaaaaattatttctctaacatcaaataggtacaataactaaagctgaaatttatgccaaataaagtcatcaattgatagataactgtaaataaaaagtattaacaatatttacagggtatttcagataatgcatgtatctctgcatcataaaaaagatgcacaggtaaatgatcaactatcttgctcaattaattcattaccaagaccatgtaaaatctcctgcttcaccttgctagctgtgttaccactgtagtttgttgacttctgaataacatgctcgtaggtattaagtactgatgtaaggtaaggcatcggtaagtttccctgcatgacacaaacttgaaaattttaccaaacaatagaagggggagaataaaagagtacaagaacaagaaataacatattcacaaacaagacatcctccaaaaactacaacaaagcatataaacaaacaaaagactcaacactaaatcattcaaattatgcattgataagtgcagaggtctcatgtctccaagtacacaatttaacatgtgaacaaacaaccctaaaatttaattcttttcaatattaactcaatgtccttcaaactttcttaagcacagcacagtaatttcagcactattattagcataactggtacaccatatgttctcacaaactagccaaaaaattcaaggatgaaaaaacaaaataaaacacaaaaccagatgtattcagggaaaaacagagccaaatttgataattaccttggaagagtgagaaagaacagttatttgcaaacagcttattgctgcaagagcaacctctttactatcatttagaatgctattgtttacaaattgaaccaaacattcccatcctgaataagtgcaatttttgtgttattttcataattgaatttcgatttattgaaaacataaaaaagcaagagcatcaagatctgttagttggtctacctgagcagaaactcttcaagcttctgagtaaagggaagaaagaacgcagaatacgagctattccaccaagaataagtacaagtgtttcatcccactgtttctgagctgtgttgcgactgaattcatttaacataaaaacatttaatactagatgagagaaatataaaaactttactagatccttctctacttttttctttcaaatgcgtttatttttttcaaaatgaggtttgacagagatcaggataataggatcttaactatgtacctatgatgtatgagcatgtggacagcttttccttgtcgagttccaagttcttttccttgccattcatctttagatgaggttgcaacctaaaataatacattcagatcacaacaacatatgggaggaaagaccccttaatcttttataaccacttttcaccaaccatgtgagaagcaagatccaaagtagaaaaaacataattctgcaggcaatcctcccacatgctttcggaaagtttctgtccatgacttccaagagtctgaaaaagtgtcctcaccgcagaattcctcacctgagtatacaataagatcatacattttttgtttgactgaatttaaaaaaaaaacacggaacgatatacacacaataatgtaagcagaaactggagtgccagattaagtttcagcctaaaaataacgctgaaagtgtaccgtagacagtaatataagatgttatgagttagaatatatttatctcccacaaatgtaatcatgaacaacataaataaagtacaaacttttcacccagcataaaatatgctaatttaggaaattgaatatttttattaaaaaaatgtaggatgacgatcaactaaatctaaaaactttctgtcaccaattataaccaagttatgaattcatcatgcattgaattgaaaccaaaaaaaaaaaatacatta

SEQ ID NO: 299583 - DNA, 7776 bp, Cannabis indica
ttttaattttgaaaaagattgtttaattttttgggtttaattattggctttatttatttgttaacgttaaccgtctgtgaatcgttaaaacaagaattgccgttagatagccacttttaatatataaagatataaaacatttataaatatataaatatttaatatcaatttgatcatgatgaccttataattcattggtgattatttttgagtgttttgtactcatgattctctcccactaagccagaaatatctcagccacagcatgcacgccaactcattcataattaattagattcaacttaattaaaatcataatccaaaaattttcaacgtcgaaacttcaccactagttttttatttatttatttctaatattggcactggtggtccataccagccactacaaatataaaaatgtttttgtggtccaaaatgactttatatgttttttttaagttgggtcattttatctggtttatcttgttaaaaatttgccaatgattaaacgaaacggtattaattaaaaattaattaatgcatatgtctatgcttaatttgatgattatccctcatctcactatgattattaattccatgaatactttttgtcaatagtactgatgaatccctctagcgaattcgatgcacatatattccaattccatacacacatatgcaaatggaacattatatataattagaagagtacacactatcaaacgcacatatttatatatataaatataaataaatttatagaatatatcttatactaaataatgaaaaagaaatcgacctgtaaagtctgtcaacttatatagagtaaaacaaagattacagccttaaacgatcggatctctacatacttttttcatttgatttataagctacttgtttacttttttaaattggaaagattcaatgaaaaaatgacattttggaaacatatatcatttaaaattttcaaataattcgaaggtttagattattcctcgcaattgttgttaagccacttagtgccagagaagaaagtagtattattaggtatgaacccactcaaaatggtacgtatatatactctaattaaatttttaagtaattatattaataatgaagagtaatttacggaaaaattcttgaatttaattatccgttggagataaatatttaagattgatttttaatagaaataatatttaaattataattcttggacatttataggtacctgaccgttaagtacgtgaccaattatcgactgttacgtggtcattgacttaacacttaataatcatgtacctacaaaaggaatgaggatcctctgttaaaaattattatttcatattgtgttaaaataatttaaatttgacacctgaattaatttaatttatattaaatatgttaactatatttgttcactcaattaaaagtttaattttttaataaataaaaaattagttgaagtgtcaaatttagattgatttaacaaaaatatgggacaccaatttttaacagaagatcttccttcccacaaaaattaatataatttagatattattactatcaaaaataaaatttaaacatttatatgcaacatagagttaaagtaagatatttatgatgtaaattactctaataataaataatatggtacaataatttaagaagaaattacataaaatatggtaaaaaatttattacaaaaatatcacagaaatttttaattagctatagtctttgatatgccatttgttaaccattacatttatatggtatttattttcccacatttttacaatacgattttatttacccgatatttttagtattaaaacaattatttgcaggttaaagggttgggatttattctcttcccttgtcctttgcgttgccaacttcttgcaccagtctgcttgagcttctcgacggccactactacatgataagaatgatttagtcaggcttcttgtatttgaacaaatcataactatctttttaccaaaccgaacttaattatctgattatcgtacaactgccatttttatcgtcttcagaccggtggcagagaaaaaccaattgagttgaggctcaactattttttggtgtgattttgtcttgagaaatttattttgagatacatttgtgcttaagtttattaggtgaatttgagggtttattccttggaaaataatgctaaaatttgagaggttgttatagaggttagggttaatttttaatagtggattaatcgtggctaagattttgtaaagaccgcttaattttaatatggaaattaacaaataattagggtttaattcaaaaattagacttttaattacgatttatgaatttatggagatatatttgaattctaggggtgttacttatgttatatatgaaatttcatattttatatattttatgcctgacaacattggaacgcgatatttggccaatagaatcacattttcttatgagttagtattttagtaatagcggagcaatttagatagacattgagaatgtcagaaatatttgaggtatatagtttgaccaaaatacccctaagtggcaagtatgccttttggcttaagcaaggcaaaaatgatctttttggccatatgattcttttgtcctttggtgatgtagtcaagtagtgccatttgatatttttgacgataatattaagattaatattctagatttttatttattcttataaagtaagaaaataagtcaagtagtaccttctccctcttcaaccttctcatcgtctcgaccccttcaaaaaaccagcagagaaattggatttttagctctattttttatgttctagtagcatctagtgaatccaatactagggacctgtaaattgccgagcagctgttcgactcaggttgaccgtcacacaaattcagaaacgaggtaagattaatataataatatgcatatgtctttacatgtttagtgtacatgtttattaagcctgttatattacatcgatagtggtatcaatacacgtagagttgtattggataccgatagatgtatgtttagctcaaatactgattgatgctatcacatcggtacagatagaggatgatattatggtcgatagtattgttgtatgaacattctagactcagtaacgctagggtgcggggatagggttacaattgggggtatgggcgcccaattgtaatccaagttatatttatgagtatgagtatgcttttcttactgagtctgtcgactaataaatattatttgcatgtgtaggtaaagctaaggctaaggctaagcagccatgacggcgaggagatgaagattttacatgtcgaggtgtttagacctagagcgtacaatttttgggacaggtggttgtattttgtatagtcgctagacaacaatttttgtattaagtactttgaatgggttgtatagtcgctagtcattaagtaaagttttaattattcacaattttcaataaactcgttgattagcaacgaattacaaagttattataaaatcacgataactcgtttatactagtagggtgttacaatttggtatcagagccacaaagttgtcttccgaaaattgttactatatgtacaatcatcattagagataagctcgattcacggttcagtaagcctttcctgctttagtagtttattttattagtatgttataagaaaagcctgatacgaagcatgttagtagcatgatagctgaatatgtgtatgttttaatttctaagataagcggtaattagtaattttttcttaatctcaatctgactatgctagctctttgtttcacaggctgttctattagaacggatgccaggcgaagcataaggagccgcggtaactcggtcgaattcagtggcgatcagggagcctagttttccctgaatgtacgtggccaaggaaaaggcccaagatgtagggcgcgcggtcggggagatgttaacccacttcattctgcccaggattgagaaaataggtttccagcaatacaagccagaatcaatgaacaagacgaagagatcagacgtttgaggtcgcatggtgctccaaaagtgctagctcttgaaatgaaagtggcccctgcccctgctgtaacactttaaaaacttagacgcgctacagtgattttctaattgatgtgccacctctgctaatcaaaggattttccttaaaaatcgtgccaaattaaaacttttgattcaattactaaacttaataacctttaatataatatttacaaaagtcatgatcccatatttaaactttacaaatattcacaaaatacattaaaatttggtcacaccgcgactacaaaatgtaaccccagatgtctagagaccgaacactccagattgctttgcctcgacatgtacaaacatcatcctagcttagagctcactcctatttagcttttgtctttcctttacctatacatggaaatagtaactgtgagtcgataaactcagtaagaaaagcatataacaaataatataataacgacttgtatttaggcgtccataaacctatttacaaggcttaacaaatgagtaggaacgttctttattagggtatagccactgtaccacatacactatgtaccaaactgtccgagtgttggtagggtttgttttgtaccctaagtaccactaagtattgtaccatgcacaacccttacttttccgtacttgtgctggtaacaccgtaactactctttaaacattataaaccataccaatacactctgtaccattactatactagtgtttgtagtgtacaaatcaaacaagcatgcatatatatcacacgtacatacattcacatttatacaatatattttatgctattcttacctcgttgccgaattcaagtgagttggtcgacttgagcgaaaaacttcatgcttgatggatgccctaatcacataacataaaaaagtaaacgacacaccaaaaccctaatccaggagacccaagcctcaaactaaaggttttgttattaacaattaataccacaataccctaagtatcaaggaatcaaccaactaaagctctgaaatcaacacaaattgacaaaatggattgctcaggaaacctgtcctcgaaccggttaaccgcttttacatgacctagcaaaccgattaaccagtttcacaagacctagcaaatcgattaaccattttgcaccaggtttccccaagcaatccaaatcctacccaaaacatgtccaaaccttaccaaatcttccaaaacatctaatacaacttccaacaacatatttcaagcaatagaatcctgaaatttgtacataatctaaacatgccattaaagatccaaggttgagttttcaaactcaaacttggtcattcaccacatcgctcaacaacatcaacatccagaactcattctcaactcaaattaagcttagaaattgaatcacaactcacccaaaccctaacagccattaaatcacaaaattgcatactcaaacaaaaattaaagcttaaaataacacaaggattagagctctatggttacctttgcttaacaccacttgaattcagctaacatttcttcaatttactccaaaaaaaaaatactaactcttggctggttcttgctaggctcgaataggagagagagagagagagtaagaaaatttggttttcttctttttcttttaatttccccaataacaaaaagctatacttagccgaataacttaaaaatgggcagctaccatgctaagaataagccacctaatccccttaataaaatgacaaaaatgcccttattcttaaaacttaagcaattataagactaggggtaaaattgtccaaaactataaccccgcttaacgtcggtactctatttatctcaaatattaatcctactaagaaaaagattctagacttacccatgtgactcaaacgaccatccatctcattttgcgtcgttgctgagcaaaatcataaaaattgtatagtttatatataatacaaataatacctctagagtttaataaaatctccataattgagaaattataactctagtgcctacttctaataatggaacccatacttaaataaattcttgaataatgataaaaatatcaataattaacgctaattacctctattaatccatattctaaaatacggtcattacacttgttgtgcaggtagggtcggttgctgctatgaactagatggaactgttgtgtgaaagattctgcaagcaggcacctcagtttttttgggaggtccagatgtgataaaattcgaacaatggttgacgattattacataaatactaaactttatgggtgtcaccagcaacgacagagtggcttgtgcaacattccaattctaggaatatgcccttgtttggtgggacatggtggtcctgactcgggatgtcactaccattacctggtaagaattctcggatttgttaaatgcaaagtattatagcgagacagttcatagtgcaaagaggaaagaatttacttagctgactcagaaagataatatgaccgttattgagtatacaacccagtttgatatattggctaggttggccttgagaattatgccaactgattttagtaagtaagaaaaatatatgggtggattgaattccaaaattaaacacaggcttatgatcacaactgatcataacaccacctatgctgatatggtgagaaaagcactgcgagctgagggcacagttgagtgcatctaggagtcccaatggactcatattgttggtggagccactactcctcctacctctgattatggagccactacttgactgctgaccagaagagaaaggcaccatcttgcatctagtggctcaaattagaacaagagtctttgagggaaccaaggtcgagacaaccgtcacggtggttctgaaacctgatatacttacccaaaatgtcctagttgtaagaagcatcatttgggtgaggatgtttcaattgtggtttgcttgaacactataagaaagattgtctacagttcaagaaagaagaacataagataaccgcaaagcccgctccaagaagggtctttgctcttactcaaaatgaagtagaaactagcccctcaactcttacaggtcagctctcggtcaacaactcttacttctatgtattgtttgactctggggccactcattcctatgtggtagccaaaatttttaataattagggtaggtcgtatgatagctatgataaagcgtttggaaccctataactgcctggcggagagtaagttatctctaaaaagtgggttaggtctatgccaatcaaaattaaggatagggagttgtgtcctgatttggcataattgggcttagcaaattttgatatcatacttggaaaggattttttgtcaaagtactcagctagtattgaatgtaagcaaaagatggtgatcttccaacctgagggcgaggaaccatttgtatttgtgggatcagttcaacgatcccagattccagtgatctcggtattgaaagctagagaattattacaaaatagatgtctagggttttgtaaagcccgcttagttaatttggaaattagcagttatttatgttaatcatgaaattatttatagctatttaaataatttatcattgttatttatggaattcagatatgcatatttatgtcatcagcagttttatatttcgcatttccggtgtccggtattttggaactcggcgtt

SEQ ID NO: 299584 - DNA, 1145 bp, Cannabis indica
ctttagaggatattgaggatgaaattcatttctggagctcctttatagtatgctatgtccttggtgctaaccaaccgttaacagtcattgaaggttttatcaggagaatatagaaagataaggtagacaaagtgggaaccctgacttatggggtgtttctggtgcaatttgatttagtagataccaggaataaaatacttaatggcggttatgtggtcttcaataatcgacctgtggtgatgaaatcttgggatcccaatgtcaatttcaagaaagaagatatcaaatcagttcctatttgaattcaattaccagatcttgaactcaaatactggggtgagagatctttgtttaaaatagtaggtcaattgggctctccattgcaagtggatactatgacaaaagaaagaaacaagctgagttactgagggttctcatagaagtttcaattcagcaggatttttctaagcaagtaccctttgaggatgatcatggttttaatgtgtttgcttctattaactatgagtggaagccaatactatgtaaccgttgtaaaggcttaggacactcaactaaggactgtaagaagaaagaaggaataaagcatcattgggtggttaaagatgacaagaggaatgctggtgctggtgcagaaaacaagaagatagtggataatgaaggttttcaacaagtaggtaagtggaatcaatggaaactcaaatagctaattcttatcaagttttggctgataactttaagaatgtcaattccattgctgagatacgggacgagaatgcaatagcagcaggtgccattactattggctccaacagaattgctatagctggaaaaataagaggagggggagatcctcctcttggagatgggtaaaattgtttgttggaacgttcgagggatgaacgaccattacaagtaaaatcaagttaagagcatgttacatgttcacaaggccagtcttgttggtctcctcgaggcgagagttaaggcctcgaaacttggggtcttatatgtaaacatgtttaaaggatggtgttttacttccaatatagaatggcattatggtggtcgaattattgtggcatggaatccttttagctactcggtgaacatactaaaatgtacca

SEQ ID NO: 299585 - DNA, 5931 bp, Cannabis indica
gatctgggttcgggtttggttccaagtctaggatccaagtatgtgagcaaaaatgtaaaatataatatgttagacaaaaaaaaattgtttttgaaaattgaaaacaacattttgatatttttttctagttttttaaaactcaattttaaaaaaacttttaaagattttgccaaacgactcctattaatttttaaaaacagttttctattttcaaaactaaaagcagtttttaagttatgaagccaaacaaccccatagtctcttggattttttctccttttcctggtcaaattgcagattcatataggaatctctttaagtgacaacggccctttgcatcacctttgtggaaggcacataatagagtctttcatgatggttcttttgaattcccagagtctattatttgcatagtccttactgatgttcaagacttgcagaataccagatttcttgatctatccaaggtggacgatggtcaacaggctgccctgttgcctcaatgcagttcatggctcgatcgcttatgcggttgctctggttattaactgggatgaccactttattgatgttgtttcaaacaaaattgatgtctcctctccgttggaagctgagcttcatggtttgttgttggttgtggctctgtgtaagaggtatgcttgggatgaggctcatatttacactgattgccaagtccttatcaaggcgcttgaagtcaggcaatgccctttgtggcacctctcattcttatttgagtctcttattgagatggtgaatgatgttactggtttgagttttgcttagatttctagagttcttaaccatgttgtgcatgaattggctatttgtgttacatcccataattttgtcacttcttttctattgttgagattgccccgtttcttttggatctaaacttccttgtttgatgtttttctagtttgaataaaagtgaggctctaaaaaaaaataagcaattttattttaaattgcacaacaacacttatgtgaagattaaacaactacgtcattaatttcaaatataaaatgtaacaaaaagaactacttcacaatagtgaaaataatttgcaaattatttttaataggctaaaaaatgagtgtacaatagaacgattgtctgcctttaaaagtgctctgtggcagttgtttaccgttttttctttttaactgttttcatctcctcacgctccactaaactgctcattaacctctgcttaaccgttacctccacccttctctgcccatactccaccttctcttttcttcatctacctctgcactaccaccagattcctacacagatccatggacaacttccaccccgatatttcaaatgccctctctaccagagaacgtgcagtaatctccatcaatgacattgccacacctccacctcacccagccacttaccgactcctttgtagaattttttctagcaaaggtcataatcctaaacaactaaaaaacttcattctcactcaatgggttggccgatttgctgtacaatttcggactatgacactgaaaccaactcttatatggtctcttttggctgtgaaggagatcaaagaagggtcctttctaaagagtcatggcacttccataaccaacacatgattctgtgttcaccaagtgattgacaaaatgcccatatttcctcatacaccattactccattttttattcaaatctttcgccttccctttcttagtaagtctgaatcacttgccaaaattcttggtaatttgattggtacttacatagatgttcatgatgattcccttaacgaaggatgggatccctttcttagaatctgggttggaatagatgttttaaaacctcttcttagaggtcagatggtctcttttccatggatggaagatgaattgtggcttgattattgctatgaaaggctcccggacttctgctatgaatgtggaattatagggcatgtgtttgacaaatgccctatattcttagaaaaaattgatgatggcaaggaaccttcacttccctacggtccatggatggaaggctcttccctcccaagatcagcctatgatagatatatgcaagatttttctaaggctgacccttggccatttatcactcggcttgcttggaattccatctcacccatcattcctcatgccaatccattccctgtacttcctgaaaaaataactgccactgaaaaaaaaaaagttgctgaaacaccaaatactttgccaacccactctaacatttctctgcctccttatcaaaaactgcctaaccttattacacaaggaaattctactgttgatctgcccccatcttcttcgaatttgggcactgataaacatgttacttatggcccctctctcacatctccatcttatactacaccctctgtcgaagaggatttttcaaggaaagacaagggaaactcaaaacaaaagaatgtaatcaattgtctaaacatagattcacaacttcagccatcttcaataagtgcttctgtggctcctgtcatgcccacttcccctacttacacacatatggcaccattgcagtcatttacatcaccattacttcacactgagtctgcctctactgttaaccaacctcgtacactcacttcaagtatcattgttactgctacacaaatgactcatcccccccaaaaaaaaattccacaccagcaattgaaaaccgagtatcatctgtgtttgccaaaagacagcttgttacaacaggtggcaatgtaagatttgtcctgaaatgatgtcataccagatcttcccctcaatcgaattcaacaaacaacctaatgcatcagcagcctgatccctcttctgaaatgtccaacctttcactgttggcagatggtagtgatgcttctttggcgcaggctgatgtctagccttgccaatcatcatgaatgtcattgcttggaatgctcggggactgagcaaaccgaaagcattcaaacaactttgtttgctcatttctcaatgtaatcctgatgtaattttcattatggaatctaaacttagtgttgggtctattactaaatttcgttatattttaaagtttcctaatggtattgaaagtcctagagtaggtcttagtggaggccttctttttctttggaaagctaatgttaatgtaacaatcatcaattatggtactaattttgttgcctgttatatggcgtttcttgatggtccttcattgcatttttctggtttttatggagctccgaatacttcccaaagacatgtagcttggaaactcctgaaaaagctcaaagatattgcccctttgctaccatggcttgtcatgggagactttaatgaaattctttcacatgatgacaaacttggtgggcctctacgtgttgagtcacaacttgatgtgcttagagatgctgttgattactgtggattaacgaatttaagctttcaaggggaatgttttacctggcataacaacagtataaatggcatcaatattaaagaaagattggattatgctttatcaataattcatggacaagctctttcactacaccaactgttactcaccttgacttttttcaatctgatcaccatgcacttaagattactgtgttagccattgactcaacctctcctcctctgaaattcaaatcacaatttcaatttgaaaagctttggctgaaggaggatgattgtcaagatatcatcaattgcaactggaacaactcgaacactaatcctggctttcaactgattcaaaacattgttacatgtgcaaacaaacttcaaaattggcacaaaggaaaatttggtgatctactgaagaaaatcaagctttcacaagagaaagtggctgctttgaataattaacataacaccagtccagcacattatgcaaagttacaatctagttaaaatatacatgatgatttacttacacaagaagaggtttattggcaccaacgctcacgcatttcttggcttcaatcgagagattccaacactagattttttcaccaaaaagccagcagtaggtagaagaataacaccatccgtaagctctttgatgaccaaggaattgcacactcgtctctccttggtataagtaacattatccaagaatattattagaaaatttattcctctaatggagttgattctgaagcccttcagcatgtttcttcagtgataccgtgtacaatatctgcagaaacaaatgaaactctttcctgaccttacacagcagctgatgtattttatgcactttcctcaatgaaatctgatggcagcccaggacctgatggtatgtcagtgatgtcttactccaactattggaatattgtaggtgaccttgtcacccgatctgtactagatattctaaatgaaggaggtgatccatcttgcttcaatcaaaccttaataactttgattcctaaggttccaaagcccataatggtgactcaattgaggccaataagtctttgtaatgttctctacaagttggtttcgaaggctattgtactcaggcttaaaccgtacctctcccttgttatatcaagttcaaagagtgcttttgttcaatcttgcctcatcacagacaatgttttagttgtcttttaattattgcactccctcaagcatttaaaaagaggtaaagagggctatgctgccatgaaactcgacatgagtaaagccttcgaccgtgtcgaatggcattttcttgagcgagttatgtttgctatgggtttcaatatagtcgtggtgtcactaatcttacgatgcattcaaagtgtttcctactccttcgttatcaatggctctattcaaggacatgttaatccaagtcgtgggattaggcaaggggatcccctctccccttaccttttcattatatgtgcagaaggccttttaagattattccatcaatgaagaacaatgtggaaatttacaaggattaaaagttcctcgtggtgccccatcagtttctcacctcttttttgtagatgatagcttggtcctttaccgtgccaatgcaagatcggctaatacgattaaacgatgccttgattactattgtcgtgcttcaagtcagaaacttaatcttcaaaaatctgtcttgtcgttctcgccaaatactttgcattcaattcaagcaaacctttagcaactccttcaaatgccaattcagccttgtcatgaacgttacttgtggctcccttcttattctggcagagataaaaaagcactttttggtgagattaaagataaactttggaaattgctttcggcatggcaagaacagctattttccattggtggtaaagagatacttctgaaagcggtggctcaatcaattcctacctacgttatgagttgtttttgcctctctaaatcgatcattaataaattgaatatgaataaattttggtggggttcaaactcctcagataatggaattaattggaagacttggaaagctctttgccattctaaggttgaaggtggtatgggatttaaaagctttgttcattataattaggcactacttgctaaacaagcgtggagaattttttcaaatcctgactcacttctaactagaatcctcaaggctagatacttcaaaaattcttcttttttaaaagcgggccatggttcttacccttccctcacttggcaaggcataattttggggaaagaacttttatctaaaggattgagatggaaagttggtgatggaaacaacattcactgtgctacgaatttgtggctacctggtatatccaactttaagccattaatttttaatggcattgacagagacatgaaggtatcgagcctcatcacggattcaagacagtggaatattgctttgttgaaagtagggttcctgctataagctaagcatcat

SEQ ID NO: 299586 - DNA, 3171 bp, Cannabis indica
tttattacgtggactaattaaatagtgtcacgtgtactgtacacgtagacattccaacctggcacttaacacccaaaaatggatggaaagggctaagtgctaacagaacttgcatttaggaggttttaccaccaaaattttagaattgggggttagaggaaaaaaccttgctactttatcttcaaaaataattatgtctcttcaaaaaaacattctttactttatcttccccttcaaatacaatatccgcaagaagtctcgcatttctcgtctcaaaaaaggacttggttaaggatcataaaacataaaacccctcgacctttcaagatacctaacaaaatagtagttaaatattcttatgtcgagtttattttcatgtggcctaaaaagccttggctcaacttgacaaccacaaatgtgcaagtgtttaatactaggcttttttcctatccaaagttcataaggggttatagatactaaatttctaggtactctatttacaatgtcgattgtagtcttaagtgcttttacccaaagtgatttaggtaaagaagaatgattaatcatgcttcttaccatgtccttaagaattctatttcgtctctcatcaataccattcatgtgaggttaccctagtattgtgtattgcaggacgattatgcattcctctaagaattggcaaaaggtcatgaatgtttctcacttgatctgtcatacctacaatagaattcactgccacagttagacttgacaactttaattttcttacctagatgattttcaacttcatctttgaaggccttaaaaaacgtccaagtcttgtgacttttcatgtatcaagtataagtaccaataacaagaatagttgtatataaaggtgataaaatattgtttgtctttccaagaagttgtagggaatagaccacatatatcagtatgtatcaattataagacgctagaactcatattggcacctaactttcctaacgtttatatgtttccctttgatacattcgacacacacatatcaaggtcaatgtaatcaaggggtgcaagtattctgtctaacacaaatctccctattctctttttagaaatttttcctaagcgtttgtaccataaagtgatagaattttcatttgataatttttgttttgtacatcttgatgttgtttgcaaggttttatcaaatgaagcaatcatattaagcatgtgtaatttatcaattaaagaactagtcacaactgagtagaattaaaaagagactaaattattatcccaaaataaacaagaataacaattgttgtccaaaacaaaataaaaaaaatcaaatttttttctaaatgacaatactacataagtctcctccaattcaataaaatgatcagtcttaaaagataatctaattgtaataattgcttcaactaaaactgatttgcgctcacccacaaggatgaatctttcagtatcatttggcaatcgactccaaatgtaatcttgcatagaaacacttgtgagagtagtagcactaaaatctacccaccaagtattaccaggtacaaaagttaaattaactttaatacaaacaaatgtgaaaagtctacctttcttcatacgccatgagacatatttgggacattccttcttcacatgcccagatttcttgcaaaagaagcaagcctagtccttcatcttgagtcttttgtttcttgggttgtgaagttcccactgcagtttccttatcctgagtcctctttcgcttgtttccttttgaggtagatgaatgatgagcactttcagtcttttctcgcttcactctatcctcttcttgcacacaatgtgaaatgagctcatcaagagtccattttttcttttgaatattataactcactataaactggccataatgtgcaggaagagatatgagtactaaatgtacaagcaagtcatcagagagatcaagctttagtgcctgaagtttggaagcgatgttagacatctccataatatactccataatgtttcattttcctttatacctcatatggacaggatcagctaaaagcttgcttgtcttagcctttgcgttctttgcaaagcgtttttcaatctctttcagtaaaccctttacagatacctcatcgaatagcccctgaatgcttctagaatgatgcgctttagcatcattagacttaagtgattagaacgttcccacttctcaaagtttgttttttcttcagttgaactttctctataagagacgttggttgttcttttttaaaagcatagtctaaatccatgcactcgagaaccaacaaaatattctcgtttgagctcttaaattttgtactattaagcatagatattgagttcatgttggtagtaatattagtagcagaaatagtaactagcaattttagaacaaataactacataagctcacataataaaaattcatgtcataacatactaaaaataatataataaaatatttatataagacaatttttttttaattgtagtggtgggcccattgaaacaagatacctagcacaatattgatgtttatttggacagaaacatcatcttgtaagtggtactctcaacgtagaaatcaaatgctaataataaatcctaacaacaacctttctttgggaagatatattgttcacataaaaactttataattattactcattcattcttgcatgtacatttgttgtttggtcaatcaataaccttcttttgggccgattattgaccacataaataagaaatacacacatcatattatctcaaaataaataaatttagacaaaagaggttactttgacaatattttacttcaattagtttatttcaaaatatgagacatagaaaattaaacaagtacccaattcaaaatcaatgcataaatatataagtaatatatagtatgttactgttgacttcgcttttagccaacaataatgagtctttttgataagcgataaacgatatgttgtaatgagaataggtaataaagcaataataagacacaaaaattttatagaggttcagccccgaacagttcagtaatagcctaatcctcgttatttgtattgacttaaaaataaggaagaagtttcatttttttatagctcttacaataatatctctgaatatataatt

SEQ ID NO: 299587 - DNA, 4564 bp, Cannabis indica
aaacataaggttaaaaaaaaaagccatacattttatcataactacaacatatctgttgaacaaatttttatccacaaaaggctgcacagatttaacaagtggtatgttctgtttttacttcatgaactagtttctatacaccagaaaggactccactcaagggaatataaaattgaaattacatatggtgtgatgctgttttagtttgaaatataacatctgggtttcgggtatgtggacttactgatttatcattaacatttgatgagatgctccataagatatccctaggctggacatttgctgctatcccaagtggggatgattttgtaatcgacttggacctggatttatatccgccatttcttcccataccactagttagaagccaacgggacccagattgtcgttgtgttgtggtgccccagagttgcttattgaagggaacagtatctacaccagcaaggtggataccggtgatttgaaagcggggactatattccccgtctttaactgtctggtttttcttcgtccctaacacctcatctactactggctgaacttcttctgccctctgcacttgaatcaatagaagcattgggacccccacaggctcataattcctaagggaatcccgaagttgtaccaagtgagctatcgtgatattgtttcccaacaatccacactttctcccacgtactttgtgccaattgaagtcttgtttcaagctcccactttctaaatctatgcactcagcatgatgggctgcaaagattttaaatatttcgtcactagcattctcaattacaccaccaacgtttccagcatctattctcaaccactcatccaatgaaatagacaagtcaactaagtcatcgatgttgttaccatcatctgtttcatcccgaagttgtaatgctccaacattagaatcaaaaaacctgttcctacctccagagaaagatatcttcctggtaatctttgggtacgtacaagaaggtggttcctcatctgacatttgagactgcgcttttaagccgtctagtatgagggcatcaatcttactcacaaccaacagagaaacatcttcaagagatgcaaattccgtaggtatctcatcactaataaagtctgatttagtatcattattacagaaacttgattgaaattcataacctccctcccttccacaatgatcatgctgcgagtgaaatttcctgagacacaaaaaaggaaaataaaggcatcaaatgaggaaactaaaagaataattttctagctaatttaataaaataaaatgtactccatgagctcacacacctttcaaattccattgagattggagtgtcatcctgtgctacttgctttattgtcttcccagtaatatcctccaaaggcattaaattactgatctgatcatacagcttgtgggcttcacgaaaagccaaacattgtattatctccataacatcttggccaatttgtacaggtagaacaactgaattggaaacttgaatgattaagctcccaccactcttagcattcctgaaaagtaatggattcatagagcataaaaagcctccatttttaatctgaacatgaggaccaaagccttcttcaagtggaggtagctggtgtcgctcttgaggggaaagctcaattggactaccaaagccacccaaatagctacgtggagaattttgaaagtccttttcattaattccccactctcgcatcaaaacttcagtttctatgtcttcaagaagttttgccttccttctgtttaacaactcacttctcttgtgctcctcttcagcatcttgaattattaaagacaatttagattcctcagagtaatcttgacagctatttctgggtgtaatactgaagccgaattctgactcctcttgttttgcatcaaaatcgtgaaagaagttgcctgaatccaaagcctctttttcgaactgtctccaaagaagctctcttggagaatcgggctcactatcaaaattttttatacatgattcatcactcacttctaacatattcaagaaatccattgccacagactcagcaacatcatccaagctaaatgatcgtttcactgatctatttgctttgtagtttgatttaatttccatcaggatttcttgctcaatgtaatctccaaaatctatggaatccaaatttgatgactctggaatcaacttactacgaaaagaagactccaactcttctttggtcaatctattggtaaagttgcttcctgtttcatcatctttcttgtcatccaccagaatcttgtctacataattcatatagttgccattcttagaataaaaatctgtatcactacccttaatgatctcattcacatcgattatctcaatcgtctcaattgtaggttcaatggacagatcagcaccttgatcccatgtcataaactcttctttttcagacatttcagtccccatttcagtaatgttaaattcagtaatttcacagtcatcctcttccatttcttcagaagacacaaagtcaatatcaaacttaggtttgaattgttccatctgttgagaagctgaatcagtagaaatgctcaagttcccctcatcaagtttctgatacagacaatttatagacttagagagctccaatcctgttctgagcaatacttcatgacaaactttcatatccaaagactggcataagaagtcaggctcataactgacagagctagtaatgctgcgaactcgtgaaagcgtcctgttataattgctaggaaccaagtcgacaccaccgtctattgtactcaacctattacgcgatacattcaaaagttcaggataatttgaaccagtactcaattgaactagtttgtctctcattaccaagaatccaaaactgacatttaaactagcacctttagctttccctgaaagattaaagcttgttgtccatttaccactacttttctccccttccaactcctccatagtacgcggtaagaagctagtgagatcgacccattgctttccaatatccaaactaggactctcaaccagagaagcataaaggagtaaaagcttagaatcatatttcatcggatggttggctccaccactactaccatacacagtacatctgtgcatcaaagtttcatcgaattcagccagaccttgagagactctcgacggtgaagtctgaatcgcatcgttcttcttcttccaatgcacacaaagactaagattttcaagagaggagggcagcccttcaatcgaatggacatgaagataaaaacaacaatagaattttctgtcgccaatgtgagtaagagctttcaaaggtctcttccaattccataaagacgatttcttatccttatatgacacattttctctaggatttttcagttttaagtccgattttgattgggataaatgtattcttccacctactttggattgaatttcattaggagagggttttggcaagtaaagggctttgctaatttcctcaatgtctcgcaacaacttgccattacttgaatcccctggaccattatcactataacttctactatctagcttattcaacattttatctcaaaatccaagtccaatctagcataatgaaccaaaaagctcagattgttccactcttagaaagaattttagaaacttcaattccatgcaatcgtttggatcaccaaaacttggattcaactaagaaaataaaaaaggtatgacttacaattaaaaaaaaaccactccagaacaagatttcaatgataaaaacacaaaaaaagaaacaattatcaattaatcaagatccaaaattcatcacttcaaacattgaactgagaagtttgtgatactaacctgacagaagctaaaatctcttccgtcaacgaaattggataagtcgagacaatgaagaagaagaacaaaaaaggtagtacagtggtgaacccaaatggaaaagaaagcactaataatattattacccggaggaaaattaggtcgggaatctctgaaaagtttccgggaaaatgtggaggacgccaagtgcgaatgatataaatatatccgggaaaaacgtgaaagcgaatatatgtatctaaggaagagaaatgctaaagtgcttacgacttgtcgtatgactactaataataatgattatactttatgttagactctaaatgaataaattgtaaaggctgtgaaagttgataaatatgtaattgtataattattgtataatatggaatgagataatagaatttttgtttaggagattgacattgtttcgaagagtgtattatttagagtttgacactcacttgaagagtgtctcgatgtaattgatattgtatcaattgatgctttcattgaaagaatctcaatgagagatttcatcgagagctctacaaaatgaatgacgaagagcttcacgaattcgtgagatctgtcttgatcaatagacagtaccaaactttaaatacattcttcgagacagtatcaatctcttaattgaacaaaagttctattatctcatttcatat

SEQ ID NO: 299588 - DNA, 1911 bp, Cannabis indica
taacaaaaagattcaattgataatttttgtaaaagagagggtccaaaatagtatttacccttcattttgggcgtctaatctaacatatattaataaaatttaaacataattatttagttttttttacacgattaataaatgaattgcgtttacatttaacaattacttagtaatatacacttgtaaacactaattgatacccctagtttgaggagccataatttttcaaaataattatgaaattaataaatagaaagaaaaaagataacgaattgaattaaagtattaacatacatgcaaaataaacacaacactcgaaagaagaagcaaaaaaaaaaccaagagaggtagctgtatgtatgaagcgtgaatttaaaaggagagtcggtgttgtttgacaggagaatcacagaacaagatgtcccaaatctcagagaaagcttcgactataacaccatggtactggcgcgaattcagagtcaagaagcattgaagaagctcctccaaatcactggcctcgaacatctgcttctccattatcatctccaacattgacctcttgaaatcttcgtacggatcctccgatttcttcactactgctacgctttccctcacctttgttacctccaccacgtcaccggctgttccctgaaacggcaccgttttgaccgatcctttccgattcttagaactactactactactaccggtgttgcaattactctggctcttcactctccgaattctcgaatcttccacgaccttctcctttgatcgaactctcggaatatcgttcggtatctccattataatcggttcatcattagcaacctcattcgagaagcttcttgaagaatcgagaaggactacgctgtcctcgtcttcatcataatcgttgctgctgctaaacgaaacgaagtctctacggtaatcactccgagcttttgatcgcttctgcttcttctcattctttctcttcttaacgaaatatttttccgtcacggcggacgacgacgacgttttgaaattgcaacaaggcaattcggtactgctgcagccagaatagaagtactgagcgcacgtcgtcggcccacagccgtccgatttcatcctcgatgaagcggcggcgcgtcgcatcacgaacgagtactccggtgttgaaggcggaggtgccggtagagtggacgggtagccgatgtcgaaaaccttcgggtttaccggcgatggccggtaaattaccggcttaggattttctggtaaggatgaagggtctttggaacgacataattggaaagatttaacattaggaaatttaagtttaaagcgcttagacattttagtaaaactagaaaacaaaaataaaatgatagaagaaaattagcacgagtgtggtgaatatttttagttaatgctaaattattatatagtaagaataagataccaagccggccatattgtgtgggaccccaaatttcatgtcatggtattataatactagctgacgaggactgaatccaagtcaccttggaaatatatatatgtatatgttcgaattatacatattatcaataactacatataataactatatatatatagtcaataaattaatataggaaaattcgataatgcacacccttaaaatggatatattgatgcacctctatctgttttagcatccgaaataattttttagtcaaattttttctcatgatcatgtacgttatagttatttaagacattctacaaaattttaagaaatttgaaaaagtttaacatgccgaaaattatgttcaaatagtgtgcacgcgtgactattttattttatacgcgtgtaaaatagactgtttgaacattgttttctatattgtaaattattccgaatttttcaaaattttgtaggatatctta

SEQ ID NO: 299589 - DNA, 1871 bp, Cannabis indica
aaaaataattaagatatggaaatttcacgtacttgttgttaagaaggttctttacggctaccacagacccatcctgcaaaacgcctctgtacacaatcccgtatcctccttcaccaatcacattctcttcggaaaattcacgagtcgcaatctctagctcctgcaagctgtaccaccggccccaacctatgttttgcgattccaccgctgacttgtcgctgcggctcccgccggaagtatcgctcccttcgctgacttttcccctttcaacgacatcaaccctaatctctccagcgctacccttctcctcctttaattccaaactcccaatttcggaccctgccttcacaaaatgatccaactttttgttgaccgttccattggaagctttgatctctacgatctccttcgacacgagaggaatggatccggaactgtgcttcacgcgcattctgcgtttacgggaacttcgattcgtacggatacagtacaagatcataagtactagagcggcgaaaacgcaaagggacagaattgcgatcaccacgtagagcttcaaactgagaaatggcgtcttggagttgagtttttgagtgataaaattcccagaagcttcagcgtcgccggaattgcttccggaaaccggcattgtcaccggcgaggattcaaaagagtgagaaaagttagtagagaatattttctcgggaaaatgagggagatgggacctcaggagagtaaaataaagagagacgttagaactggtagcattgtctgatagagatagatgagagagattgtgattgctgtttcaacggatacagagtgaagaaaaggaagcttaggagcggagcgacgacttatagttatttgggtttgtcttgttaaattattaccataatgccattatgcttttatttattttaaaataattagcattttccaatttttttctataataaactaaaaagtgcatcattttatatttataccaattaaaaataaacacaaatagaaaacaaaaatttctatttacaaaaatactggcctaacaaaaaaaaaacggaggaagctcctccttcgtgagccagccgaaacacctcaatccaccaaatcaactcaaaccaagatgtagatcttaaagaaaaagtaatcatatctcaaaaaatctaaatacaaaaagggaatacaagaaaaaaaaataggagatatattgacatccattggtgtaaaaaaaaatgcaaaaacaacctacaaataaaaatttctaaatgatcctcttcgtaatttttattcttcataattgaaaatatgttttaaaatgagaaaatcagccaaataattaatgatataggaatttagtagatatgaacaaataatcaataagggattacagctaaaaaaatactaatacatataattagaaactacaggttttttatctggaaacagttgtatgtatgttgttttctaggaatataattgttgtttgggtataattgatcaagaattattgaatttaatcttattaaagattgtatacttcaaaatagttgtttaatagttgatttgacagataaaaataacggtttagattaaaatgttatttgcaactattgacactaaaaacaattgtttattagttttttttcattagattgaaatagttatttgcaacttctgaaactgaaaaaataataaatatacaaatttcaggacatgaaacctctacaaattttggtacagagcaatgaccattgggatgacaacaaaaactacgttgaatatgaatcaagtggagaattgctatccagagattggacttttgatgaactagagaaaacaatgatggaagaactccaacgcaaccctga

SEQ ID NO: 299590 - DNA, 2063 bp, Cannabis indica
ttaatatttatagttaaattgcttagtaatcatcaatggacaatacccattaagaagtgttctatatatacataggtgcagattggatttgattgactacatttactttgcggaaaaaaaaaacttttaaatatgaatcaatatctaattcgcacaagtataaattttaaaatttccaatctaattcaatctgcacaagtgtagatatttgtattttacatattcgattgaattgtgcaaattagtttgaattatgtattttatgaacactcctatgatatactaagaaattcccataaaacttttaacttgataattattatttttaaataatttttatatataatttaacctgatatgtaattattaaaggattgaaggtagctcgatcctctttccaattcagccaaaggatccatggcgagttctatatatcaatggtctccttgttcccaatcaaaaaacacatcgcattccttaaaagctctaaggaggcaaaaatccccttggcaccaaaggaagcagccgttagaactttcgaggaccaaaacaacgttattcccaatgctaatttccacccaagtttcgagactagggaaaggttaagatcctcaaatcttttcaaattaagaccaccccaatttttagggagataaatggagttcttgttcgtaagagccaagaaatgagacttatttgaggaaccaagccaccaaaattttccaacagcttggtccaaatcatcacaaatacctttgggcaacaaaaaggttgacatagtgtaaatagaagtgctcatcgccaccgatctaatgagtgtagttcttcccgtttgggagagaagtttttatctccattcaaccatccaaccgagcaatcaacctatccttgataaaatggaagtcattggttctgttgttagtcacaaatattgggttcctaaaaaatttatcttgatggctcatcatccaaaccaagggaataacaaatgcagtcaaccatatccaatttggtattctttaagtatacgactggtgatttggccacattaagccttggacccaaccatcataaaatgtgacatactactattcatgcaaatcattatcgggtcccacacattttaatttcataaataatataaaaaactattaactactcataatgtgttacatcggtatgatgttgggtaccataaagtacctaataacattgatagagagctaaacaaaacaaacaatactgagtagacttccaatgaaaacttggctcgctcaagttcttgaacactcatgaacttgtttcacacaagtaagctcctagagagcagttttcatgttttgtttgatgtcattgctccattgagccagagttaacgaaccaaatagaatataatagaattctttataagagatgattacgaattctttattaataattgaaaattattttacaaaataacattaagaaaaataattatgttaaagtagaaaagaaaaatgataaagtatctctttattttgtcattaaaaaaaaattaagaatcttaggtaggttgtgttagggtaaggagttttcgactgtttcagttggtgtcttcgttttaggttgggaactgagtagcttaattaggcctgttctcaactcatggcagcacacagaaaaatatttagggttctaaaaatgtttcaagtttcttctttttctcttctaatggcagctagggtcacactagggttcttggattattgggctttctaacttttcacagcttattctttttcttactgctgaaaacaaactacgtttctaatgggttcaaaaattctttcctttagggctgagcgtttaacctgctgagccaaccaaaccagccaacccaacccaattttgggccgaaatagtcccatttttattgggctgaaataaattgggttaaaaggcttacacctcgtggtcattgggttggtaacggcttgttgctttgtaacccatataactcaaccccagctgacccactagatattatttaaaagggaaattttcataaatatgggaattga

SEQ ID NO: 299591 - DNA, 2042 bp, Cannabis indica
gttaatggaaatttacaataatttcaccacctaaaatcttttgagtatatacgagcgttgcaatgttgattaaccatgagcaacgacaagtcgtcacacagttcaagagaacattttcgatccaaaacgacactttacaatcaaattatctttattcattttaatgtcgtttttagataggatgttgttcatagtggtatactatgaaccttaacataaaaactaaagctgaaaaaatggagaaatacacaaaggaataataataataataacaaactaaaattaagattataaataaggataatctattccaaaatatatggttgtccacaacaaacaagcaaaattaaacaaaattggaaatcctacaatcagcaaacaaaataaaaaacacaataaagaactatagctgaaattaagactttcttcttagacaatagcattggcagcacttgcaattcttggccatagatcagcacactcttttccgattggtccagtaatggcagaccctgcaatcaatcaccaaacaaaattattaattccaaactcagaacatctctaaagtgaagttacaagtgatcaaagtttcaatatctacataacaaacccatcacccatcaatgatcaaaatgtcttttttcattttttttcaagtgaaagtctcattcactattacaaaaatctgatcaaactagcaaagcatttgtatattatatataacactaccatctcccatcaattaagaaaatagcttttttttctccaagtaaaaataaaagtcccattcaatattatatgaaccagatcaaattaataatgcttatgtacgtattatgtacataacaacaccatctcccataaaagatcaaaatataagttttttaatgtagtgaaagccacattcaacattatttgaatctatcagattagctatgcttctgtgattataaatattaaaagcataaggatgaaaatcagattacctttcatttctcccttggggttgacaatcacaccagcattatctgcaaacacaatatcaagttcatttgattagaattatgaatcactaaatgaattctcataataacttaataaccatactattaaataaaacaactaataagaacaaaatagttatatacgattaaacatggatacaagaattgcagtgttaaaattcaaaaccttatacacttcaaaatgagaaatcaaacaaagaaaccaaaacccaattaataaaaagatcaaatcatgtaccagatgacaggtaacacaatgctattgacaaaaaccattatgctgtttaaagctggtacttttaacaaagctcaatatatgcttctcaaaacaaatgaccaaaacccatgatttggtcactcagattaaattcagggaagcaacaacaaaatcaaaatacaaaaacaaaaccctaattctcagttcaacaaacgataaaaggaattatattataccttcaaagtacatgaagacaccgtcctttcggcgccatggcttgcgctgacgaacgatgacagcaggaagaaccttcttacgaagatcaggctttcctttcttaactgtggccataaccatatcgccgacacaagctgaaggaagacggttaagacgtcccttgatccctttgacggagataatgtagagattctttgcacctgtgttgtcagcgcagttcaccgtcgccgccacgggaagacccagcgacatccggaacttgtttccggccgatcctccccttcctcgcttcgacattttcgccttcttcgctctccaccaacgcctccactgaaacgagggtttgtaaggttgtggctctttatatatactcgcccatttggggctagggttttgggctcattttgtcttgtcaatggctatacgacgccgtttttaagtcacacacatcatttttatttattattattttttactaatttactaatttatttttggaaaattatccaatagactattttttttaacttttttttcaaatttacgatttggatttctaaagt

SEQ ID NO: 299592 - DNA, 2499 bp, Cannabis indica
atatttaacttgtttatttttataaaaccgtttaattaattttacgaaattgtttattttgaggtttaataaacatattaaaaatgtatggtttcatgtaataagttttcaaaatgtataaatttttaaaataattttttttttgcacattttttgtaattattttatttttgttgtacatttatgaaaaaagccctataattttttaatcacaaataatttattgttattaacattgcaatcaatgcactagttgcattattgttaagcttaattaataattttactgagatattcctcataggtgagtcctcaaagaaattattgattgttaatatatttttagtttctgtaatgctcccttaaaaaaacaaaatcagtaatattattttaaaaattgatgtaaatattatgattaaacttgctttacacaaagaaagtggtattctcttaggttggattttctcttaataaaataaaaaatatatcatttgttcatgattggaaattctatggcttcaatcttcatgaaagaatacatttttttcatatgatggggccattgctctctctctcttctcttttgtcatagttttcaaatgtttaattatatataatatatataaatatgtataatcatccaaatagtttggaatatctatagcagggcacatcatacttactagataagtttgaaaagaggcatgtttgactatacactaattaactaagcaagtgtaaattgacttccatttccatccacacaaattttctaagacaaagaaaaatctgattgctcctgtagtaattttgtaaatattaaggttaattaggatttttatcccctaaattttaataaattatgttctctaaattttttttggctgttaaaaatttctcttgaattattgagattgtaaaaatcataattagccaaatattaatgatacagcaaacaacattttctcggaacccacatatgggttttttagtgaaaaaagcaaaaagaaaaataatgttttggaaatgttaggaaaaactaataaatataagaattttgttttgtcaaagtatatttttgataattttaatcatatttaaattatattttacacgtcaaagaaattatattttaaaataattattacctagacaagtgattagctaacatgtttgaatctaaccatcctaattagtacttaatatagatgtaggagtgagagaagtaacaaaaatataacgtttggtagttaagtaattcgtcgaaaaaatggtatataagtgtataaaattaataatatataatatttatgccacaaatatctttattataaatagaagaattactctatatattattttttttaactttattttttcaaattcatggtttggattactctagtggtttatatgtgagttgctatgtgaattttggttgcgatttaggttgctccattaattgctatggggtctatgtgaatttccgtaaaaatacaaaaaaatccttataaataagttgcatgaatattgttatacccaacattcgactatgtgccaaaagctaacacgtgtcccacagattgaatgtgaatcaacttaaagaatataataatgatgttgtatcattaaatgtaattaaataactcgtatcaattgaatataagtttgatagataatgttcaaattcgttgacttgtagtcttattcgagacaaggataataactattaaactagtattgacgagacatatgtctgcctcgggatacacttagatagatatacaaggagaggatactcaactactcaggtagattaaaagtgacaacactcaaccgccttgcatcacacagggcgtgaagatcacctcacagtattaaaataccaataaagggatacgacgagatgaattatttttcaacacttaaaattttttatcatcaagatggacgagaaggagaactcatgtctaacgagacacaaccttccaattcagcgtaaccgtctaatggataaaaataaagagcaattgggtagttattagatattatcccatgtgtgattgaataaaacgtagggattgttcacgttttattagcagttataaatgaatcaatcccaaaagaataattgttaacctatatttctataaataggggcagaattcaatgaaaaaaaaaagcacaacaaatttgagagagaaaatattgttattattcaaatattaatattgtattctgcactccgaaaaatattcctaataataaggactcgtggagtatgtagattttaactacaaaatcacgtaaaaacatcttagtttttgttaatgatacatttatttctgtagtatatctattacgaaaaggctattaatttggttaacaaaaatctgcgttaacagtttggtgctttcattgagagccttggtgataaaaacttagaaaaatccctcctcataaacataatctacccatattcaatggttgataacaatc

SEQ ID NO: 299593 - DNA, 1901 bp, Cannabis indica
agtcaatcctgagtatgaggactgggagcaacaagataatatcctcgtgtcttggcttctctcttcgatgtctgaaaaggtactcacaagaatggttggatcggattctgcagctcagatctggattaatctttgtgaatactatacttccctcaatcgagccaagatcggacaatacaagactctgctgaggaatacaaaaatgcaagcttctctcaatgactatctgctcaaaataaaaagtgttattgacactttagcctcaatcggtcatcctacatctgcacacgatcatattgaggccatttttaatggtctccctactgagtacaatgtgttcatcacctcagtcaatacaagaactgatccttatagtgttgcagaaatagaggctctaccacagtgtcagctctgccacaagctcaaacacacagttcaacaatgcttttacgggttcgataagtctttcactgggccagagtcatttcagaacattcaaggcaaccacagtgctaatattgttgagatccaagcctattatgcaactcatgaaattgtaaatgaccttgattggtacccggactcaggtgccacaaatcatctcacccctaatgagctaaatctcaacactagcaatacctatcttggtgaacaacaagtgcactgggcaatggaacaggtttacaaattcttaacactggtcaatcttcattcatttccccctttcattctcaacatttgtttttaaacaatttattacatgtgccaaccattactaaaaaccttcttagtgtctctcaattttctcaagacaaaggtgttttttttgaatttcacccatttcattgtgttgtgaaagatcatgtttctttgaggactttacttgttgggaagcttgaaaatggcttgtacaagtttgactctcaccagctcaatcttctcaactctcataacaagcaaccctccccttctccaccttctagttccaagactccagttgcctttactcattgtaattcaagcagtttatctgatgtacatgattcctttcccttatggcataaaagacttggacaccctcactataggactgtccaacatgtactcactgcttctaatatcaaaaccagcaataaaaacaatgatttctctaaactgtgttctgcttgttgtcttggaaaacaccacaaacttcctttccccacatccaccactgtctacactacaccattgcaacttctacactctgatttgtggggtcctgccccaattaattctgcttctggttatagatattacatcaattttgtagatgctttttctaggcacacttggatttacatgttgagaacaaaaaatggggcacttaacaccttcatcacattcaaaactcaagttgaacttcaacttgggttacccatcaaacaaattcaatctgattggggtggagagtatcaagctttcacacaattcttacaacaatctggcattgttcacaaagtgtcttgtccacacatgaacaaaatggagtggttgaacgaaagcataggcacatagttgagagtggattaactctactagctcaagctagtatgcccttaaaattttgggatgaagcctatagatcggctgtgtttcttattaaaagaatgccctcacctcagctcaatcacttatctcccatagaaattctctgttcaatatcgaacctgcttatcactctctaaaggtctttggatgtttgtgttatccaaacctaagaccctacaacagaataaagatgcaatataggtcccaaccttgcacctttattagttatagttcttccacaaaggctataagtgcctatctaaggatggtagagtgtacatctcaagagatgttctctttgatgagaacat

SEQ ID NO: 299594 - DNA, 4207 bp, Cannabis indica
attttagtaaaaaagtctaccatagatggaagttcagggaccataatttaatacatgtcaaagtttgagaggcatgatttagtagatctcaaaatttaagcatggtttagtatataaatgatcactaaaatagtaaaattgaataaaattagataaaaatctttaaatataacaatctcaatagttgagggagtatttttaacgaccataaaaatttaggggtatgatttagtacatgtcgaaattcaaaaaaaaaaatcataattatataaaactgcctataacaagctaggcaccctttaaactgacccttttttctttaggggttagaaaaaatggtataattcaaatggtaataataataattttggtttaatgctaaagtaatggtaataataatctctttttcacttttagtggagttagattaagatgtgttaggtaactaattataacacaactagtacttaacatatatattataacaatatagatatagacaaattattataacgataggtaatcttatatagatacttttttacacatgattaaaatatattattttatgttgagagatttttcactttctttggcctctaccattagaaacatatttggtttttcttctttttgattcagtggataaatgtaatttttttaactatatattggctgaaatttaactgttatataataagtttcaattataattttcaagtatcaaataaaaagtcttacatataagaaaagtgatttgccaaggttaataatttttggattctatatacaatatacggtcacaatttgaaagacacatatttgtagacaaaaatatggcatatcagtccttatattctttaaaacattttaacatttctcaaactctttactactcagcatataaatatatatagggatatgattttgttccgttattatactttcacggattgtaatccgcaatgtacggtagccgtcagatgagggaattatttgatatgacggctgagattgatctaagggtaattagggttaaaaaataaaaacgtagcctgacactcatttaatgtacactgagacccatctaatgtatcacagaatacattccctgaaagtacattacgggaaaaaatcacatccctatatatatatttggctaagtttctccttttaatttttgtccttagaacttttttagttgaatttaaattttttagtctaattatattaagaaaagtttgatgtgaatgaaaaatttaaaagcgcaattccgtgcatgtataattttataaatatcaaaggttgaggtgtaagatttaatatataaacaaatcattatactagtaaaattaaataaaattagacaaaaatttttaaatctaataatttaaaattttttaacaatttaaaaagttaaaggtatcatttgttaaatgttaaagggtatgatttgttacattcaaattgacttctattaaaagagttgttttagagctaaaagtttcactagttaacagaaatgcttttggagctttaaaagctcaaaaacagttatatatatcactatcccaggaacaagaacaaccagtctaggcaaactaatatatgttgtctctattatactatatattctaaagttagagagtattaatctagctaataagaaaaacaaaagtacaaaactagacataccattttcaataatagcatatatataccttgtagattaaatattattaacaactaattcataattataaaaaggttaaaggaaaaaagaagaaattaaggtttaggtggttacggctcacaaaactccaattgggatcatatataggtacatacatggctcatggaaggagggttccactcattaagtctagctagttatacaaattataagtcaaaatatatgtatatatatgtgtacataaggcaaatccaaatgcaaaagttatatttatgttggtctattttgatcaacactgtttgatggtccacaaacacagttatttaattcataattttaattttaatacccaacccaacctatgtatcctttgcttatacacataactagtcaactaccccttttctcagacagtaccccatgttaccttattctctatgcacttttgtttttcttaatttgcagttgacaattactcttaattaacttaacccaattttaactttacattaacaaagataattataaaggaagcaatttcatcgagattggtatataagcatttatgtctctgattcagatgtccatcattgttgatttttttttttaattttaaataaagggagatattgtatatgtatgtaataaatgtgaaggatatggtatattagaaaaatgcacccaaaaaaaaataaaattaatatcttatcttcaaaaagggtatcacaattcacaaaaaacaatttgaaacgtttcgttttaatctctattattttcactgattcaaatctaaaaactgtaaaaagaaaagtggaaaagtatgtaacatttttaaggcagtaaaaaaattaaaagtagataaaaaaagcttttgttgtttatcccactcaataataaaataattaaattcaagaaattgtgagtttcaatgcaaacggttgtagcctacacgctcttccatgattaaacctttggctgctaatatgattggcccactgacgtcattaatccaataaattctacttattaatcataaaatttgggattaattaaattttctttctttacaacaaagtcagtgcaaatctcttccctcctccagcgttattcccgttaccgtggtctgtcccgtacactttttttttaattttttcttaataaaataaataaaagaaaacaattttctttgtttaaaggctgacaaaagttatttatttatttattaatccaagcctttgattatcaatctgagcacggatgaatctatgccacgtggcgaagactgcatgcataaaagtaacgtacaccgtcgccacgtagagatgattttgacacgtggcgtccgacggtggcactttaataacgtgttaattatgattatggtaagccaaccccctcgtacttcatgcatttacctccaattgtccaaaaccagacgtgggttagtggcttggatctaaccgtaatttttcgccactttccgaggtcaatttcgtcagaccaaaaagtaccacacttccagttttattttattttattctaattttcggggatgttaaaaaacggcgtcgtttcaaagaaagaaagaaatcctaacattctccctaccctaagccaacaaatatacctttttttaattccgaatatgccatgacacgtcatcattaagtacccggtgggcagtgtggggaaacacggtaatcgaagggtattttcgtcttttcaggagtctagggtctacgctagaatacggtgtgcttcacctcaagtagtatttggagttgaaaaagaaaagaaaagattaaattcaaaaatttgaaataaaataaaaaagtaaaaaactgtaaaaggggtccagagggtcactgctacttgacaaaattaagatgggttacagtcaatgaatcagaaaatgcagaggtcatacagctgggtttagatttgattatctctcctcacagaaccaatttagcattttattaacactaccactgagtcaactcggtcataaacccgagtcatgatcaccccgtttcaaacaaaatccggtaactcggacccttgtctattactaataataataaagttaaaaagagtaactctcatataagggtcaatttgtaaaggtatatttattactcacatcttaaccacaagtggggtcagaaacttaaccatggattaattagaactagggttaaaaaaacaagtggttaagaaggacaaccacaaaaccaaagatttttattatcaacagtcatcactgctcatcatcatcatcaacatttctctccttacttttcttcttctttctcttttttctctttagtcaactaaaaaaaacttcaccattttctctttaacccatttttctttatagggttagctattatatgaaatggtgatgactgatcatatttataatctacacaaacatctaataattctaacacacccataaaaaagcagagaagacccctcttcttctttctctttaatttttatttttatttt

SEQ ID NO: 299595 - DNA, 4644 bp, Cannabis indica
aacaccaactacgggttcaggtctggggttcgggaccgggtccgggtctgggtccgggtccgagtccgagtttcgggctggggtctgggtcggtgtcttgggttcaggtccgggtccgcgttcgggtccgcggtacgggtctgggtccgggtccgggtttgggtctgggtccaggtccgggtccagagttcggggtcctagtccgggtccaggttcgggtccgaggtctgggtccggggtccgggtcgaggtcctgagtccaggtctgggtccggggtccgggtcggagattggtgttgaccccaaattctttgtaaatattgtaatacaagctaatacgtaccatttattatgtattaaataatacaacatacattgtatttggtcgtaataattaatacaatacattgcttaatctcaacatagtgttatttattattttatacaatacgacccttatgcggcgtactactacaggtatatgctaatataaaagctgatgatatttgttttgattattttattaaaccacatataaaaataacaataaatcgtccaaagaagctagctaccatttgttcgaacaaatgaaaagaatagctaactactatatatgagaaaagaaagatgaaagaagaaaaagggacagttgtgtttcaaaaatgatgggctacaaattatggtttctaaacaaaactatatagcattgtatatggattcttctatacaaaaatgaattaatctaggcagtatgtaatctactataattatccttctcatcatcccaagtggaatccagaatctattcttccagcactaacaagtaagaatctcattctttccattaaaatttctttctttcttttccacatgctcttattagaaaataatattaactttttttgttttgtttttttcccttctcataacactattcttccattaattaaacttcctcatcaatactcattcatagatcatatcaggtaaaagaaacacacccttttggcccccccaaacctttttctactatacctcttttgtaattttacactattctacacgcattgggattttcatcactaaaaagtgatgtgatatttccaccaccattactgctgttgctgctgacattgttgttgttgttgtaattataataatactggttttggtcttcatagtacctctcaatcctattctgataatgatgtgtttgagaaggttgttgtggctgcggctgaggctgaggccgtggcggctgtggtggccggacatactcatactctgtcacatatggtgatggcttgtatgtgttgtaactatgtgtcacataaactggtggtgtcacaacaactggctcatgatgttgttgttgttgatgatgttgttgttggggttgttcttgtccttgtccttgcccattatggtatttgttccaataactattactattattatgattatagttacttccatacccttgaccataaccatatctatagccataatgatcaggtggatgatggtatatgacatgaacctctgctccatcgtttggtggtcctcctgatgatgaggatgaaacctcatgatgaattggctgacctgcattattattattattatgattattatttgcagcttcagaagatggttgatgaggctgatcatgtggttgtgatggaggaggttgattctgattctgattctgatcatgatcatgattataatcaggtggtggttgtggttgaggtggtggatggtcttgttgttgcggtggctctgcgagcgggtccgctggctccggtggggcctgatcagttggtgcagctgattcatcttgaggtggtggtggctgtccattattgttgccatgatcagcttgtggtgatggttcttgtgttggctcctctgtttgttgttctgtgtgagaaattattgtagcaatctttcttatctttttaatggctttgattatcttttctggatctgcccaaccaactataatcaacttctgttgtgggaaatcaatgtagagatcatatatacctgtaaaaaacaaaaaataaaatacttggaacaaaaaataaaatgaaaaacacattgtttgtttatcataaaagaagacttaccatttatgccattaagtgctttcttaatcttttgaacacacccattacagtccattcggacctgtatttctgtgactcgaggtttctacaaatagaaaatgaaaaaaacaaagttagctagtgtttaatgtacacatcattaatgcatgttatgtaataaaagaaaaaaattcatatagtttggaaccatatatacatacctctaattcgggtaccattttttttcacctctttcttttctaattttcttctttgttgttataatgtgagagagagagaaagagagtgatatgtatagaagaatcaaatgaaggttggcatttatttgtggaaggctagaaaggaatatatgaaaggcaaaagttgtgggacatgaaaaaagaatctctttacaagaaagggaagagaaagagaagatgagagaaatggtgcttcatcacccttaagaagtcattgtcaaagctcaaagggttgggttcaacaaaaatatacatataaattttattattttattttttattttattaggggtatgaacgtttcaagtttgaggtaaaaggaattttttgctttattatggagattgtgttatccctgtaaataaggggtggtggtataatgtttagattattaggatatcaaaaaccgaccatagagaaaagaaagtggaaaaagactattttttgtgtaacattattatatttttcatatcgatcgaacgatcggtcaaaaacaatcaaagtagcttttattaatgttttaaaggatatccactcttatagatccttttgttacaagtaaaatcactaatcacaaacttggacaattattattattattattatggaaggcttaaaaaccctcttacgtactttttatgatataaggttgatgaaaaaaagaaagaatcttttctttggcatttgaggattgcactctaaaactttatcttgtttggtaatattgattgagatttctttgataataggatatgtaatgagattaaaaatttgatgctttagttttctaagattctctacttgttaggaatttggccaaagtttagaatataagggagttttaatttgttatattaaaacacaatatttctgattttcatcgattataaaatatagttgagtgaatgagtacgtacattttttgagttttcaatataatataaatatataacgtactccataaatcaataattcattattgaataaaaaaaacaagtaaacatgtttttcagaatctcaaggctaaaaaggtcaatgtgttattcttaatattttagataagataataaaattttatttcaaaactaatcagcaatgtgaaaaataattaactaactctaatactatcaaatgtttttataacttttggtttgagcttaatttatgtcatcaataataagcaaattttaatccaattgtatcatattaatatggtatgccaagttgtcaatatcacacaagtcaaaaggcttaggaggtcattgacaagtggtacatggctgcctttttttttttctcttcatagaaatgacaatttttgatgctttggacattcgattttaaccgatctttagaaagttagatcacagtgaaaaagtaaaattatcacaaaagttgctaaaaatggtcaacttcgtttagaccaatcgtcacccaccacgtgtcacttagaggctagtttgatgcatggttcatggttggtataatttattaattatttggttgaatttgagctaaccccaccatacacttgtgaaattggtcttttaattggtaccgttgatcgaaagtggtcctttttttatgagatatttcggcaatggtatcattttaatttattttttttttgaataaaagccctaattggcataatttcttttctacatatatataattttattttatttttcttagagaagagaagaaatggggaactatatattttggaacaaacaaagtgggaagtgagaaccaaacaaaagttgagaaaagaaagtaaaatttaaaaaactacacctcataagccatgacatttataaatataatttaataactttcatttgaactcgtgtgttttttctttatcttcataccattcatttaattgaattatataacttatatcttatcgttgtgtacatagaatatttccatttgtggtacacaaattccataaacaaaataaatggatcatagaaaactcatgcattattgttttattaattgtataatctatttgtatacacatattttataggaattatttcacaaatacacaaaaacaataaaaaaattacaaaaatatgtttgtatagaattttacatttttatgattttttatgattttatttacagaaatacgatattttgatgtatttttatttgtattcttgttaatttgttaatgattttttgttatgttttgatgttgtttagatgttatttttttattacttttatgtagttttcttgttatttttataaaataccgt

SEQ ID NO: 299596 - DNA, 1312 bp, Cannabis indica
aaaattctgttattcaattgatcctcagtgcagtattcccaaaattctgttattcaattgatcttttcacatgttcttgcactatgtggaatctagccagacgatccttagtttaagtctattttggatagccatccagtctaccacaaaatacttaggaatattaaacctatttcatacctcattgcactatcaaactcattttgaactgtgaattcatttctctgcatttttccaaccaaaatcaaaggaatgtcgatcttaaccctcaaactcctactaggtcacaactccaaattcatctaaccaaatattgctactctgcaagttgcaacagctttgaatcctcctgttgcaataaatccctttagcaatacccttagtcaacctttttcattgaagcttgataggcaaaagttcaccttatggaagatcatggtctctaccttaatccgtggacatggttggatgactatttaaatggccaaaagatttgtccactcaaattcattccaccaagtgttggaatagatgggtcactaggttttggacttcaaccaaaccctaaatatgaaagttggatcgtacaggaccaacatgctgatgggtagttgtatagatcatgacagagggcgtagtgtcagaaatgatggcttgtaaaccagtagcatctctttggataactttgaaagacttctatggagctcactcaagtgcccgaccgatgatatccccaacaagattcaaacaacaaataaaggaactctgagtatgacaaattacctcagacaaaattgagtttggatagactcctttgctcttgtaggtgaaccatatcctgaacgacacttagtcaaatgtgcttttaggatttaactataaaactacataaaaatatgttgtattcatatattattttcatccctttatttcttgaattaattatcttcttagattaagttgaccaaaaatcgcgtcaacaattagttttcagtttttagctataatagattatcttattcattgtattagctcaaattagtatcttatagtgactgtaataggtgtgagaggattgagggttgtaaatttagtgtttttcttgagaagacttctattagtgtgagattatatgtattaggagcttgtcttctttgtttgtacccgatcatcattgtaattcttggagttgttcaataaagagataaccaaccttcatgcttgttcagatccttggtgtaacgtccttgcttcaagcttctattgggctcttacacccacagtatgatggctcttatacacgagtacgtca

SEQ ID NO: 299597 - DNA, 925 bp, Cannabis indica
aagcggcccaactatgttcctttggttactgattgatatcttcttttttttgtcagggttcaagtgttcctttggttgtcaaatgggcagatacggaaaaagaaaggcaagtgcgaaaggctcagaaagctcaatcccaggcatctaatgtgccaaatgctgattcacagcatccttcactatttggagccttaccaattggctatgctccaccctataatggctatggttatcaggttaatcattttttttttcttttccagcagtgtaagatgaatgtatagcattagtgtgactctgttccacgatcacgtcctctgaaattccttttgctttctgttgcacttatcaactttgttttggtttcattttgataagcaacttcaataaattgaagatattattgttttcttataggctcctggaacttatggtctcatgcagtatcgcctatcaccaatgcagagtcaacccggttatcataatatgatgcctcaagtaaaccaaggaaatgcattaaggggaatcagccctgatcttgccccgaatatggctccaagaaatttcggtatgcccccccatccaaattatgtggggtcagcttatcctgcaatgccagggcttcagcatcccatgcattatcctggaggaatgatgagtccccgaccattaagtggttctcctgggtcagtgcatgcagttgtaagcagtaaccctgcaacatctccagggtcaagtaaaaattcttgggggtcaagttgaaggttgttaggcatattcttctctgtttttctttttctttttcaggcaaaaacaaaaaagtaggaaactcttttggatgtaatgcatttgctgttgatatttgttaattattctaatgttctatcacttaggtccacctggtgccaatttatttatttatcat

SEQ ID NO: 299598 - DNA, 5619 bp, Cannabis indica
acaggaatcatctgttatccactcctaataggcaaaattttgggaggttcagtaggtcaaagggtctactgaatttatcaggaccaggggatttaattgaagcacaacgactggttctatcactattttatagtattcatgtgagtgatgttaaaacctaagtggtggctcgctttttatttattttatttatttttggagataatctatcttttttatgccactcagtttctaaattttaggctatgtttggtaggaaggagggagagtaggatggatggagagtttaaaaagaatggggagtaggagggatggagaagatagttgctctcttttgttttgtttggtattaggagtaaagctcaaaggatggagagtaaaataaatattgaaattaccattttatcatctttaaaacaattatatattattttttaaagggtagaaaagacgttttatttattttttgtcttttttttgggatcttcccatttttggagggattgaaatttaggtatttggaggtagagggttcctccatctctcctctcccttcctctctccatttttccaaacaaaggaattcatcaatccctctatctctgtccctccacccctctccctccatccctctccctccatccttgtctcccctctaccaaacatagtgttagtgttgcctttgctattaataagttttcacacttgttggacatgtatgctgtgtgtcaataacttatccttatatgatatgatgatgtgccattttcgttggctgtaaagttactttgtataatttaatttaataatgtcgaattgtcattaataatgttttaatcagattacatacgtattttacgcatgaacatgaaaatagctattatacttgcacaaatactatatttaatatccgtttcatttttggttctgttgtgtgtttgttgaatgagttttcttgatttgcgtgaagcttgggcgtgggtctgttttgcgtggtcccttggagaatgccacttctgattatgtgtaagtttgcctttggttaatgaactagcttactttttaaaaacaaatggtctgctaaatttattaccagctaagttcattgttctttgtatttctaggacaccgaagctatattgtggaagtcaagattgtccaatggaactactgcatccacctgaggattgcaacgttaactcatctctatcctttactctccaggtaaccgtcaagctattgggtttatggtttatttatgtagaaacagtttgagacttctttttgtttgttttgcagatatgcagagttgaggatatcactgttgaaggccttgtacagggatctgttgttcattttcacaggtcaagaactgttgttgttcagtcttctggaacaataagtgcatctggaatgggtatattctctcctctcatatatagatgattgttttgtgatccagaagagtttgaatgctgcgattgattttttttctcccttctgctgggctaattttctgtttgaacaggctgtacgggtggtgttggcaaaggaaatgttacaaatggcattgggagtggtggtggacatggcggtaaaggtgggctaggatgtttcaatggtagttgtgtcgagggtggtataacatatgggaatgcaaagttgccctgtgaacttggtagtggaagtggaaatgaaaattcaactggtactgctgggggtggaatcataggtaagctctgtttgtttgttgaccaggtatgtcattagtttttgttataattgtgggtgaggacttgactaccttcttatctatgtaacctgggcagtaatgggttcactggagcatccgctgtcaactttgtcaattgaaggcacaatacaagctgatggagaaagttctgatgtaactagcagaggggggaaatattctatggtagatggttcaagtggaggttttgggggtgggtcaggtggtactatacttatgttttgcacactattgatgttggtgactctgcttctctatctagcattggtggatatggtagtccttatgggggcggtggaggtggtggtggaagaattcactttcattggtcagacattcctattggagatgtttaccagcctgttgcaattgtgaaagggagcatccattcagggtttgtaatatatgagtttgtttaaatgcatgctacgtatttcattgtgaacgctaaagatattttattctgttttttatatttaggttatcttccaagatatgattcatattactttaccttagcctgtcatttgaactaaattcaaaattgtttttatatcgtgatctcttaattatgttcatgtaactaatacataatttattatgctaattgatacttgttttaacttctatcaataaaggggagggctgggtagaggcgagggaggtgctggaggaaatggaacagtaactggaaaagattgccctagagggctttatggggtcttttgtgaggtacagttatttatgtgattttgatgtgttctttttccattaacctctacactgttgagttgttacattatgtccgatatgctttttgtatactgttggagttatagactatgtactttagttcttatagatagagttttgccttgattctgtttcacttttgggaaaaaattatacttgttaatggcttttcttttttgacattttaattctgtgcatgaaagaaatttcggtgtaacatgcatgtgtcaggggctgatatctgttaaatttcttatgctttgtcaaaacaaacatatgttataccatgggaggctactttaagtggtttggttggtgggtaaatatttgtagaaagcgatgtacattaccacccacgagggaggggtaggttgtgttgtctggtccatagtttgctccagatttcactatgtatgagatcttgttcctcatggcatgggggtgcacggattaaattttaaatcacattgctttttctgttaactgtggaaattttgccacccttgggtttgaactttgaacccaggaccaggacaggagagaagccttgcaataactttgagtaactgtgatctaaaaaccattttggagttaaaatttatctctgaatttcacattcaggaatgtccagttggcacttacaagaatgttagtggatctgacagaaaactttgtcatagctgccctgcggaagagcttccaagtcgtgccatttacactcctgtgcgaggtatttatgtatatttttatatatatttaaactaaacatcagttgtattaatattgaaaaaatacaagcaaaagtgggaaaggaaaatccacagagaacttgtgtgagatattgattattttttgtgagcaaggagaatataatttttcttcgaattcttttgaatattttagagtatattctcttgcttccacaaacatgcatatttttataaccttgtgattctcagcaaaaaaaagtcttcaagtatctgcaactggttgtatgatctgctgttctgcacattcttattaaacaggtggtgttgccgagactccttgtccgtacaaatgcatttcagacagataccacatgcctcactgttatacagctcttgaagagttgatttacacatttgggggcccgtggctttttggtcttcttcttattgccctactaattcttctagcccttgtgcttagtgttgcacgtatgaaatttgttggagttgatgaattaccgggcccagcacccactcagcatggttctcaaattgatcactcctttccatttcttgagtcattaaatgaggtcaaatttctatatattgatctgtttgctaattaagatacagaaagtcattggtggttatccactggagctttctcccctgtttggagacttataaggctttatctattttataggttttggaaacaaacagagtggaagagtcccagacccatgtgcataggatgtacttcatgggtcctaatactttcagtgatccttggcatcttccccacactcctccagaggaaataaatgcaattgtgtaagctgtcttctcttctggtcaattctgcctgtagttctcttgtagaatacaaggttttttattttatttttttcctattaatttttactggttggacatatagaacatcaccctaacttattagatctggcagatatgagggtgcattcaatacgtttgtggatgaaattaatgctatagcagcttaccagtggtgggagggagccgtctacagtattctttcagttttagtgtacccccttgcatggtcatggcagcaatggcgccggagattgaaattgcagcgtctgcgtgagtttgttcggtcagaatacgatcatgcttgcttaaggtcttgccgttcacgtgctctatacgaagggataaaggtttgtgttgctaaatgtcaggctaattttttttttggtatcgtgaatctttcaaatcaaatatttccttgtattcttttgttatggattttatttcagactgttcaccccattgattttgtttagtggttaagcttgcaattgttttctatgttgcgtaggtggctgcaacttctgatttaatgctaggatatgttgacttcttccttggtggagatgagaagaggactgatcttcctccccgcttacaccaaaggtttccaatgtcattaccgtttggaggtgacggaaattacatggctccattttcacttcaaagcgataatgttgttacaagccttatgagccaggtttgttgatgattgattacttaatttcaaattttgttggtactttatagttgcatgcacagagaagaatgggagagataagagacttgcctgtagcttgggacttggcttcaccgagtcagcttgttgagtctagaatttttaccttaaccgttttgtgagattaaaactgtataggttcctcatttttttataatatttatatttaattgtcaatttcacgttgtattgtgacacattaattagttttgggtttgtcatgttatacgtttaatgacgtttattaagcgtgttaggtgtcatgtcttgtgacttgctaagtttaataacgtttattaaacgtgttaggtgtcgtgtcttgtgacgctaagaaaatcatgaatttttatttaaattttaacttttgatatgtttaatgattgtgttgtatttattttgtatcttaatcatgttatgctcatatcaacacaattatcacatgacacgagatgggatgtttatgtcgttaattgtgtcaatttcatattgtatcatgagacattaattgtatccattaaggttatgtttattaaatgtgttagtgtgttgttctttgttgtatgtttattaaatgtgttagtgtgttgtatgtttacttaaaattcatattatgtgtgaatttttgaatgttcaaatacgctatcgtgtgtttcactttactcatgccgtgtctgtttctactagggctgtacatcggtcggtttgggcggtttatcctatatattttctaactcaatctaaagttcgggttgctaaaatttaagtgcaacccgtccaatttaaaaaaaaaa

SEQ ID NO: 299599 - DNA, 2740 bp, Cannabis indica
gcgtgtaggggggttttttttgtaataaattgagtaaattggatttttgatgtaaaaatttcttaaaattaacatgctaactcaaattttcctttgaaaagctaaactagtggattgcacccctttctgtctctacttcctaaacccttctcttcttctctcatccaaggccggcggttcaaagagactccatgccggcgtcggaactactgctgtcggattctacctccaccaaccgtatgagtaagttctcaataccaccaaatccagtccatcattcttcaagttctttctatttttctatataacttatataaatatatatatgcctaatctgagattttgaagtttcttcaatcaatggaatcattattttgccatttttcgaactcaagcccttctgtatccatatatgtatgtatacgtatatataccatccggatatataatatatacatatatatatatatgtatatatattgcttcgaaatttttctttttgacacacttgacctttggtgaactttgaatcttgaatatgttctctcatggaagaattctaatataaataaattgttcttgcatctttgttggagcttcgatcttgtgtagcttgataagtagtggtcagaatatctatgggatttctcgaatttcttggaggacatatgaacagtgtatatatgcgtatattggtcggaattgtttctttatttcttggattagtggctcttaaatcttggatgtaacttttataagaattgcttgaggagagtaaattttcttgtttatacacttgaacccttgatgaggcttgtatcttacttggtaggacttttatattattttaaaaacatcttgatgtaatttggggcctctatttttctctcgaataagtacccctttcttttttctttaaattggaacccttgtttctcctcttgtagttgactaatggaattctactatggctcatgtttaaattcctcaaaaagatgcattcaatttccaaatttatgcaccctaaacttaggatattaccatgaatacatgccctatattttggtgcttttatcggatttcttggtgtttatgtttaaatcacactttcaccttatatccattaagcaccataaatacacttgatgatatttattccgagcatgcatggataatcccttgatgaatacacattgttatttgttatttatttttacatctcgagcactttgcatagtgacaccctccaaagtattgtcttaatatttcgagttgtgtggcctccattttctaagccactattattggcaaatcatgccacggctatttattatgccattaattcattattttattagtgtaatccaatttctaagtgtttctgttttgaaggtcttatagtttttaacaagttttgctcatgagttttgtttagtggtgattaggttgtcgagaggtcgtaaaccattggggatgaagtttatttaactggagatggaggtgtccttgtgctaaagcagatgcaattgctctaactgatgaccttcctatagttgatggtatgtatattaattattcgtggcttggatcaataatcttcaacaaagtgttaatgtatgcttagttttgtttgaagaagatcgtattcatattatagtgtttgtttttgtatagtttgtggaaatgatattataggttcaaaaaggtctcacttcctcaatattcagaaatctttatttggggtaatgctattatgctccaaactaagtttaccaatttgtctgatagcagtcaggtcttatggctgtcgggcaatcgttcctaggctgttgagcatgcacactttcgtaatttcaatttgagaaccattcatttgaagtccacataaaaaaaaaacaggccatagggtatagggtatactcacttgggcacttaccacttagagggattagaagtcggaactaatttgatattgctctagttattcactcatatactgattttaaaattccaaaccttaaaccgcacgtacataatgaaaccataataaattacagttcgatttcattggttaattttttctaaagagattaagcaaaacttggaagttgagcctgtgtatgctaaacccgtatttttcttttctttttaactaattgtagcatatttttgccaaatatcaagtagtatccatctcatttatcatactctttagtctttggtaatttttggtactatgagggtggaaatggcctaacttacaattagcctttggtctgaagttagctagacacattccaatgcaatgcctagcatatgagttttgattttatctatttatcattagcacacttggtgcttaattaagactaagaatctcaatatcaatagatccaatgttcaaaccttggtcaaatcccaattcctacctcaccactagaccaaacctctgagcttgaattttgattgtatctatacatttaagctggtagtgtagtggtaagaatggctacatctatggtattgatatattaaggaggtaggcatcctaatcaccacatcatcacttccttggtattgatatattaagtgtaatttgtagcataaatacttaagtttaactctcggttgcagacaaatacctaagtttaatttttgacggtaataatacttaagttatatttttagaacttttgttggtacctagtcgttaagtgtcaagtcattatccacgtgtcat

SEQ ID NO: 299600 - DNA, 2868 bp, Cannabis indica
gatttagtacatattaagttcgcggagaaaaaatcctaattagcctatgaaaatggtgagaagaaaaaaaaagcatatatgaaatcaataagtggaagaaagaataagaaatttattgaaaatggtgagaagaaaaaagaagcatagatggaatcaataagtttggaagaaagagtaagaaagaagagtatagacagaatcattcagaatagttaagggtgtttgtaaaatagtcaattcaatccaattcaatgtaatttttacaagtgtggataactgtacttgtgcaaattgaattggaaaatttaaaatccgcacttgtgcgaattgaatgttgattgatatgtaaaaataatcgatccaattaaatccacataattttaaaaaaaattatatatacaatcaatattttaaatgtaaaaaaaaaaaaaattaaaaattctaatacgtataataaaaatatatttgaaaacttaatatattaaatatataatccattattacatataattaatttttttaacatatattttaaaacaaaattaaatatttctttctacatatagttttttttctttatttgaatttgaatttgaattttttattttatttatattaatttattgttagaaacataaaacaataatttttttttttgtttattagttatgtgaaaaaaaaattaataaatattaaataatttaacattgaaaaagtaatcaattcaaaataactgatccaatatatacttgtgaaaatataaaattcaaagttaatgcagatcaaatgcgagtaaaatagtgcgaattgaattgaacttaagtaaaagtgagaactcactattaaaaatttaatataattttataatctatttcacctctaagtgacttcattaaataagaaaaatactcgtagacaaaatcaaacctaaacttcaaataaattatatatgagaaatcatctttaaataaacatattttaaactacttttataatttatttagattttttaattaagggtacttaattgattttgaccaaagagataaacatgtcattgaagctaaataaggagaatttttcatactctttcgtgttttacttactatttgagtagacactatatatagattacttacgataatggagatgactttgtcaaaaactaatggggatgactcttttattgaaaaagaccaatattggtcttttctaaaatatcaaccaggtcaactatttaagactctaaagcctacaatttatcaaataattccatagaactcaatgtttataaattttattacactataaaaccttcttgaaaatgggtaagaaaaatagaaccttttgaagaaaaaaataataattgtgaagtatgatgatcctatcaaacacactctcttgaattgctaacatgacatcaagaagtaaaataattaaaccaactattttaactgttaaagactcaagctaacagaattagttaatttggttgtccctcccctactactaattctgaagcctatataaactaacttagacttattaactagagtgttattcagattgatgtacaaagttggtcatgaaaccaagctgagagttagtgagttgagagaattttagagctgttgctcgagtgagataaaattagattgtctaatatgtgttttgagcgtgtaaccttgattaaaaacttagtggattaattctcaagtcttgccgacgagtaagactacttcacattgagatcagatttgaactaagtaattttggtgttcattgtttttactttttaacctttagttttgatcattaattgtttatgtttttgtttatctttgaatctatgtttctgaattgcttgatttttgtttgagtgtcaatttttgtagtttagatcctaacaaattgatttcagagctgggatacaactataaatccatcttcattccatgaacgaactggtttaatctccaagaagactcgaagataatttttgaagttcaccaatttttcgagaatctgtttactggccatgaacaaattcttatcaacatggtgacttcaaaatttgaggtggagaagtttgatgggaagaatgactactgtctatggaagacaaagatgatggcacacatgggaaatcttggacttgaagaagccttcaaagaatcaagcaagattcctgagaagctgaaaaaaaaaatatcagatacccaagaaagccaaaaaaaaatacaattattcttatcttgagcaatcaagtactaaggaaggtgataaatgaagagactgcacatgaaatatggtttaaactcgaaaaattgtacatggcaaagactttgcctaatcagatttatttgaagaaaggttttatggattcaagatggatgaatcaaagtccatagatgaaaacatagatgaattacaaagctgatatcagatttaaaatccatcaaggtaaagatcattgaggaagaggatcaagcaatcttcctattgaattctctgcctaaagcctatgagaacttgagagatacactcaagtgttgtagagaaacattgtctttggaagaggtgattgaagatacatactccaaggaattggacctgcaaattagaaagtgggaaagaatcctattgaatgactcaatgttaaagggagattagaaaaagaggaaaaacaatagtaaaggtggaagaggaagaggaaagtccagatccaaatctataggaagaagagcatgttggacctacagtcaagaaggacactttagaaaggattgtccacaaaggaaaaataatggataaaaactgaaaaactgtgtttttgcaaatgtcagttgtatataggaaaatataaaa

SEQ ID NO: 299601 - DNA, 2253 bp, Cannabis indica
ttttaaaatttgcatccgatccgatccaattatgattggatatccgattctattggatcggttgagattggatcggtcggttggaattggattggatgactttctgcacacccctactttgaactttcatccatgttaaattctgttttactaaaagtgaacaaaagtttttaaattcaacaatctcaatagttcatggaacatttttaacgaccttaaaaatttatggggcatgatttgctacttgtcaaagttcaaggggaaaaaattcaccggaccaaattagtaggtggatgctttttcttacgtggtggaattacacctaaaaatagaacacccttttctttctgatacaatataaggggtatataattcttccataaggcataatgacttaatgagagcatgattataatgtataatgatagaaaattagacaaggggtaaggtaaaatgaaagagagctagaattgcttttctttagttatctaaataaaatagtaggattacaaagaacagaacatgccctctagtttcttctttccttttgtatgataatagcactaaaatataatctaaaacgagagcagttagtgaagctaacagaagcccttttctgttctcattcctattttattatcacaaaataaaaagtaaataaggtatgtaaacaaaaccaataaaagaatgacatagaaaaaggacacaaaccaactcaactcaactcctatagtgcctttttctaacttcacatgaaaatataagtttgtcagtctatggttcttgttttttatcaaactgaggagttaaaactgcattaactatttctctacgtagagaattttgatttgttaaggctctctgacttaaccgagatgggttcctaggagatgaggacgaacctttcgatctaggagacaaattcgcttgctccaaaactctgaactgaagctctgaagggtaatccctcatgcaaccaatcctaggcccagctccagttgaccatctagctgataactgctgagccaactgataagacttcatccccttgtgtgaaactatcctcttcatgattttctcctttgggatgattggtttctcatcctcctcttcttcatcatcgtcttcaaacaaattagatttcgggaacatgaaatctgcctctgttaggaatgattcctcggctgtttcatagccagactcttcttcagaagtagaatgtagacggcgatgatcgctgtgacaacttgttgggagtgtttccttcttgaaaatgtcaaaaacaaggttgtttcgggttggtatttcgagtgtggttagctttgagcatagcttgcttggcaatctagacatgagattttgattctctgctgcattagggtcctgacctgttgaatcagtacctgagacttctgaatgcgttgttcctgaattcttaattgaaggcggctttgatagactgtttgctttggagaaaaagcctgtggtttcctcatcacttgggcttttctggtgaatgacagaaacaaaaatgtttcaacaagtgatttcaatcaatgagacaagtttggattatctaagaaatactaatcagaagacaagaccaggttttatatgacaagatcttttacttacaaactgaaaataaagtctaaaaagaatataaaaatttctcaattcttgcctcacatgattccatgcattctgatatacttcaagaacagtgtattttgaaattgtagagagaagagcaaatcatcttgaagttatgagggtagaagtgtagataaaatacctttacattagctagatcaacattatgttcttcaaggaatgtcatgaactcctgaaaattttcttcggtagggagatagtgcccactgtgaggccaaactgcctattcaattggaaagaaataccagaaaaagatcagcatttaagagacagacaaggaaattgatctatagaaattttttgagtccttctacgattatctcctaactcttacctttagaataccatcttccactattaatcttccagcagacaatgtggctccacctgctaagaagctcgaatgttggaacgtgcctttattcttcatgccaacatacaatgtctttgatgtgctgagaacaaatatccacttagcatcttggggtccttctgttgtatcaagaactttcccacttttcttgtagataaacgtcccattttctactgccacttcataaatctctctttctgcctgta

SEQ ID NO: 299602 - DNA, 3029 bp, Cannabis indica
gttgtggattgtatgggcctattccatcttcacttggaaaattaaccaaacttagtgttctaattcttgatcaaaatcattttactggtcatatcccatcttctattcaaaatctcacactactttcccatttactaatatcaagaaatcaaatttctgggcccatcccttcatggtttggaaatcttactaaactaacactaatgaatgttaatttaaacaatttaataggctcaattccatcatcattgtccaaactcaaagatcttcaattactcgatctctcagcaaatagtttaagtggggcatttgagttagatgcttttcttaaaatgagaaatatggttgtcattgatctaggctacaataacatttcgttacttgtagaagaaagaaaatttgatcctaacaccacaatttcaaatttaaattttctatccttagcttcatgcaatctgagcaagtttccaaaatttattgctcatcaaactaatcttgaattgttggacctttctcataaccaaatatatggccagattcccaaagatttgatgaattcaagtcttcaaagcttggaggtcatagatttatccaacaacttgattacagggtttcaaaaccacacatccatcctaccctggtcaaatttgcgagcgttctatatgcaatataacttgttgcaaggacaactaccgattccaccatcatcggccatacattatgatgtctctaacaatattctgagtggtgaaattccctcatccatatgcaatttgagctcaattttagttcttgatttgtcaaataataacttcagtggagaatttccactttgttcaagcagtatgattagtgacacaatgttagttttgaatttgagaaacaactctcttcgcggcactattccttttcaatgtcaacaagaaagtgagttgagaatggtagatttcagtcacaatcaatttcaagggaaacttcaacgaccagtgatggcttgtatgaatcttgagtaccttgatttctctttcaataaacttactgatgtgttccccacttggttggggagttttcctcagttaaaagttgttttgattagagaaaacaaatttcatggagttatagagaaacctcaaaacactacaagtgagtttcccatgctacaaattattgatatgtctcacaattatttcacaggggcattgccttccgaatatatgtcattttggtatgcaatgaaagatttcaagacaaccaatttaacatatatgaaagcaatggaaaatctcacccttaacacgaatgctattgctcctcgagaacttggggagtatgattattcaacaacatttgtgctaaaaaagtgtggcaacacactacgggaagatcccaataaacctagctgtcattgacctatccagcaacaattttagtggtaagattcctgaaataattggaagtctcaaggctctttactcactcaacctctcaaacaatgcgctcaccggtcatattcctccattgttggggacattaagagagctagaatcaatagacctttctcaaaacaaactatcaggagagattcctcctcaactagtagaattgaaattcctccaaaagtttgatgtctcttataacaatctcactggtgttataccgcgagggaaccaattcaatacattcgagaacaactcatttgagggtaaccaaggactgtgtggagaaccattgtcgaagaaatgtgaagtctggttgctcccaccatttgcttcaaatgaagatgatgattctgattatgcgattgaactggattggaaattcatcttggcgggacttgtgagtggtcttgttttaggagtctctcttggggagatggtgatcccaaggacgcggctagcttggttggtttacatctctggaacaaaattgagggagatgattatcagaaactgactgtgcatctgccatagttgttggtaagcgatagcttgttcccatgttaattcttctactacataagtaggtgcaattgaaattggtggtgtttttcaatttgaattaatatttcctagatgttataatttgcagttgtaattgggcaagaggtaattgacttccaacttggatggagggtcatgattgtggtgaggacaataaatgtttatatcaaagccctcttcttgttgtttacaaaaataaatatgaattaatagagaattctagtagaagaatgaaagttttgcttgttttcactatattgtttcagtggtatttggtccaattgttttgtttgctagagagagttgagatactatgagtttctttgttgttctcattttactttcttgttttgtacctcttaataaagttttgtatatcatgttgtttaattattatacaaataccaatttacgtcttgatttgtaaggattagaagtaattgtagaataaaaacacatattttcatattgagtgggcagtaatatctagaggattaactttttattgacaagctatgcagaaaaaatcaacattatactagagtttcatagaagatgactttgactaccatgacttaaaaacttaacgtatgtatatgcacaagcttgacttgatctggtttttattgtctctttatagacaatgaagtattgttttaagaattgataagtcataagggccggatgacatgggacctactacctagctacaacttatttgctaagagaagtttaatgaatgctttcaattgataattaatgcattttagttgttctcaattgataattaaaatatttttagagatttgctaaaatatattataggtgtctattatggtaaatttatttaagtagaatcagccattataatgtttaataaaggagagttattatgattaaaaatgtgaactagcgagtaataagtactacgtgcaaagaaatgcacagccttattagcagaacgcttaacaaattttaaagaaatattacccaactcagccatgagtttcatataatttaaaaaaaaaa

SEQ ID NO: 299603 - DNA, 1336 bp, Cannabis indica
agttgaaacactataaaagaaaaatgatgctctcattcatccacttgatgccttcaaccaaatcaatgatgccactttatttattgtgattttatttagtcaaattaattgatcgcaatcctttttatttttacgatctttttagatcagttgataaaaaatcgcgtcaacacgttagtattggtgaactctattaattatcaaacatcaagcctttcttactttcaagacttattgattgatattaaaatcatttatcttatctcccttctctttgtgtatctcatgttagattatatgctaactaaactgttcatagtttgacaaataaattttagtgttggataatgattccctatgccattttctctattgttgtaaataattttctttaatttataataacaaactttttcaaaaaaaaaaaatgagcctttagattgaacgtttaaaattggtgtagaaataaatgtaaaatatatgttttagcagtgctacgagtggaagaggatggagaaaggtcttctacttttcttccctaaggtcctccctttgtctggtgggttttgtaggtgtgattttcttctggtctgttgagtgttgtgcttttgtcctttcattctctttgtttcgagttattttgtgagtgtggctttacctggtttgttttcttttgttcattcctcttgtgtctcctgttttgagttggtgagtgttttctttgactttggttacttatgtcgatttataatctgtctgttgtggtggttgatgttagttttgggtgtgttggaatcttttgtctgtcattatggcattagttaatgctaccaaaccggggagcaaaggtaagtgcatctcgattgttgatgcttcagtggctttggtcccatgtgcctcgacagttaaagctctttcctctttttgtctttatgggaagttggttgctcacatgtttgcggagggttctaaggtgcaagaatatttattgaagacttgggaaagacctgtgacagttggtgccttggaaggttcaaagaatcttaattgttttgtctttagcttcaaaaatgctgaggatagtcaatgggctttggataatgccccctggtgcgttcaaggatataccttggttttcagctcctggactccacgggttggtaatgagttttcgatctcttcactccaggtgtgggttcaattttatcttctccctcgggagtatttttccggtgctaatggggaactgttgggtgctcttgctgggaaggtggtttctgttgacttcaatgacgaaatgcctgctgcctggtcaaactgttggaaatttatttta

SEQ ID NO: 299604 - DNA, 1083 bp, Cannabis indica
agtggtaattttatagatcacattgcaatgtacgcaatggatctataattactgatagactctggacaaactgatttagagatcaatgttactatagtataattaatctctttatgtaacctacctgaatgaaaaaaaaaagaagacaaaatcgctttaattacctctgttttggtagtctcccaagtttccttaaaaagggaactattataacaattttttttatgagtcctaattatattttgaactttagaacccaacaatgagttatagaaatcaagaaaatatttaataattgttgaccgaaaaaaattcgctgtctaaaatatcaaggccatagattcgaggagcaaatattaacctcaaaaatttggtaagagaagatacaaaagccatagaaaattaggagaaagggaagaaaggaagaggctagaaacgggggtctctccccttccctttatagtgccgcattgcaccagggttggtgccccctccgtgctgcaccgcgctagcaaggcaccccttcgtgtcgcgtcgcggaagggttaatgtctcctccgtgctgcgttgcgccatcatggcgccccatctcgtgttgcgccagctctcacgaagtgagacaaaggcctcactggcatctctttcatgatgtgcccttaaatgaaggagacctcagtgttaagttcactctctcaacatggtcaccaaatggaagtagggtctgatacactatttttactataagcgtacagtgttgttatagcaaagttttaatactaaaaatgttgtcgaacccatagggattgattattaaattttactaatttttatacttttcaattagataacacaaagtaaattataattaagaaacaaaaaataagataaatagaaaaataaatagacaaacaatgatttttaatcagaaagtaaaaaacctagagcattggtttccctatttcaaactatgaatctccatttatcgaacatcccaatttattctataatttgtagttttaagaatcctaatgtaacctattaacctctctcgagcaatgatagatttaacttagaataactaac

SEQ ID NO: 299605 - DNA, 2787 bp, Cannabis indica
caactactacttcactttctctctctatatgtatatataatatttacaaatatcctatgtttattctgatgtgattattaatgttagaagtaaattctttttttttttttaatttccaatttaaagtaatttattgttttttttttcaaataaaaaagtggacaagatcgaatgagatcgaggaacgtgtcgcttcaatcaaatcaatgttggagagtatggatgagggagagataagcatttcagcgtacgacacagcatgggtagcccttgtggaagatattcatgggagtggcttacctcaattcccatcgagtctccaatggatcgccacacatcagctctccgacggttcttggggcgatgctgacattttctccgcacacgatcgccttatcaacactttggcttgtgttgttgctttgaaatcttggaacctttatcccgaaaaatgtcaaaaaggtatgtattaattaattaatttaatcgtttaattcgttttgataatgaccgggtggaattattataacaggtatggcctttttcaatgcaaatataagtaagcttgagagggagaatcctgaacacatgcctattggtttcgaagtggctttcccttctttacttgaaatagctcgaaaattaaaccttgaagtgcctgaggattctcctgtgttaaaagtcatatatgctaggagagatttcaagctcacaaggtaatattatataagagtaaagagtctcataatgtatatatctagctagatgagagagaaagagtgagtatataacaacacaatgcaaaagtaatgactttatagttttagtatatacatatataattagtacgtgcgcgcgtgtggataggattccgagggacataatgcacacagtgcccacgacgctactccatagcttggaaggaatggtaggtctggactgggaaaagcttttgaaactgcagtcccaagatgggtcattcttgttctcaccatcctcaactgcttttgcactcatggagaccaaagaccgaaattgcttgcaatatttaactaaagcggtccaaaggttcaacgggggtggtacgtaaatattacctacctacctttattatcttttcttttttcctattggtttttcttctgtttttgtttgttcttttgttttgtttttacttttccaatgtggttctatcatctatgtactgtctcttgttatgattgtcctcatcagttcccaaatgtttacccggttgacttgttcgagtcacctttgggttgcggatcggttgcagcgcttgggaatatcaagattctttgagccacaaattgaggaatgtatcgattatgtattcaggtacgtacgtacgtacgtacttaataaaagtgctgacaaaatgtactgtatatttgaattttgttgtttcttagttaatttattttttacatttggaatgtttagaaattggactgagaaaggaattggctgggcaagaaattccaaggttgaagatattgacgatacagcaatgggtttcagactactaagattgcatggtcacaaagtttctgccggtacgtatacgtacaaatgtgtaaataatatttactcgaattttacataatattccaatcaattacattgttttaataattaattgatttgtaatatgtggttgttattattattagatgtgttccaacactttaagaaaggtgacgattttttctgctttcggggccagtcaactcaagcagtgactgggatgtataacctttatagagcttctcagttggttttccctggagaaaaaattcttgaagatgccatggaattctcatcgaaatttctcagaaaaaaacaggcgtccaatgaattgctagataaatggatcataacaaaggacttacctggtgaggtatgtatttagatatttagtttttgtagtattatatattttatgtatatatactagtagtatatgcttaataactatttttatatttatatttgttgttgttctttctattccagttctgcttcgtcttatatactagactttagtaagatgagcctacgtaaacaaagtgccatcgctgtctatcatcataaatattcctttgattaggagtgtaagatagagacgaatagaacaaaaaaatatgactatttaatccgatcgaggacgagaaaatcgatcaaaacaagttagagaatcagagtacagcatctttataagacataacctattaacaataattagaagtacaacctttttttttcctttctttctttttaacttaggaatgaattgtactgtgaaaaacataacgcacttatagttataccattcctcttggggccatatatatagttgggtacctggccttttctgctgtgttatctgtcaaagattctcaaacaaataccaatttatttctggtcgtagatataatttttattatttattttttaaaaatattaatttaattatggtcagtactatcgataaacgactacaagaatttatctatgatgtgttgacaaaaagggttggcaaatcaatgttgctattagaacttttgccagcataaataaaaagcgctggcaaaaaagacttttcccataaatgggctggtaaaagttagattttagccacgctggtaaaattttgatctcttttaccaacgcagtaacgaaactgtgctggtaaaagtgacatttcttctaacgataaatattttataagctagtgatgtaggagcctgagttttcaaaaaattttag

SEQ ID NO: 299606 - DNA, 4584 bp, Cannabis indica
tgaacctgctctgtgctgcttgtagtagaagagatgaaatttcttttatgctacatacatcaacaatagtgagatctgaaacatatgtgttcccatttgcatcatgtttaattgtatactgctttccaagagtaccactatctgtccgcgttaggtctgaattacttgaccggtttgatgataacagatcacgaattgtctcattgtatatttctagcattgatacctacaaaagtgatagcattgtaagaagcctgactgatcatcagagtaaaaagatgattactagatttaatacctgcatcttgtatttccagccctggcactttagtgactggcttatttggaatatttgttcaagagaacgtggtataagccctttctgttccggggcttctggcctacccatcatggtatatgttttaccagaacccgtctgaccataagcaaatatacaaacctgtaaacagaacaggtatcaacaaaacaaaaacaaaaaagcagtattcagcagaaaggaatagccagacatggttaaataaaaagaaacaaatatcacaccagcaggtgtgtacaatcattaacaaaacagtttaattaactactgtagaacaaatgcaccaataatccaaagcacattggatttcttcaaaaaaaaaacggtacaaaacttaatcacacaccacaaaacaaagagttatcaaccataacaacatatccacatatgagtggcaactaaaatcaaaactcaccttatagccatcaagcgcactctgtaccagttgtgatatctctataaaaacatcttgttgagatgcttcgtgactaaacactttgtcgaaagtaaaaggaaacttctgccctgcacacaaataagaactagattaaactctcagttccaatcaaaacagttgaacactaggcccaaaagcaaaaatagaatggctaaaatgcaagaaatgaaatacatccgtaccattttgtaatatgtcaatgccacgaccaagagcttctgttgaagtagggtatgaaacaacagctttttctgtaccgacaccatcatctggcaacaacggtcgtactcgacaaaacactctaatatttccttttaactcctgccaaaacaaataatttaataaaaatatagaaactttatgaaaacaaaacagcagtttgtctcattgttaccagaatagtgttgtgcagcttctttcttagattctctccttcaacaactttgatctctgtttctgcaagacggtcttgtaactcctgcacaactttcttctgctcttcaaattcttcccttgcttgtgaagtagaaaagtcggccatctgaaagaaagcaaataattaaattttgaatgatttgtaaatgtggcatgcgacgtggcacatttttctaatcgtgtactagtgctacctttaatttctcattggcagcagctagctgaacctcaagagcacataatcgctccctctgtgatgaacaagtggcctgtggaatgaaaataaagcaacattacaatgattaccaggctataaatgaacaaatcatgagacatgttactaacaaacctccaatgcatctgacttcattgacaagttatcaagctctgcaactgacctcccatgaacattcttaaatttctccacttcagcagacgcttcctgcacttgtttcactaggcgatcacgatcatctctcacttgttgtagttccacccgtatgtgtttaagttcattagccaaggactctttctgtttaatagcatcatcccaagaagcctgcggcaagaccacaaggaatttacttgaataaaatagacaaggtcaaagtaaattagcactatagagaatttaggtacagtatagaataggaaccaaatagataaaatcaatagtaagtatatcacaaggatattcaccgtaattgaaattaactgatcttgcaatgatttattgtgaccccttaaagttccaagattttccacaatagcaagtttctccatttccactcgttttagagactcactggctgcttcaagatccttttggagcttactgttgtactgctgtagactcttattatactcttgggctcgctcgtacaaatcctcacttgtggagacctgaacgtgtaaaagaacaaatattttaataggcatgaaaattcataagtaaaaataattgtttagaccagagatccaaacataatctttgtagtaccctctgatcagcaattaatttttcttgctttgctttttcaagctcagctgagacagaggcttgcaacttttcagcagcttcccttgcctctttttctcttctatgaagattgattgcatcctattttaagacaaaaagagtaaaatatggatgagaaacaaacaggtaatatcattaaaaaaaaattgttataatttcaacaggaaaaaagccaatcttaccagcttatctgattcttcattggccaatttctcttcaagcatcacaatcgttttccgcaactcaaaactagtagcttcaagctcctctattttagttttcatctccacctctacaattatacaaatgaatctattttaaaatctattatagaagaaaaaggcaaaacagcaatgtacagaatggaatagacagattcacaaaaaaaaaaatcttccggagttgacaattttcaattaaaatactggattcaactccaaacatagaatcttaccagtatcattgcactttttttcactgcattccaatgcagttcgaagcttttcctgctcaacaaggctgttctcctcagctcgttggaaccatttgatacatattttgagcctcttgttgtgatcagtcaactgttccaatctcttctgctcaatcaatacagggaaagttaaaattttatatataatacagtctgcatggagtttcaaaggtggaaaacagtgaaccaatatgaaagctttaagcaagatacaaaccttggtatcaaacttgcttgatttcaacttctcatttagcaaggcctcaacttcatcttttgtgaactcaacacttgcattatctgatccctcgacactctttacatccgcagcagcagaagcatcttgtctattgttgactgatgaaaagggcagcctcctggtgctattgccaggctgtgcacctgtcattcttgatgccgcaagtctcctgcgcttgtcatatggagcttcatcgacggcttcctttttctacgcaaataaatgaatattaaaagttaaactttcaaattctcaagaactgacttagtagcatgattaatatacccacgttccagttattctctaagtagcaaccagatgcagaaattactaaaatgcattctattcatacaaaaaggcatgtgtttttactatctaaaattgcggtgggatagtgtcaaaacttacatgtaagaacaaagaaattgcaataatattctccaataacttaattctaagagtaatgcacgaacaaattgcgaaatttaaaaccatcaagcaaccaaatttctcactttcttaattttcttacactcaatgaccaagaagtaccacaaattctaatgtcccaaaacttctttcagttctcttaaatagggaaagaaacaaccaacttcaaaaacaaaagttatggcttacagtagaggggcttcgaggagcccgattctggttgcgtgaggccattattaaaccgcacaccgaagctttccagagggttattgatgcggggacgcttatcgcataatctgagaagcaaaaagaagagaagagaagacaagaacgcccgagtttcgatccaactggtttcgagtgaaatcaaacgagacactggggtggattttggaagttagggtttgaaagatagagagagagaaagagagaagcaggaaaataaatttgaattctggatctggcggcattcgaatacgctcctgcaaatagacgttgtacctttttcggtttgggccaaactgggtttgggccatggtccatgtaatatagcataataatttaatgaaaaaccacatgaggagacctttttcttcttttttttttcttatatgaaaaaatggggtttttacacaatttttaacattttttactttttcttttttactatagagtagattttttttaaatattatgtttttttaaaaaaatattgtgtactgttttaagtttttacggttgttccacagttattttttaaaaaattatggtcatgagaagtgttgtaaatttatatgtgtctaactggtccagtccatattacactatactttttaaagtataagtctatcgtgcgtgccataaaaaaatataaatcatatcttgtcatactaacatttttaaagggtaggcttagcagagcatagcctagtgttttcgtgtcgtgctcgaatgcataccatgtgtttactcgtgtttgtctatttttcttaaaggtagttgggcttcaaattcgtactttattttactcgtgtttgtttgtttttataattaatgagttaattactaatatatatatatattataacttttattattatatattttttaataa

SEQ ID NO: 299607 - DNA, 871 bp, Cannabis indica
ttaaataacatacttgtgagtagatctaagatcctggtaaaataaattccaacagtttgttcatcaaatctttgattaaatagaaccttgagttgcaggggtacaaagccaaggtaaccttattggtagaggcacgtcgacctgctgacaaaacactctttactttcacaaactccatgatatttaagcactgaaaaacatacaataggggcccaagacaaacacaaacaccaaaaaaaaaaaaacatacacgggacaaccaaggaaataataaacaaagtcaaaccaaaggggacaaaacaaaagggacaaatgcgaaagagtgaaaaaggggccaaaaaagaataaaaggcacaaaggggttcaaagagaaataagagagtaagagtgataaaaggagtaaaatgtggtaaatgggaagagataagaataagcaagggttaaacacagcatagggcttctacacgcacaatagtacactatttggtgcattggcatttttttgctgggatggtgcattggcttaataagatataagtttggtaccctatatattctgataaacgtggatcactttgtaatttaaaatattatgtattatgtactctataatttaaaaatcaagtgtaagatacctattttaatattaatagagattatattgattttggtactctaacttacaataaatttaaagttaaaagtactaaaaatatatactgttccaaattacaaagtattcaatgatctttatttgaagcataaaaataatttatttatttaaatataggtgacttgtggtaatatttttgtttaaaatttttttatcacaaaaattaaaacatttttttaaaaaaaaaaactgtttttg

SEQ ID NO: 299608 - DNA, 2453 bp, Cannabis indica
gtagcgtgccttagcattagggcgttacattcctcctttcccctttttattctcaacaacttgtaataaataatttgttatatgtgcctaacataaccaagagcctactcagtgtgtctcaatttgccaaagataacagtgtctattttgaatttcatccctcttacagttgtgtcaacgatcaggtcaatcaaaagaccttcctggttaggaggcttgatcaaggtctctacaagtttgagtcaatccaacttcaaaatcttgccaccaacaaatgctgcaacatcaccaaatccaagtcagcgacaccaccaacctacaaccaaaaagataaatgtaacagtacatctatacccccaataaactctcaattttctctttggcacaatagattagggcatcccattgccaaaattgtacaaagtgtcttgtcatcttgtaacatcaaaataagtaataaaactgatgtcaatttctctgatctttgtgctgcatgttgtttaggcaaacatcataaatttccttttccaaattccacaactaaatatgttgaacctttacagttgttgcactcagatctatggggtcatgcccctattgtgtcatcaagtggatacaaatattacattagttttatttcctattctagacacacttggatttatatgttgagaacaaaatgtgaggctttaccaacctttataacctttaaaacacaagttaaattgcagcttggttacaaaattaaaagttacaatctgattggggtggggaataccaaggctttttacaaaactcttaaatgaacatggatttattcaccagttgtcatgtctcacacatatgaacaaaatggggttgctgaacgtaaacatagacatatagtggagagtggtttaacccttttacctcaagcatccttacctctcaaatattgggataaggcctatcgtactgctatcttcttaattcatagaatgtccacacccaaattacatcttagcactcctttggaattactctttaatgtcaaacctgattacactatgctaagagtctttggatgtttaagttagcccaatcttaggccttacaatagggttaaaccaaactacagatctactccatgtgtctttttaggatatagcttgtcccataaagggtacaagtgtttatccaaagatggtagactttatatttcaagggatgtgttatttgatgaaaccattttcccatttgctcaagctgctctttcttctcaaacatcatttccaactcagatatcacctactatcataccatctgtaacgccctaacaattagggacgctacgattttccaataaacattacctaatctcgctaatctgggattactagaaataagagtagaatttaaactttaaattatttaaggaatgaaaatataacttgtaactatttaaattttacaaagcattctaaaatattccacatgtctcgggatcccatagaaaccttttcacaaaatattacgagtgattttaacatggcgacctaagcgacaaaaattgggaatacagatacatcagctggtagacttaaccagtgtggtctagtgtggcctgagcatgtacaatccaccgccaagccctcgaactcatggttgatcacaaaatgatttaccctttcctgcacagtagagcactcatgagccaagcccaacaagacagtataaatgaaaatatacacaataataaaagatcacttaattattgatgccactgcatctattgtctatttgacatggacctacatgttatgctcacacgtctatttatgtctatatagcgtagacccacatgttacactcacatgtctatttacaataaggacttagaatagtttatctcggttttgattacggagtctaacctaattatgccttgagcgtataattctttatttcaacatatatagcatggcattatattcaaaattacttaatcactagggtaacaatcctaggccatataaccgctcattttaaggtgataaccctaatcccagttcctcatttaatcacaatcataacatcaaacatgagtgccactgctcttaactctacatgctaactactgtcttacctagagtcccaagtatgtggagattctaaatccccgagtgcttctgaacaagtgtcagtaatcctagtcacaattcccaagatttcaaaaataggattaatcccaaaattcaataatcacataattagcattctatttacatattaatatatagatctcgaaatgagcttttcagcgatataaagaacgtccaaaacggagtcctgagtcaaaagttatggccaaaacaaaatcgaaaaaaacaagcaagcccactgccaaacctagtcgcggcgaccaataatccggtcgcagcaactggattcagaacacccaaaaatcccatttt

SEQ ID NO: 299609 - DNA, 7924 bp, Cannabis indica
ttttttgattttctaagtataaaaaatcaaatttcccttccattaatgaatattgaccagttcgcctctgggcatagacagattagacttgtgtctagagcctacttagatcatgagcccaatattattcttcatcttaacgattttatatctttattaattaattatttattaatttgttaattaagatagatttactactggtataaatacatatttactataattatttattatgatggattttatatcaaataaagtcaaattttatttctttttacaaataataatgtgagtaatgaatgttagttttgtcaaaagaaaaattaaaatgattaattttaatttaacacgtgtggtcttaattaagcaattcattttattattgaagttcttcattacacacatagattgataaagagacaaattaaacaaaaatattaaagactattaaatagtattttaagtttattttgctatttagtttatattttcaaagtaaatattgagctttgtttggagggaaatactgaacttttttaagtttaaatcaattctaggaaatttgagtataatcaattctaggattataggtttcaaatttctaagtatatacttagaaatttgaaacctataatcctttcaacaagaaaaatggtataagacacttatgatcagtgtataatatcgttattagtacaatttagtatcaaatttctctcattttaatttaataaaaattataaatctacatatcataaaaataacgaataataacgaattataagacacagtggcctatagcaatactctttcaacaacttcattaactcttaacactttttttctcactacaaaatatgaaatttgagtaatttctaagtacttacatcataattgctatagtttcatatttgaatttcaaaaagaaaaacaaaacctatacttccaaaccaacctagcttcaaaaagctacaagtatttgcatgtaaaagacacaaaaagaagattagcctttttctattgctaacaaaaagtgtgtgtattactactactgcctttttcctattattggtatatcactatcatcatcccaccaaaaaaaaaaggtttcactttagtctttacatgtcacttcttccgacccgtctgcacggttccctgagaccctttggtactcttctttctcgtcccaaccgaaactggtttgggtttctgttgtcgtcgttggatggtctgtggtggttgagcaaactgttgtgagttaacttcacttgaagatgaaccaaagttgacggattctagactaccatggttggtttgtagcagtaaggcgtactgttgtacatgctgactgaagttgacagattccacactgtgttggtggttggtttgtggtggcggttgaggaaactgttgcgagttgagtccagcgaaagaagaacttgcttgctgaccgaagttgacggattctgaactacctcggttggtttgtaagagttgagcatagtgttgtacttgcagaccgaagttgacagattctagactgcattgttcggtttgtggcgagttaagtccggttgaagatgaagaacccacttgctgaccaaagttgacagattcgagattatgttgactcggagatgaacccacttgctgacactgctttgcaataggtttcggatttctatagccttgaactacatcttccaaaccaccccattgaccatttcctgtgctgggagttgaagcaagaccaagcttgttgtcatttaagccgaacgagttgctgctgcaaggattgtttttctgacctatattcccaaccgaaagcatacgagctccttcgtatatcttattatgactggaagccatgggatttgtaacattattaccgacggagccaaagttgaaatttcttgggcctaagcaaccctctgcattcatagcagccactcctcccaacattgccttcctctgcataagtagctcttgaattctctgtctttcttgtatctgatgtcttagctggccacgttcaataacagcttgtatctgtgaagtaatgaaactgagttgtgcagtgaagtcgaggtcgaggtccagattcggtatatgattacttgtgtactgtggagatgactgtacattttcggtaagaggtaactgaccaccctcctcgggataattttgcttaaactgtaaatggctggaattatgaaccgacatgtttgcagtcatgggattgaaattgggcttgcaaggtggctcagatgtttcggatggttggttgacagtactactcggttcctgtctaccttcgatctcaggatacttgggtagtacatggtcgtaagcaaggaggtaaccttcacgggtcatctatagaaagataaaaattagaaaatggtccagaaccgaaatctatttaacaagatatcccccagtgcagtggacttaccagagaacaaaactgagtaataaatcgttctgcgtaacgctgcaaaaagaaaaacaaaaaagaacaaattaagtaattatacaatagctgtaacatggcaaatagaatacatctattataaaccagtagaatttgattacaaaagtggcaaacatataacaagaagaggtaagaaacaaaacggatgattcatttttccttcttaatttcaacacacgctttgcaaacagcaacgaaaataatatgtagtatttggaaaatcaatatgtagaatttggaaaatcattgcaaagtataaatataaagaaccgtaacatcaaatgtactgaaacattttcagattcaagcaactaattggaagaagataggtaagaattcacgtctaaaatcagtaagtaagaataagaactaaggagacgctattccccatataccaaaaacaaaagaagagtcaatacatgctagtaaagcaaaactacaaataatgagcaaaagaaacattatcgattgaacagaaaggaagaaatagcttgtcatccactaacaacaacttacagcacaaggaaaagttggtatgggagacagaacagtgggagcatcctcgtatttacttccatatagtacatttgcttccacttgaattttgttaaactcctgagcaagttctaatctgatatgagtctctccaccatgaaaatggatcccatctgctaatggcacaaagctactgttaggtaaagatagtagcaaccaaggaggcatattaaaagaacgaaaaagtaatcgaaacagcaccttcaatgacgggagattcttgacgtacaaacatcaatattctagctttacacacattattagcacccatggagagttgagacgaataaacttgatcccatatcgtagctactgaaatgttactctcctcacaatgtgagaggtggaaagcaacattttcagttttatggaaattttctcctttagttactagcatctcatccagcttgggcttcttaattaatttgcacctgcatacattggaaagtcaagtcgtatatcacaactggaaaggtaacaaaatgatatcaaagacttgaattgtgatagtacctttgagtcaattctttaatctttgagaatctctctaagatacgacctccctcgatttctgaagtatgagataagggattaataccctctgagatacgatttgcattggctatttgaacatgttttctgtaagtatttgagtcaaacaagcttatactccagctcttaacatcaggtgttgctttcctttttaaaatagtaatggcctttgttgactccacattttgagagcttggtgcggtgcttccatcacatatcaaccgaggtttttccaatacattccttctactggaaagttttccttttgcaccatgcttttcaattgcatgagcaatgggattcttcaatgtattctcaatccggttatctgtctttaataaatgcagcgcttgctgaccttgaatcggtaccccatcagtaaagttcactctcatatcctccatattcccaagaactattccgggaaagttcaaagattcttgcttcagattagaagtagctgatccaaatgcagaatatgggatgtctctcctagttaaagccagacgacttgtcaataactgtgataggtgccctttatcttgaaatctctcaggaagaacttttccagcttcaatcttctgatgcactagagcattctgccgctgtagctgaggtgtaacactggctgtaatggattcacccagaaattgcgggtaagagaagtccacaggctcttccttcggtttcttgatagcaggttgttgaattgcttgatcatgatatacttctgtaacaatgagattcgatgaggtcggttttgttttatcaatagttcgcttctttgtagctcctataggcacagaagaattggatgcaccaagcccaaccaaagtcaatggaactcttgtcttctccaattgaaagttttgatgtgatgtcaaaggatagacttgtgtgttcgttttttctagaaccggagttggaatatctttctttgccagcattactccttcatcttgatgcacattctggcaggcagaatcgcttggtgtaagagtagcatgacttaagtcttcggtgaaaatctggttggtagtagttggtgcattacactgtttcctctttttccagctccatgatatctccaagttgacctgccaaacgacaaagcaaaatttggaaatttcaatacatttataagtgcttgctgtgatgttgacaaaattaatttctgtaatttcctctcatagccaacaattgtaaaatgaaccagataaaggtaaatgggacataccttctttgtcagggtttctccataatgtattcccatcgatggttgtggattcagacaaagattaggttgcaaggctttgacaatgcgggattcaacttcctgaacaacaagggaatacataataatgtaaattaggattattgtagttgcgaacactaaagagattgcacactatttcaattttactcataatattaatttatttttggctccaatagattgctaatatttaatgcttacttaccaagagatcgttgtaggtccaggaatcatctgatattaacatgatatccttgacaacattctccatggacatttgtaatatcactctgtgaacaataggggacttctgaatagaacagataccttctttttgcaacaaacaattgcgataatcatgaatctgcaaattatgaaccaatgcaaatatttcactaacttaaatgttttatgcttggtttttgttctctgtttttacgcttttctgaggttgaggataccgatccttatccctcatctaacatcttactaaaaacattgtttcttataaaaaataaattaaatgtcacagtaattcaaacctcacaaaaggaagcaaactttgtaatttgctttcttgatcggcaagaaactaacaaactgaatggtaataagcctcacctcacatagaacatgtccattgacatacttgatcggcaagtcatcaaatatatctccaggcaaccaaccatattcaattgcctaaaaaaacaaatagaaataaaaataacttcaaatatctgctaccaacatttgtttagtagagcgccttaaaacatagacttacagagaaaagtgtctccgacgatctgttgtatggatacaacttgtccggtgcaatattgaatgactaacagcatacagaaacaaaacaaagaatcatcaaaaggagttataatgcgaaattttggaaaatttctacttacgatcactaacctcagaaacttttccaatagaaaacccatttggaaatagatgcaatgagaaggacacctcaatatctgcaaaaaccacattgtcaaatgaagcatttctcagcacatcaagtaaactacaaggaaagaagcattcattaccatctgaagctgagggtataagagcattcttagctacaccacatgaaagagcagaaatcttattcccaaccccagaaaaattcccctgcagcaaattgcatgagcatcacaaagcacgtaacttaattatctatatttttagtcacaaacatttttgagtatgttccaacagtacatacttacaaaaatttgtaaaatacatttaaaaaaaatcaactctactcaattaaacataagggatcgaaaccttaaaacactttatgtaatgtaaattagcataagtatattctcgaagtattcgaaatcaatgaaggatcaacattacaattttatcgcctaccacattctttttttattttaatttattttttctagataaaatgactttcattaataacaatatatgtatataaagataataagcaaagtgtccgaaaaatcatacaaattgcacaaagcgcatagaagtatagtataattgtcaataccaaaaagataacatgcaatgtaactagattataaatttcttcaaaacatactcaattggactggtgatgcctattactctctagataaccccatcataaaagataaaaaccgcaatgagaaaaaattctacacgaaacatatttactatagacacactcagtcatatttttaccaaaaatcgggttttagcaattgaataaatgtttgtttggtgtgattaattctttgttccaattcagtgtcagttatcaaattgttgggacccaacaaagcattattacataaacaaattccaaaacaaacaagcaaaaaaattaccaaaaatcgagttttagtaattgggtaaatgctctgtttagtatcaaaactaaaattactaaaaatcttccccaatgtacaccaatcatccaccacttcacttccttcaacactcaaatccaaaacagaacacaaaaccctaatttcaccaacaaaaacaaactcattaccaataatcaaaaaatacaatcatcatcaatcaaacagtataactaccaaaaaaaaaatcaaaaaccacaacgcagaagaaaacgtgagcacgaagcaaattacctgatcaccacttgaccgagaatcagaggactcattctcctcctcatccaaacgatcattctcaacctcaaccaacttcggtctatacctcgtacccattctcgccaccttgaaagaaacccccatttttgcaccttcgattctccaatttctcttcctccgattaaacaaaaacaaaaacaaaaacgaacaaagattattccttcagttcaactacatactatgtcactgtgaatggagtattagccctagattctagtcttctgagagcgagagaagacatggtagcgagcgagttctcttattgggttcgaagaaggagttcgtgtgtgtataatatatatatatatatttatagagagagaaagtttgtcaacttagccatgaaggattaccacgtagagaaaaacttaattaccattttgcccctcagctattttggattttggtagggtgttgaagggcttttgtggaaattttggatttttttttggtttggtggaaaaggaaggatatggatggagatggagtgtgttctttttggcgcttttgtgttttttttatttatttttgaaagaagcttttgtgtttatttgcatgattgaaatgtgtgttgggctttggattgtttgagttgggggacaattattgggaatatattgaaaactactttattattattattattattattattattattattatacattaattaaatatgcttataaaataattttagactaattagatttttttttccttgaactttaactaaattatattctttgaactttttttaccgttaaaaattctccctgaactattaaaattgttagatttaaggacttttgtctattttattcaattttactattttagtga

SEQ ID NO: 299610 - DNA, 3031 bp, Cannabis indica
gaggaaaaccatggttacaattaataacagaacagaatttctaaggcaagggtactccccaactttgcctcgtaaggggaaaagaactaaatacaaccacctactgcccctatacaattgttttccattctctacacaaatctaaaaaggataggtcctcaaaatgtttagttctaaaaacccaagtagctgtccaaaatttaacttgctcccacacattctgatttagtagtcccaccatggttacaagagatattccttttaaaggaagggtacagaagtccaaatttttgttggctaaggaaggggaggagtctatcattccataaattatatctttactaagcgatatgcatgaaaaaaaggtggttttgaaggtttcgatagggtaaattgggctcctgttttagatactttgcaagaataattctcttgaggaagatgttggattgtgatgggattttcacatgagttggtcatacataattggaaggaaggagcttgaaaaggatactgtgaacgctattgtggaattctatagcaatggcatgatcataaaattttctatcaataaaaccaatgcatgtctatttcacttagcaaagttagcaatgtttgtcctcatatgcttgattaagagcatttacaaaattatttctaaagtcctttcggaaagattgaagtcagtgtttgtagaaacaatcttaaagccccaaggacttccagagctaggtgtcagattatgggtgccactttactttagcatatgaagttgtagaagaatacaggatgcttggaaggaaggggcagtgcagaaaataaacttttaaaaggtttatgataaggcagagtggtctgtgctagagaagaaagggcttagaatgaaatgggaacaggtttcttaatctcagttacatattcttatgattaatggaaaacccggaaagaggttcaaagggtttagaggattgagacaatatgatcccttaggaaaaccaggaaagaagttcacggggttcagtctggtgaccaatcatttaggaaggttagtggaagcaaaggatagaggtgtcttttgcactttggttattcggaaagaagagaaggttgcatcacatttgcaatttgcagatgacactttattttgtaggaaacatgacgttacaaacctatccaatctagccaagctacatgatattttttgcttggtgttaggagtgttgatcaatttgagaaaaagtgttttgttagggattaacttaaagggagtaattagacttgtatcacacagattaggaaatgaggacattatgttctaggtagttactacataacttcttggggctgatgtaggaggacgtagagaatcagtgagttatctagagatttggttatctacatcaatcttagagagattcaacctctcagatgcttggggattttctgatctttcagcaagatagataaaagtttagcaggttcattcattatattctacttactggttttataatgttgtgacatgacttttggaaaggctagagggatggaatggaagaaaggctttttgtcttaaggagggagctttactttgattcaattactttgatcagctttactaacatattcgtttctatttccaagtaccaaagcaagttgcaaaggagacggagacgagaatattcttatggaagggttgtgattgagaagaaggtgatcgtttggtaggttagaagaaagtagtccaactgagtttcaaggactgggaataggcaatattgtaaagcgtaacaaagctttaatcatttattggttatggaaattgtctgtggaaagggatacaccgtaaaacaaggttaatcaagaattatggcatactggaattacttaatcgagcgaatgtcttaaacttgactaaatcattatgaacaaattatgttcataccaacttccaatccaagaaaataacatgactaaccattgaggaatgaattcaagtatgcaccaaggtaaggatattccgaaaggctctcctacatgactattttacacatcagtgagacttgaaggatcttcttagcattttcaaagttttgacgtagccacaatggtagtgtatatacaagttatgagagcactaataagtttttatttctatagtctataccacttcgtttctatgcctttgaatgctatgatttcaaactatgatcctctgcacacgtctaagagaaaagtagtgactgaatagaaagcttactttagagactggactcctctctgaccgcacaacattttccacatgtccaatgccttaaattcaaaacaaatcagagttatatataaatatcaaatccgactcaaaaaggaaaataattcaccaaaacccagatgaaaaatctatcaagaactaaatttgaaaataattacaaattcccgatgatgaaaagaaaacaaagatccaaaagtggtaatgaattaccagaagaatcaagatcagtaacggtgtgtaagatccaggagtcaccaaagttgactagagtggaattgggtccaaaagtaatgggttcatgaccttctcttgtggcttcaatgtataaagcaagagggagtccaacttccattcccatgcccagcttcctattaatgactgaaactgcgaaacctgcctccgtccctagtgcaaaccgcctcgtcttgcccgagctattgcatttcacctccaaaaactatttcattgacttcagaattatactccgattcttattaattcaatcaattcgtaagagagatagatagtgaaagggaaagagatattacagaaggagaaggactgggagcttcatcttccgccatggcaaacagacacaagttctgttggttctaaggtcaaattctgaccatgactcggtacttctaccttcttacttgacgattgtgaaatattaagggtgtgtttgtgcaattacaggttaattaatatgcttggaattttaaaatgtaaggtgtatttggatatgaggtggtaatt

SEQ ID NO: 299611 - DNA, 2721 bp, Cannabis indica
aagagtttgtaccagaagcacattagctctagaaaccaagttctgctgctcaaagcttcgctcagactgccatcttatggtattgtgtgctagcggccccaaccattctaatattgatgtcatcgcatcgttccactctcctgcaaggactggatcatagcttgatgaggccaagctcttgctgcatggttttaactttgccctaagagcagttctcacacttacaggcaacatattgtacaggtcatctcttgcatcaagtccaatcaagtgtggagaagccgctaacttctcaattacaacaacaacatttgcatagtgaagagacaaggctgcagcaccaagggtatcaggtggagcagccaacaacttagaattagatatagaacttgatgaattaagctctatgttgctggacataattaagtctgtgttggcatcattgactccattcaggattcttgagtgaattccatttgaactcaaatgacaattggtgacaggagaactgtttccacccatcatacaccctttaaaaggccccacttgagtcagtcgattagctttcacgttagatttctttccacgggaatggtcatgagtttgccacatcttcttggtcattttactaattccagaaatcggacctgattttgtagttgacctcccaataggacctgaatgaaaaatattccgtttattgccagtaacagggccggaatttggtgttgaggcaccaacactgatagggccagaatagaaattattggttttatgtgttgaggcaccaacactgatagggccagaatagaaattattggttttatttgttttagacattggccctgatttagctgcaaacttcccaaggggacctgatgcaaatctaggaagactgctctcagattgatgagctgaagattgcaacattgcagatactgattggctacgataaatctgatcagaaccagaatcttcagtttcaccaatgtcaatcatctgtggagctccaaagacatgcttgatcctaccaaatagcgtgaacataaatcgtgccaagagaagaaccgtgtaatcataagtcctgttccaaagggagtcatcttttaaacgcttcacctcatgcttcttccatgtgctttcttctcaaactccagcaaactggcagcatctgaatcttcattactcttcattctccttaacttgttcaagatctgcaaacacttccatctcttgatacaaatttgcattaagcaaataaacttttccatcttcttagctttcctttccattttcttccatgtaaatgcccacccatttggatcaacaccatatctgatccactcattgaaagcttgttcaaaactcttcaaagtggggtcattgcacttctttccaagtctagccacggcttttgccacatgcaaaacattatcaatcatttcggtgcatattaatttcacaatgtattcatcatcatctgaaattagtttctttataccaactgagtttgtaatctcttctctgaacctagcaacctgcttatcagtcagagactgccataaatggatcatcttagacattaaactcgctacttcaaatgccaaaactcctataattgctttctccacagcagcctcatgcttttttggggtcttccaaaggctgcgaaaccacgattctgcaaccatctcttgtcccaaagatataatctttacaccaaattcaacatcacgtttattgattctgtagggaatcagcaatgataggaaaaacaatgaattgagttcagtggctgactaggtgggacttaaactgataaagaatcaaaagaccacctgcaaaagaataaaaattaaatcacaataaaacctccaccagactcaagctactacatgaaatttaagaaaggaataaactgaaccctaatttttaattgatggacaaataaatcagaataaaaaattaatccaaaaatttgtgccatataattttacacacccaatatctagaaacaacagaggaaataagtccaccgactcaacttctaactcatccgaaatttaaactcaattccagatgaagtctctctctctctctctctctctctctctcaattctttacctctcttttgaacaaaaaaagcaaaagaattttacatatgtagaaaattcatagtgaaattcagatttcttcttaaagaaacccataataaaagaccctatatcctataaataaaattggtaaaaattccaaaacccccttgtacacaacatccaaaagaagctcctttttttttcctcataccctggttgcggcatcaaacaagttcacaaacttaataacctcacacatagattcacaaaacaaatatcccttccattattagcacaaattctactcaaacaaagcaaaataagcagaaaacaatataccaccataactaagaaaaggtaaagcaaaaatcaatgataaaaaaaaaaataaatcaaagacttaccgatcacatgaaccacaattagtccacgagtctaattttcagcaggaaattgaaaatgagagcttttagagagagaaaaagaagaagagagagaaggggaagtagctaagaagctgcagtggagacttgaagccacatggagaagcacagctgaaaaatgtaatgaaaaaagcgagtgatattaaagatatgtcttttattttaatttattttattgtca

SEQ ID NO: 299612 - DNA, 2261 bp, Cannabis indica
atatcatactaaaaggtataatggtcaggttagggcttattaatgtggtttgaaaactataattcaatgccaatgtgttattaatatttgtttttactgtttatgctaaaacaatatttttcatactaaattatgattttctttacaactttggcttatgaatatataaatatctaattatgtacctgtaacctattcaagtagaaagtttgttgaccaaagtagtataacaactgtgaaataaatctccttctcctgaacatttatttgcaatccaactattttctttttaattaaaattcgataaatgatcaaacaacaaggatagctgatcacctcaatttttgacactccaacttgacccagctgctatatgtgccattatcatctatataaaatttggatgaatggtaactacaaatcacatattactaaatgatgagtagcatgatatggtcctacacaaaatccaagtttacttaatcttaaaactttcttcatgctgattaagtaaactttgtaggcaataaacagatgtcttgtttcttttttcttttttgtcagttgaggcaatgaacaatatcttgtttcttttttcttttaatgtacttacgatatgttaatatgtgcttaataattgcagatattctgtatccttagttcccaaggatgagtttccaccgggccagtatgctctagatgtttccggtagctgttatttgtcgttaatctttatatatgcgaatagactgatggtattgtaaattgacatcagaaggatctgaaacttgcagttggttttaatttaatttttttgttttacaattttaaaatggtttgtattagattacaaagtcaaagaaacttcgaagttaggccctcgtcctgagaagccaattgagatatatgagtttgagaggtatttattgtcctttctaattttatattaatttttaactttttaatgagttggatgatgcacttgaataacctcctatggtacttctttcttttacttcattttatttatctctcgatattttctgaaaaccattttgcaatattaagactaactgtttatactgttctcccccaaaatatggattgcaatggatttgcagctgtccgttttgtcgaaaggtaaattaactctgggaaaggctttaattcataggaaatcatcattatcattgttatttattttgacgttgttcattgttaatttgcaaatgtctttgttagctatcaaaggtggtaacatcctttcaaacttatggcacacaccatgctgtaaccattggaaatcgtccctttgtaaattataatttctgctgcagcatcactcttttattagatttcacattgttaatatctcctctggtggttggtatgctagagtattaattctggcaggggaggtcggtctaagacaagcgacctctttctctttttcagaaaaaaaaaagattaattctggcatttgagctgtccttgatattgaattttaatttcaaataacgattgtgtggtctactgtttgcttagctgctgaagatttgattagcttggtagattaattactttaggaataagtattcgactaactcaaaaactatgtacgattaagtaatttagcaagatgttatacaaattgcataagtcaccacctgacaaatgcggttaatcactttgccgtctatgtgcgtactgccatatgcactatataagagtattgaggagctgatcaaaagcatcccattttgagagaatgcatcctacctagagcaagttagtgagagactcaacaaagagagagacttaacattttacactgattaatgtgtagtgagaaattggacttataatattctatatgtttaatttttccaattaattatttatgcttgccacattacgcctttttgtcagtgtgaactgagatctttaatgcaggttagggaaatggttgcagtgttggacattgatgttttgttctatccttgcccaagaaatggacccaactttcgtcccaaggctcttcagatgggaggaaagcagcagttcccctacatggttagtatagatgttgtccctgttagactatatatatagtgtatgtaatatagcatatacaaaagatatgaaatgcggaaaataaactgtaatcatatcaataatatatgcaatgaaaggatcgatgtacctccagccattgatctttgagcttcaatccctgcgatagcttcagtattggagttcgg

SEQ ID NO: 299613 - DNA, 1942 bp, Cannabis indica
atataatacttaatataaaatatagcatatgtgcatcgcacgtaacaatatactagtacatataatagaggtcaatgattgaaacatcaacaaaatcgtttttacttttaaatatttaaatatgttattttttgaatctctataattagatttgtatttaatactttaattatcaaagttaacttttttttcttcactttaaactacatttaacactataaaaatattaatttatattagtttttaatatgctatatcatgtatataacaaagtaggcctctctttccttgaaaaaaaaaatatgtctccaacttaaatcctaaatctaccactgatgatgtgtaggttatattattccaaaaaaatttaataatttatgtgaaagaaaaattatacatacaactaattatttaaactttagtaaatctttttaataaaactaacaaagtaaaaacaaaaaaataatcaataaaagcataaatgatgatccaacctaatttttttccactatataaaacagaaaactagtgccattgttgtgatcttggtaacacatatacaagttggtggtgcatatattttaagtggtgacagaagatttgggatttgcagttaggtttccaatacacatactattagtactagtagtgactctattgacaaatataattaattattatcaaaaaagaaaagaaaattgagttgatattatcatggcattgtgatagggatgagactctagctacattattagtgctggtgagtattgtcatgttggataatgttttatatcataacatcataattagtgtcactaataattattagtgggttagggttcaattctcttatatcccatatattaaatttattagagaaattccaatatatatatatttttaaaattgatacttttaattttcaccccttatctcaaaatttattatgtttacatttttttttaattattctatcagttttatttttattatttcacgatatttttattttttattaactaaaattttgtctcaatttttttacaaacttatacattcatccccaaagaatacactctattatacttaaaattatatcttgactatatgaaagtatgagaataatttaagtataaatactcatataaaaatatatttaaattaaattttatttaaatgtaaatttagttaatatgtaagaaaatgtattcttcaacttctctcaatttaatagtggatatacaagacataagcaatgacacaaatgggagggccattagtgaagtgacaatttgtgtgtgaggagtgggagagattgatcattcatcaatcattatattcattattcattcctataatgtgttaattcttattagttactaaataattactattttgagataattcctaaaaaaacatttaatgtgggaaaattttcataatacactaaaaatcagaattttttttatacttttatgatcttttttattattattattttacatttttacgattttatattattttaatgtagtttttatgttatcaaacgttatgttatatttctacaatgttaaaacaaatgtctgcaagaaaaaaaaaattggtagtaaaaaaatcagaattctatatgtaaatttttgttattgttaggtatttctgaaataatctctttaattaggaacattacgaaaatccagcccaatacttttatgttaagaagcccaaaactcgtgaaagccataattttgtcaatcctatcactaaattttaaattaaagatttataacacactactatattttaatgatttgatttcttaacagtacttcaaatcaattaaaaaaaatgaaaattaaagatttataacacactactatatgtcatcattttgtttgttacctgtgacaaaacttaacaaaaagatcaatttacaatactg

SEQ ID NO: 299614 - DNA, 3099 bp, Cannabis indica
ttttaagtgtattacctttaatataataaaaatacctagcataaattaatatacgtgcctcgcacgtaatttttactagtatatatatatatatatatatgcattatgaagaacaaccgtgtgtgatccattggtgtccacataggcaatttgatgagcccttacacaataattcaccaaaaggaccaactcaaaaatcaatattcccgttattaattaccatttaattttttatttatttcatttttgtttgtcgaattttgaatgttttaatagtagagttctccacttgcatttgttttcttaatcatatatattagttatgtatatttaaatgtgttgtgtggactgaattgtttgtcaatcagtgcattatataaatatatatacatgataatttttttccttcttatttatgcagaattttctatatatatagcctcaaaccatgtgctttttccttcccatgcatgcagggctaggcatgcaccttatatatatgaatatactatatagtgcatataaataataatgttgtgagtgtatttatatatttacatatgaggtcttccattattgatggcatggttcatacaatcatacttattgtttaaattgtgatccaagtacttccacacaggcctttaggataattatattgatagtttggtgcctccttttttaattgataatctaaaaaacttattgtactaataaatttattcttattagcaatccatatttatttaaatatcttctactataattgatttttaatttattttttctttcttcaattttgcaattgtagcaagtaaattccagctctttgccaaccggggccagctacacaagcaaaccattcccaatttacacaattatctatcagtgataacatatatttatataaaataggtaataacgttgcattgggactcatgaaaatagttatagttaactaataatagtttacatacaaattctatttagatattctagactctgcctcgtaaattcaaacacatgccatgcactgttattattattagcatttattttttcaggaattattattattattagttcagaaaaagaaaaaaaaactaaattatgttgacctattattgcagaagttattgcaccatatcacctgattggacatcattgataaggacaacataatctactatatcttttttaaccttaattattattaatgactattacaacttacgagcacaaaagactgatatatattgttgttacacaacttaaaataatgtttatcaatctttttctaattattattatcagtttctagttttcagtgatatatatatagataaatcatacgtgagttacaacttgtcatatataatattgaactcttacttatatccatagtaatatatctctctgaagtgttaataaaatatattttgtaaccatataaaatatatatattgatgagaacaatagtgctctctgatcagtctctgctggaatttctttttcttcatattattatatatgctcgttttactagttatggttatagttagttgagttgttaataaagatatatacgcgctttcaagaaccaaccagaaactcttctggagtgaatattgacattatttacttaatttatacatatatatatatgtaagaatattatacagctgatttatactactatatataacagattatatggtatctttttcctcgtggttaatgcatgccagagcatggtttcgtgcatatttgaggctttatgtttgccagtttgggaatatctaacctctttaatttagaactaattagccattaattagaactgtataattattaatgtacatgtatatttgtgcgtagtgtgcatgtgtgacagtgtcagagggatatggagatagtgaacttcaactacttgtcctggtttattggtatataatatacattggtttaagattattaatagactttgttgcataatattgtcttaatatatacccaaacaacattataaaagaattatatgtatatctcaatataacagaaacaattgacataaaatagaacataaaaaaaaatgaacatgctgctgattcggattatagaagttatccaacatccaatttcgagaaacaaaatcatactcaccgcatattatgtactctttcaaaggaaaaacaatctctcttgatctctagctctctaatttccaaaccatacaagcacacgccaaattctcaaattttaactcatagaatattgaagagctactttctctaacagctgacttattatattttaaagaaaaaattataatctttttacatgttaaaaaaaattatataattgtatttttcaaatcgttttatttttctctgtttcaaaaataaaaataaatcattctatttttaggaattttacaccacatattgaaattttcaactttttattttttttttactgtgggtggaattttttttcaaaaatattgtgtactgtgttaagttttcacagttgtcccacggttattttttagttgttccacactgttattttaattgttctattttgttattttacggtagttttataaaaagatagtattttttaaaaaaattctgtgtgacattaaaattgtaaatttttgtctaaaatccagtatttttgtaaaagctccttctatttttggcatacgcataaagtactatttttttataaaaaaaaaaaattacaatttaacgtttaaagattttttttttttacttaattttacggttttctatagaaacaatataaaaatagcaaaaaaaactaacataaaagtaaacaggaaaataacattcaaacaacatcaaaacaaacatacaaataacaatataaattaataagagtacaacataaaaaaaaatacgtattttctgtaaataaaaatacataaaaaaatcgtaaaaaaataattcaaaaaattactgtgaaagatgcatttttgtaattttttgttaatttggtgtatttgtgaaataattcctctatttttctcgtattttttcatattttttagggggtatgttgaaaaaataccac

SEQ ID NO: 299615 - DNA, 5355 bp, Cannabis indica
ttccattagtgggccacatttacataaaaaccctaagtctataaatataactataatccttcatgtaaatggcttaaaattcatttcttacaagctaaggaaagaataaggttcataaacagtggacaaatacttgtgtaatactgaaagatttttctagcgaaataatattgactcgtgaactatagaattagtcctagatctaattcgaacatgccgtccaaatttacccttacagttggtgaaaattgctaggcgaatcttcttaggcctaatgatggacccgatgtctattaggcctccattcgaaaacacgaataacaagtgcctatcattatattgttctaattctctataattaaattagagtattttttttaatttttttttataaatactaaaaagataaaaaaattacaaaaatacaaatccataatttttcaacatttttacaaattttaattaatttatttttttttacaaaaactcctacaattatttttcttttttcaaaacaattttattttcacgttgctactacataaaaataacgttgttttctaaagaaaaaaaatacaagtaaaattcctgttaaaaaaaaataaataaaaatataaaaaaaaaatacaattttaggtacttttatgtaaaaatctcaaaaagttaaaaatgaattattgtgtaaacaaaagtgcaattttagtgtatataaacattactatttatatgagaatagtaaaacattgataagtatgaaatgtcttcagttattttccgggaattagcaaatcaataaccttagacatggacttcaaaacttaaatttatcattggatagtgaatacaacattaattaataaagaaaactatacaatatcttcctattcaattttatgaaaagaatgggcatgaaatggaatgaagcttagaatgtataaactccaacgcctcaggatgtcagctgtgtactttgaagcacttcaggtgtgggaacagctgaagtaaatcgtttcggcttcgtttctacaaaattaaacataatttctatcaaaaacaaattatgaatggcttctcctatgtacacctatatttttttattatattttgcaaaagttataaattgaaccttttattttattaaatgacaaaatagactctatattttctaaaattatacaatagaatcctaaattgattttttgtcaaaataaaacttaataataatctgatttagagatattatgataaaactagttacattttctgtatctgttcgtgttagaaattgtttaaagttaattatattaaaaaataaaattgttgaaaattgacctcagtgtcctgtttttactattttaaaaaatataaggtctattttatcatttaacaaaacaaatagtccaattagtaacttttacaaaacacatagtctaaaatggtatttaccatttttttcccgtttacaccgccttcttttccaaatgataaattccccaactttcttttcatatactttcttaaaaaatattttctaccttttataatttactatttaaataaaattaaaatatatttagtactctcaattataaatattaatttgtggaattttaaaaatttaatcacaactttttaatatataataagaacaaataatttaattttcttaaaaaaaatattctattagaacaaaaattattagaaaatcacactaatcaattttcatgcttgtaaaaatagaagtgtgcacaaaataatatcttaaaaatgatcaaattaattgatatataaaaagatatgttatttattttggagttgtggaaaaaaaattatattatattttaaatatataagtaggtcgtttatgtaatatatttaataataataatttatggaaaatgggtgtgagaaaaaaattaccttaatcccaatacagccattcacatccagtgtggtaagtttatcagagcaagaccttgatagggcctccaagcacttgtcactcactcccactattccaaataagctgcaatatttgatagtcattacactctaaaacaaactaactaacttgccaagagagtcaataaacattatatattattcaaacatggcattaaattgtgttgctcttttctcacttggcagaaaaaacttattctattcctatttcttactgctgcaatggatacgtagtttgaccaagggaaccccaaatattttcaccttgtttacttccacatcagtagaatccccagattgatagtatgtaacaaatataagagagctcatgtttcattccaaaataactcagaaaaacaaccctttttttcttctggagagggagagagaaagatgcaaatcaaatctaccaacttctaagtgaacctaatataatgcatcccacatgtaaaatctaccaacttcgatatgaaaattacctcagaaaatcaagtgaggtgcaaccctctgcaatggctatgacccctgcgtcagtgacacgtatgcacctaccagaaaaatgtaatttttttttatgaaactattcaagaatgttgcatcaaatacagtttagacggttagcagttccagttaccaagtcaaattgagagagacgaggctatgacacttggctatggagaacactccttcatctgagagattctgaaaataaaaaccatcaaccaggatcagtcttcagttcataaatacaatagagttgtattctaggaatgcctgagatcttacctgtgcaccacatagatccaaaaatttgagatgggatagaagcgatatgctcttgtaagtgtcatctgagagactgagaaattgaaacatagcaaattataccccaacaagaagaataacacttaaaagccaatgcaaaaactccattaaattttacctagagagggcataaagattgagactttggagagaagagcaactcagcagtatttgctgcaagccagaatctgtcaacttgacacacctaaaaccaccaagttgctaaatgaaagcactgtaaagtataatactggtttctttgccacttgttgatattcaccctatataaattcattaattcctacttgtttggaatacattataaaagggaaaagaaaagaaacgttttaaaaggaaatgcaggaacatccatcagatgagtactgtcaaccaaatcaaatttaatagcaacaaagtgcactgtcaaattatctgatcgcaacaagttcacaattgaaaatcataagaaacatggttgcttgtgtatgggaacacagtgaaaacttaaaaacggaatcttctaagttttaccaataacatttcaatctatttcaatataaatcacgtcagaaatattttaaatacctggtcaaattcaaaaactctatttctgggtaatgatcagcaacaaatcgcaaacttttgtctgaaatattctgcaattgtcacgttaaattctttaaataatgagggcacttgaacaataaattttaatagctcaaattcaattgcatgttcatgtttcatcaactgcaactgtggtttatgaagtttgaactgtgaatctgtgactaagtaaattaaagcattatctaagatgcagaaagtaggacggacagcagtaataacataccttacagccacttaagtttagatcattgatatgtttgcagtttttcaccaaacttcttataccactatctgtcaccctggaattcaattcatatatttatttagggaaatgttcggtttactctacagtatacatattgttttgaagaaggctaaatctatgtacctgacattccagtagatagagaagactttcagtttaggacatacacttgttatagcttcaattcccttatcagaaatcttttggcaaccgttaagatttaaagattccagattttgaagtgtacttgaacactgcaaagatgcttaagagtcaatttcattgatagaaaaacaatgtaatttgcaggataaatttttcacaaaacaatatttaattataattaccaactccaccacataatcatttttctatgagcaaaaatcttaaaccttagtgcattatatggaatccgttgtgctatacatatattatagtgaaacaagttaaggataatgcaagagccttaattgcagcagaagatgaaaaataataatattaaaggttagggcttctattatcaagcaatcaaattattgttgaaagtaggcaagggtaaactcatgatccctttcgaaatcattttttatggtcaggtgttttaccttgctcttaaccagttcaagatgtttttcttcaatatcttgtgcaaattcaaggtttacctgcttcacatgctgatatctcggctataaatatggcaccatgaaattaagttaattaacaacaatgaaatacttaaagaaatcattaaaagttcagaacataaagtaagtataaacagtgatacacatagtttgcttcactgatgtgaagaccaaactaagtaaccctctattactaaatctgaatgtacctctcttttccttctttgcgtgaagaatttaacaatttcacacaagagattgaatatagcatcacttaaaaagaaaatctttgctaaatacattatctttgaccgttcaatactagttgttggccaagtaaagataacatctcatgaagtaaaatttatagaagacaaaccaaggaaagagcagaaataagcaaattcccagcattactcctctctcgaaaatcaatagcctgaaacaggaaccaaaacccagattacaaaatctatatactaaaaagaaaagaaaaaagcataaagattagaaattgggaaggtgtaaacagtaccagccaaagagaagggtaggaggccaaagtgcgataaatccatgggctgacgagcaaaagagaaacaagctccctctgaggcaatctggtgcttacgattctgaaaaccttaggcaccgtttctctgcaccaggtggtgagctcctctgcttcttctccttccatttcgactcacactgggattgttgcccagctcaagcctcaagtaagggaaaaccagtcttgggttggaattttgatgtaaacgacacgtcgttgttgcaccattagctgatcaaatacaatagtcaagcgactcaagcccatcgacccaacaatttcgggttaaccgactactagccgggaacataccctctgatgtgacgcgtgtcctcgagctaatttttcatttttggctaggaaactcgccgtctcgttcactcataactcaaatgagatgtttttttttttttttttaaggaaaatggtaactttattaataagaagattca

SEQ ID NO: 299616 - DNA, 14396 bp, Cannabis indica
gacaaggttgataatctgcttgcacaattctgggcaatgccgcgaacttcttaaagagaataacctaattcgtgactacacccagattttacgaggtaaatttgtttcttttatttttttttgcatcaactatttcaacaattttaagatgatgtgcttctgccatgaccaccgatagaattggtgttgttgatattaataaaacttttcattttgagggaaatctttttaaaagatggaaatagagacattttcttgtcctaattttcaatattgttcccacgatctctcgttttaacgttcctatgatcaacaacgtctttcttcctgttactatttttcgtgcatttcctatataatgcatcaaaaccaactacagaaatacatcttcttctcacataaaaaattataaacaaattatgcgattatattaaaaacatgtatttcgaacaatagtattattgggtgtgatattttgacggttctctttcatgcagtagagctccactgcaatgttatttcgacttggctgttttatcctatggatgtcgagactgatagtctacttgcacaattttggtcagtgccgcgaacgtcttaaagagagcgacctaatctgcaactcaacccaaattttattcgataaatttgttccttttattttttttacaacaactatttcaacaattttaagatgatgcatttctgctatgactaccgatgagaattttggtgttgttgattatattacaaacatgtattctgagcagtagtgttattgggtgtggtactttgacgattctttattgtgtaacagagttccgatacagtgttattttgattgagttattttatatcggggtcgacgagactgatagttagcttgcacaattatgagcagtgtcgtgaacattttaaagagagcgacctaatccgcgactcaacctagattttattcggtaaatttgttccttttatttttttttgcaacaactattttaacaattttaagacgatgtgtttttgccatgactaccgatgataattttggtgttgttgatattaataaaactttttatactgtggtaatcttttttaaagatggagacataaaatgttaaacttgacgatgttatttttcctcactacgaaaaatattgcttatattttgactactgataaacttgttgtttctgatactgttaaggatgatgaaagatagaagcaaactactgatttagcaagttgggtcgagaataattttttgtgcaaaaattttattcaatagtttatttgatgacttgtatgaatactacaattgataaggaaatttgggacgcgtttcaaaagaaatacgacattgaggaggctggaactaagaagtacgcagtcagtcgctacctcaaattccagatgactgacgataagttagtggaggctcagtctcatgaacttcaaaaaattgctcatgaaataatttctgaaggtatgtctttaaatgaacaattccaaattactgttattattgacaaattgcctcctgattagaaagattttaaaattactcttaggcacaaaacaaaagaactttttttaaaaattctaatcactcgctttcgcattgaggaggaggctcgcaaacaagaccagaaagaagaagtgattgttgtttcaaacaacaacgctaagaaatctagtgcgattttgaaactcactgggaaaaattttaagaattagaatcgcaagcatgctccaaactgcaataattattctcgaaataataatcaaaatttgattccaaggaaccaaaataaacaacaacaaccccttaataataagaatgacccgacaatgtttttgtgctttctttgtaacaaactgggtcatacatcatgcaagtgtcggaacatgtctagttttgcttcgcaagctaacctgattgaagagctaccttataaaactttgattttagagatcaacctaattggtggatcaggatggtggtgggtagacactagcgcttcttaccgtgtctgctatgatcgtgctatgtttaagacgtacactcctgcaaccgaggataagaaagtgatgttagacgaatctcacactacaattgctgtttgtactggtgttgtggaattaaagtttgcctttggaaaaaccacatgattctcaaagaagtcatgcatactccaaagatgagaaaaaaattttggtctcgtgctatctcctcaacaaggtgaggttcacacatattataggggcaaatttgtttactttaactaaaaatgagatttttgtggggaaatggtgtgctactgaaaggatgtttaaattaaatgttgaagttaataaagtgaatatttttgtttacttattgtgctctctcaatacttggcatgccagactttgttatgttaacaaacacataattaaaaatatgagtagtttaggcttaatacctaaaatgattttgaaaagtgtgactctggctaagatcacaaaaacacctcataaatttttaactagagaaaattagcctctaaaattaatttattatgatatttgtgaattaaatggtgttttaacaagaaactaaaaatgtttatctttgtgcatttaatgaaaaataaaagtgaagctcttgatatgtttaagttatttgtggttgaaattgaaaatcaacttagtaggaagatcaagaagctacgtagtgatagacgcactgaatatgattccactgcttttgttgatttttataactcacatgaaattagacatgataagactgcaccgtatttacctaaaatgaatagaaaagttaaaagaaagaatagaaattttattgaatctattgttgtcattttacttaattatggtgctgcatcttattggtgggaaaaaattatcttaactatttgctatctgcttaatagggtacctaacccaaaaaacaaaatttctccttatgagatattgaaaatagacaactaaacatatcttattttagaacatgggattgtttagcttatgttcgtattcctgatcttaagagaattaagctaggaagtagagccaatgaatgtatatttttaaggtatgttggtaatagcaaagcctataggttctatgatctaaatgcgcatgttatagtggaatctaacggcactgattttttttaaagatagatttccatttaaattgagaaataataggggcacatgagctagcaacatttcagtgattaggagtgatgaacatactgaggatttagaagtaaacctaaaaaaagtaagagagcgaaggtagctaaagactttggttatgatttctatgcttataccttagaggaggatcctgctaacctctaagaagcatatttttctttagacgcggacctttagcaagaggccatagatgacaatatgaaagacctcagagaagcgagtgtagtccttggaataaagattactaggtctgataagggaatttctctagatcaatctcactacattgagaagattctaaagaaatataattatttttactataaacctgcttgtacctcatataacccaagtgtaaaattatttaagaacaatggagatggagtaagacaatcagattatgctaacataatcgatatcctctgatatgctactaactatactagacctcacattgcctatgtcttaggattattgtgcaggtttaccagtagacctagtatagagcattgaaatgctattgagagggtcataagatacgtaaagagaaccatgaaccttagagtacattatcaaaagtttcctactatccttgaaggaacatcgatgctgactggaacactttattaaatgactccaaagtaactattgactatatttttagtatagctagtggcgttgtttcttggaaatcaaaggaacaaactattttggcaaagtccaccatggagtctgaaatgatagcactagctactgctagtgaagaagtaggttggttgagaagtctgctagctgagatcccttaatgggaaataccgataccaactatgttgatccactataatagtaccgcgactattgcaaaagtttaaatccattattatagcggtaagagacgacattcgtcgtaaatataatactgttagacagttcctctctattggagcagtaagagtggatcaagtacgcattgatgaaaacttagccgatcctttaatgaaaagactagctagagagaaagtccttaaaacctcaaaaggaatgagattatttcccttagaatgatgagtctctcataatggtaacctgacctatagactggagatcccaaaaaataagttctataagtaataacaagttatgatgtgataaaaatgagatcatgctattgttataagaaatgtgaagcatgaattcctaaagcgatagaaggttgagataatagaaactcttaatgagatctatactctatgtggagtggagtaccgagctacatgagtaattttgatagactcacctatgtgaatgttgaagtgggatagacgtgcatggccattaaagcatgtgcttttggactaaaccctagaaaggttgtgtgtgatacatcgttagaggtagagttcaagactacaagccactctagtacattttaagatgtattcactacgcaaatattcaaatcgaaagatacctttgtctatgctcaatcttattgaaaatatttttaaaaaaattcaagtaggggattgttggaacataaatgtgaattgttaaaaaattgaaaagttggattttgaagttcttagaagactagtcccacattgcttgggaacacttatttataagtgtatatataatgtagatatgagcaattaggttgaccccaaggggtacccacttatatggaagaggaaagagtcacacaaaggctcccctgaacaccacgtgcgtcgtcgtctgaccgagctgagttggtgtggtgtgcaccttattttttggagaaaatttatttattaaattattattttttattaattaattaaaatatttttttaagtgtttaattaattggtaaacagagatattttcttgtcttgattttcagtattgttctcacgatctcacattttaatgttctcatgattagaaacatatttcttcctgttaccaccttttgtgcattctctatataatgcatcagaaccaacaggaaaaatacatcttcttctcatagaaaaattagagacagtttttacgattatattacaaatatgtattctgaggagtagtgtttgtttgagtgtggtatttcaatggttctttatcgtgcagtagagctccgatatagtgttattttgactgggctattttatcttgaggacgaagatggaggagtcacacaaagactaacctgaacaacacgtgcaccgttgtccgaccgagctgagctagtgtggtgtgcaccttcttttttttggaaaaaatttatttattagattattatttattatttaattaattaaaataatatttaagatgtgcttaattaattggtaaacatagacattttctcgtcctgatttttagcattgttcccacgatctcacattttaatgttcccatgattagaaacgtctttcttctcgtcaccaccttctgtgcattctctatataacacatcagaaccaacgtgagaaatacatcttattctcacagaaaaaaattagagacaattgatttgattatattacaaacatgtattgtgagcaataatattttattgagtgtggtattttgatggttctttatcgtgtaattagcaccgatacaatgttattttgattgagttgttttatcttgaggacgatgaggaaggagtcacacaaatggtcacctaaacaccacgtgcgccaccttccaactgagctgagttggtatggtgtgcaccttatttttggaaaaatttatttattaaattattattttttatttaattaattaaatattttttaaacgtgtgtaattaattggtattttcttgtcttgattttcaatataattcctatgatcacttgttttaacattaccatgatcagaaatgtcttttttcctgtaaccacctttggtacattctctatataaagcatcagaaccaacgagagaaatatatctttttttcatagaaaaaattagagacagtttatacgattatattacaaatattactctgagcagtagtgttttattgggtgtggtatttcgacggttctctatcgtgtagtagagcttcgatacaatattatttctactggactgttttatcctgaggttgacgagggaggagtaacacaaaggctcacctgaacatcacgtgcgcggtcgtccgaccgagctgagctggtgtgtgcatcttatttattttttttttgagaaaattgatttattaaattattattttttatttaattaattaaaataatttttaaatatgtttaaataattggtaaacagagacggtttctcatcctaattttcatgattgttcccacgatcccatgatcagaaacgtctttcttcctgttgccactttctgtgcatttcctctataatgcatcaaaaccaactggagaaatacatcttcttctcatagaaaaaattagagacagtttatacgattatattacaaacatgtattatgagtagagtacatttttgggtgtggtatttcgacaattctttatcgtgcagtagagttccgatacagtgttatttcgattgggctgttttattccaaggacgatgagactgatagtctgcttgcagtcttgcacaattctagacaatgccgcgaatgtcttaaagagagcaacttagtacacgactcaacccaaattttatttggtaaattagtttattttatttttgtgcatcaactattccagagttgaaaacgcttaattttgtgaaaatattaagctctttcaatggcgtccatggtcttattggccactgcaatattatcatgttttgtacatatcattcatcaaacaatatgtttttttttcttacatttgtaaatctgatgaaccgtcattttggttctttgaagggcaatgccaattttgtaagttgttttaaatttaaattcttaacaaaaataaacaagcttcattctcaaacataacaacaaaacaagttctctttcgttttagtaatttccaaaatggaagtacattgagttccaagggagtgctactctgattgcgcattttctagcaaaatgggcactaaatactatggtagaaggtgatatcccagtggatgcttttgaagttggtgatcttgcagttgcagggccaccagacaggggtccattgtgttttatgtatgctatacactatttagtttcaccaatgtttatttgctagtttgtttgttttaattgagcctctgatgcacttcttttgtatatgcctactttttggggcttcttcttctagaatttataatttttttttttacatatatgattttttttttttccaattgtacgtacattaattacttataaaagtatatccaatatacacaaatgttaattttaaaattttcaatccaatacaatcaacagatccggaatgatttggattgattaatttttttcttttgaaagaagatttagattgagttaaacacatttggacgaggaacctccattcgaaaagccactagaatgtgagtcgagctcgagcatggcgcaagaagatatagaggagggaagtatgcgagtgcgtggaacccgtgtgcgtgtgaagcccaagtggttgcaagattttgttaggatggagtctcgttgaagggtgcgaaaccagaattgttgtttgccaatttttacattttgctgattttctgaaatgtaagctgggtataaattttgaagatatacgtttatgaaatgaaaactgcaatttaattgcatttgggagacttgtcttgtctcgaaaaagactctatcatctaacactggtgctttcattgtttttcagcatgaagaacgaggaactggcagcaataatccaggccttggaagcaaattttcagatgcatgccaaacaacaattcaccaaattctctgcgaaattggaagaacaggtcgctcgtttagatactcgagtggattaattacaatcatctacaaccaagtcgcaaggggaaattggcaattctagtcggtcaactgaatcagtaacaccacaccgtttgacttctcacacagattcacgcgaggtgaattcgatcctcaaaattatgcgggtgaaggtggctagattcgaaggagtgggagagtagaggattggatttaccagatgaataaatttttcgatctccacggtgttgcgccagctatgaggttgtcgatggtcgccttccatctcgagggggcatcgtccatttggtatcaatggatggaaaagggaggagggttttcagattgggaatcctttttgacagcactgcgattgcggttcgggacttccatttatgaagatccgttgggcaaaattgcaaagttggtatagacgggacgtgtttcggcatttcgggaggaatttgagtagctcatgactagaatttctcgagttcctgagcagtatttcccaattactttgtatggggtctgactaaccgaaattcgatgagaactgttgttatcgaatccaattgatctagcagacgcaatggcgaaagctcaactgtatgaagatcggcatgatgacatcctaaaccgtgcccgcggggaagggtaccgtcctaactggtttccgagaatctctcaacccagttcactgacaacaacctctccagcatgttatgcatgtttttcttcaattccaacttgattttattaagtattaatgaattatattttgataaaaaacgaagttcttgataggtcctgaaaggatatatttgtcaagaggatcctgccatttcccccaagaaccagttgaaagttgcatccctagaaagggaaaaataaaatgaatctataaaaatgacgtctctgctatatacatacgcatggatacgttctctctaactgagcaagctattccaacgcattttaagggcttcgtacgccttggaacaaggcacagcctgcagtataattcttccatctatagaagattctgttgctaagccaagcctcaacaaggtactaattgctttatcaactggcatctcaacctgcataccaaacacacatcaagatgactaatcaatcagtagctgcatatagccaacactgatcacacaatacagtcacactaatcagtaatcattctattacctttactttaaacatggcgtacatgaattgctcgcatttgtccccaacactgcggcggcagatcatctgcggtcataacaaagttcattatttataaataacacacttggctgaaatgtcatgagatgaatgcacactaaagatttaattgtatatcagtctatcagatgtgcaaaaaggaacaaattttaagcttgaagcccctggtagaaatcgatggttacataaaatcaaaagcgtgcgtatgaataaaattaggaggatgtgagcaaaccttgtcccccattttaagcatgattgcataggccaaaatagcttccttgtactgcatgggtccaagtaaaagaaaagtcattggcaaaataaccaatgaagcataatataagtgttagttattagtttaatatatctcttccaaatgcaatcacatattcgtcttattaattttgtagaagaaaacatcagagccagttcactacataaacaaatactctttctcctgcataaacaaatccaatctagtttggtcttttcctcaagcttaagaatttttccataattcaatcactatcgataagacataattctatcagtattaactaggtgattcctgtacatgttattgggttaggtcctaagtaaaatcaagtttcttaaatggataggagtgaagtctactacttgggccttaggctgttagatggtggtatcacccacatattcaatttttgacagggttaaataaatatataaacgttccagatttagggagaaggaatgtttcatatggccaagtgggaccacatacagcaaggtctagttaaaagttcaacactaatactcaaagttatgcaaagaagcttctatacagttctggggaatgactttttgtctagtaaaggtagaattttgttgattaaaataataagctaatagcaagaacacaattctccccttttctacataatttgggttcagactcaaaacctttcccttaatgaaaggtcagatgtcagagttacaaagcttcatggtagaaaatactgtactggctattacaaaatgtctagccaaacatcatatttgtaccttgaagagagaaattttagataggtcaattcttctatctcccaatttttcctttttaaatttgtgtcatgctaagaataccacctaagaagatggaaaggaaaaaaaagtaaatgagaagttgtataggagttcattacttgctgttgttcagaggcgtccaggagaaaatgaactgagccaaagccactggctaaggtcttttcatacagtgtcctgttgaccaatagctgtagtagaagattgctataaaacatcaattatatataaaaatgacaaggaaaaaaaatattaaaaagtattctgcaagaaaaatcatactcagctctgaaatgggacataaagacttacttgatacctatcccaagtctgtttgtatccaagtaccactcgagacacagatattatcagtgcagtgatagcaaccacatcaagtaatattgctgatctaacagaaaacatgaaaagaaaaaaccaaacagaatattactgcaacttctcgaagaaagatgctactcaaaagcagaagacactattaagactaacagggttggcctttgaattaacagatgctttaacagaaacgaaaatataatatatatatatatatatttatataaatctacatatatatatacacacacacaagagagagagagagactgcaaaaggattctaatgttaatatcaggacttcagtatgcagctaaaacaactctatttccttggcattacatcaagccaaaccctggttaacataaatattggatataatacatgtacggtggctactggtagttacattacatctaatctatctcacataaaaaacccacttgaacaatccatcattacaaaatgagtggccatgattaaatgacaagtaaaatttagtacaagacccagttcacaggcctatcactatcttaaagaatgatgtgtcaccctactattcacgctcctttaataaaatataacctcaaacaattacaactacaatatgttctacaatagttttgagaaaagtgatacatacggggataataagacattctcgaacttgtagttaatgaagtatgctgaaagccccaatattgttgcaacatccaaacgtacctatgagatgagaaaatgttgtcataaggctaaattttttacttattcaatatataatatctcatccttctaatcagtaatctgatacatgaaagaatgatcaaagctgggaccatagatccaaaatatggtacactgtccttttggaattttttttatatattcatttctcttgcacattttttggacaaagaaaatacatacattataccttatcttagtaagaacaacaacaacaaaaaaaaagttcactaccctatctcattttaaaatattcagtctagcaaagaactaattgaaggtaaaaagcattataattagacatgttcttgttcaaggatggtaacttaatctttcaaactttgtagtatggaattggtcaacacaaacacaaattgacttctttttccacttaaacgtgctgttaatctgttacaaaatctatgttttctctgttattctcttcagctaactagtaacaatatgagatcaattgtaacaagttacatgactggaatatgaatcattgttctttgaatctcatccagatccatatagcagacaattcagagatgcaagaaagatgactcacttatcagagaactaaattagaattaggagttggtattttagttgtttggtccacaatcaagcaacttaaaaattctaaaaataaacaattttcataccgtgtctataatgcggaaagatagctttttgtgaggaaagacaacctacaaagtagaaaaattcatggggaacactggaatgttagttactgaattgagtccaagaaatgtgagaaagtacgagacataaaacgtgatacgtcacatgcacttactgataaatctggaatgggaattctttcgtatatctttaattgcaatgatggaatgtctgctttgttttttgtaccccctttatctacttcgtcagtataaagcaaaatcaattcttcaaacgctggttcctaatttgtaaaacatcagaaattaaaatagggactatctttcccccaagacaaactgtcaaatagtacatcagttgcctgttgaagaacaataattactacaacataagtggaaggtcaaaatgaaactgttctcacatcttttatgcttgaccattaaaccgaaagaatgatggaattaagacacataagcattagtaattctttggccgatgtagaaaacatgacaaacacacaccctgaaaatggttttggaaaaaaaggtaatagaagatcaatttctatactttagtcctgacaaaaataaaataaaaatccaatgcttagtcatcaatactattgctggtttgtctttcgaagtaccgcgagagctaatgtgttcatctaagtgacacagtgagattcaatgaaggagaataataaatagaatatggttgccaacttttcaatacttagtttcaaaatagtaaggccactttggttaagcattttattaagctaggcaaaaagtctttgaagttttggtcatttctatatacctaagaaaaactttatgacaagaaactgacaaaatagaattaaaattttattatcatcattatattgtctggatttatcgatggatacaacacaaggttacgactacagaattcagttcaatgtaacaaggaaacatatgtgagcaattttgtttttgttttaatagagtcaagaatatcctttaaatgttcttgtaagtgaaaaatctcaggtgaatcaaatatgatcaataaaatcaaacttgactttggggtataaaatatgtacaatttcaagataccaaatgagcattatcaaaaatacaagatactaaacttgtgcatggggttccatctcaagcgtgatatttgaaagaatcccacaaggccatcggaaagttttgtgggtgtacacatcaggaaagtatactatgttagaatttaggaagtgtgtggttaaggtgcatgactttcatctgaaaaccataatatacacaaatgattcaccattttctatattgtattagagcaaccttagattagggttcgaaatttaggctgttaaaaaaaataaattaaaaaatatagggtttcttatcggaaaccctatttggagtgtgtttcaattctcaccgcccacacgggaggattgcccagtcgccggtagtcgaaaccccaaagtccaaccaccagaatcgctgcgcgtgaggctcacgcaccgccactgcctgcaaagatcttttccacgtgtcggcgcgtgggacagtgaatccggctccgattcacttctgctcctttttcgacccatctctatcctccttgcatctgtcttcggtggttctcattttgtggtttgatacttttgactacttcgtatttggatattcttcctttgttgtttgctttcttcctatactctttcaattgtttttgctttcgagattatggcagagacaaaatcagacccaaaatcaataattgtttctgatgtgattcccgtgatgtttaaaatcacagaccataaattgattggtttgaattatttgaaatggagtaaaacaatttgacttaatcttaggagtattgacaaagatatcacttgactaatgatcctcccaaaggaaaagtaagtctaattattttgtgttctataaaagatcaactgtcggcattattttattggtcgtgtatgtggatgatattgtaattactagagatgatactagaggcatctcattccctaaatcattccttcatacctaatttcacacgaagaatttgggggtgctcaagtatttcttgggagttgaagccactcaaagtaaacaaggtattat

SEQ ID NO: 299617 - DNA, 4101 bp, Cannabis indica
agttatttagtaattttattagaggttaaattgttagtaataaataatattagaaatcagttatataaccatagttaggtaaattaagatatatactgtatatatcactaccctccttatctgtgactacaaatagcgacactactaattagttttaggtttttgtctagttttatagaaattaaaaatttctttagtacaaaaaataataatgcaactagtttttttccctcatgtaataagaaggaaaaacataatttaaacccacttacacttatatatatccagccctactatataagttaagtatatactttaaattacataaaataattattgtttggaagattagttgatgctttaaacaaggcgtgataaaagtaaatcattatattttgtttagtatttttatttattagttttgttaatatgcatgatattataaatagtccgtcccacaaaataagtccttagctataatactaacagtgagcataaacgaaagatgtcattttttaattagtcataattaattattgcatttaaagggaatgtttggcactaataatttaatcatgatgtgtgttcgtgtggggtacgttcagattttatggtgcggaaacgatcttagcactagagtatctccacatgatggggatagtttacagagatttgaagccagaaaacgttctagttagagaagacggccatatcatgctctctgatttcgatctctcactcaaatgcgacgtcgttccgaagctcctaaggcgtagtaataataataataacaaaacgatgacgtcagatatcgaaacaaacgacgacggaaagtacgaaaggagttgctcaacgacaccgtcttgtgctcttcccatgcagcctgttctctcgtgtttctcagtcgcaaaaaggaaaaagaaaacaacggtcgttacaacgataactgaaagagccgacggtcacgatccccatcacgaacaagaagatcaattagtacacgtggacgatccagaattggtggcggaacccattcacgcaaaatcaaagtccttcgtgggaacacacgaatatttggcccctgaagtgatatctggtcaagggcatgggagtcctgtagactggtggacactcggagtgttcctctacgaaatgttgtacggaagaacaccgtttaaaggagaaaacaatgagaagactctggtcaacattcttaaacagccgttgacttttccgagaactggggttagtagtgccaaagagtatgaagagttggttagggttcaagatcttataagcaagcttttggtgaagaatcccaagaagagacttgggagtttgaagggttctgttgagattaagagacatgagttctttaagggtgtgaattgggctttgattaggtctgttaggccaccggaggttccaagagatttgatcaagaaaaagaataattctatgaggaaagctcataatagtaattatttaccaaagttaatgagcaagaaagagagggaggaaccgtatcagatcccacatcaccatcatcatcatcatcatcatgttgattacttctaataatatataatttagcttttttttattaaaagaaaattatattgtacataggtgaaaacagatgaagaaaagaaagaaatattaattaagagacgtttgttaattttctaatctgtttttcctcgaaacgagaaacataattattattgctatggataatgtaagatgaacaagctagtcattatgttttgtgaattatatattgacatctaattattaattaagttctttttaataattatgtgtgtatgtatgtatgtttatatcgatatcatggtgtgtatgtatgtatatatgtttatatcgatatcatggtttgatattatgatcttcgaacttggatgtatatgcttcatatatatatatataaataattcgtgtatgaaataaatgtaaatatatgttttgcttgcgtgtaaaggagatggatcccataattgttctagtgtgattctcatgagaactcgatgaagtcatgtgatgacaataattactcttctcaatgatggaaaatatggtataataaaaaaaagaaatgaaaacaattttatttttaatttttgtgaaatagtcactttttttttctcatctaggcactttcataaccatgcattcacatgcccttttcaccgaaacaaaaaaatccatcattttctctgcttcttttctatctttttgttacatatattttaatgtatttgatgatcgagtgaagagagatcgagcgccaacttgatctcttataattagttataacattttttttaatcatgaaagtatttcttaattcaataattctactatatagttaatggttcaatgcaactcaagcttataactactcgtttattaattcatatagatctagctaataagcaacttttattaaaataatattgttgtaagtattttaaagtgcttaatactacaattttataattagttaccaagttttttttttatataatttactaaattaaaatatctaccacacctaatattaaaataagttaataacaatatatgtcccattatataataaatttgtaccttaaaatattacaatatggataaagcttattaatctctcgatattaggagatcattggatactagtttggttttttggtcttattagacgatgttgggatatgtgcaaatagaagtgtcatgctgcaaaagaaggatctataaatatattggctacatatcctgcttggaccacttggaccggaattaaattgaatcacagaatagaaaacccagtcaaaagattcacatcattctcaaattgaactcaaactttttttaaaaaaataaaataaaatatcagtaaagtattgtattaattaagtcacaaaacaattataactcaactataccaccccaattaattacaaagctttgtatagagtttccacccaatttttatcaatattattaaacttttgagtattcatatgttgaattctattacaaacggtgtaaataatatttttaacaattatatggacaatggggagcttttaatcccaaagaacactgtctagtttgccaaagaaaatagaccataatagtactcatgaagactttcattctccttgataaatattccttctttagtctcctctaaatactactccgccgggataggtccacactacaaaaaattttacttttagtcacaacaaaacttttaactaaaagtgaaaaaattgtgactaattataaattagtattcttatgttgtgactaaaaaatctatagctaaaagtattagttacaaaaattacaatttattctgactgaatgtatttttagtcacaatacttgttgtgactaaaactaaattagtgacaacttgtaactaaatactatgttttagtcacaagtaatattttgttgtgactacaagtcacatttagtcacaaaaaaaattatgttgtgactacaaagttgtcactaacagtagcaattttttatagtgccatttgccaaccgagccacctaccaagctcgaatttttttcaaaagaagaaacaatactatttaacccatgacatgcatatttgggcactaatatttttcagaaatacaaaccaacaattttttttggtaacattttctctaaacttttttccacaatgttaacaaaaattatatccggacacctcagccatgagtatctcaagtagagctacaataatattacaaatgaacaaaatacattgttttgatcaaaaattagtttgcttttgttccatggacaataattggactaatttcttttcctttttttaggatgtttctttttgttgttgttaatgggttttcagttagaaaataaaaagttcattactggttactagctcatcattggttactggttaccatttagtttttgtggttacgttcagttattttgtgtaatatatttgccaatcattgttttgtacattttctctctcttttcagttatatgtgttggattttgtgccctagataaaactcatttcaatataa

SEQ ID NO: 299618 - DNA, 3074 bp, Cannabis indica
agtggcccaaaaaatgaccttgcatgcgcccccatgtgcctattttagttttttttaaactgtcgtacgacatgttattttagaaaaatgacttgtcatttggtgaaaacaacatgtagcagggtcataaaacgacccgtcattttgtgctacaaagggggctggaccttatgtgctacgacatgtcgttttgcccgatagaggcaaatgacatgtcgtttttgtcgtccttgtcacctaaaaaacccaactcgcaggtctgcgggtttgctattcagatcggtgcacccgcttcgtgacccaatcggatataccatctttgtccaccaaatccgatgtcgtttgaagggttttgttccagtttcaatcctttgtcaatttccaacatccattcatccattttcacaaaaaaaaaaacattacccataaaacataaatccaaaaatagatttcaccattgatgaatatctccacaatgatggaaattaaaaataactatccataacatatataaacccatttaaaatagtatatctcatatttacacaacaataaacattttaatccaaaaaagaaaaaaataatgaatttcatatttgaaaacaaaatgggttagttcagttcttaaattaaatatactagctctgataccaattgttaaactatcacatagattatgaactatccatacacacattaaacattaatcatcattgctcataaccattaaatctaacatcaatactttatttagaacatccaaaataatatacacatacctcccattaagccatccatgtgagccattcgaatccaagaatcactaataaaacaacacaaattcaagattggagaagagcacaatgtggagctatcccctattctcttcatattaccattaatccttttcacttaagacacacacatatatatatatgtcacacccctctaaccctaataggctagttactaattgggcttaagtggttcaatactggtatactataatttaattagccgattatagttatgagggtgctctattgccttaacataataaataattattaatcatccaattatggctgttgataaatattggacacatatttaatgattgtgtttatggcattaagcttatgattatattagtccacaataataattctaacactattttcaagaggtatgcatttgattcataatttatcaattcttgaattggattctaggtgtatcatagatgatatatatgaattttacgatttttcatattttttatattgagtaatagtagaaatgggtcggatggtaattttagtcacacaaatacagagttgtatcaagtattttacggggcaatattattaaacaatttagaatagggtagttatatttacaccccaccaaattataactacaccctaaaaatataattacatatttaacctttatgaaatgacctaaataaatatctttattttttattttatattaatttattttttaataattaagtatactctaccacttcaatttaatataaatacattaagtaaaaaaattgttcattataagatttgaaaccctaaagtcatttaatgaagtaaaattttatcaacagagatcactcaataataatattaaatttattatatatgtatttgatatttattgttattgttattatatattgtgttaatttgatctttacattgtaatttatcgtttcaacatcattctcaatttttaatttttaaagaaatttaattgtaatatgaatcaagcccaattataattatatatattgaaaagaaaaatagtgcaacacaaatctaagttattaacattcagattgtattagagacatattcttttgatacataaagtgaggtgtggctatgaaaaataatatttaattgggataaatttagtaatagggtgtagttaaatgtttttggagtgtaaatataatctccctttaaaatattagggtttagcgaggtaatagatttagacaattttaccctcatagttaaaagcttacttaagagtgaagtaatgggtaaaatagaatttttccaaaaaaaagcttaagtcacctttagtggttaggtggctagtgacttgtgtgtgaggtggatagtaggagaaaaccctttgggaagggtttgcttagcctataatcaattaaaagaaaaagtcaaaaatcaaaagatttatcaccatcatttcatcgttctcttcttctcactcacgagcactcaaaaactaggaggtaatccacccttttgaatatcatccaagtgaagaataacccaaaggaatcaactctttcatcctcccaaggcaactaacataaaccctagctcattttatggtttttcaagggttaagttcagtttttaatgactattttgctagggagctgctaggtgatcctaggaagttcaagtaggttaggaaataatttttaaggttatttaagattgtttagaattagtttgaagtgttttgggtggttgtagtaaaagttatgcaagtttgagttcaaagaactcaaacttgacttgtttgtgataacatgaattctgttgcgaattagattaaggtttcttcatgaaaaatgttcattatgatgattttaggtaacttgaaaattttggtatgtttatcttggaatataatgaattatgcaagttttaaaatcgagcattggtgtttcaaactgtccaatttacgtaaaaatcgggatatccatttttaaaaatggaccgtccattttgggtcatatcttgagactctaacagagtattttctcaatatttagggtattttcatgctatctattgttgggattttatgccctaaataaaacccatttcaatacaatatgatttgttatcaatagaagattagaagtcatttatgtttacatgtagttttcatgtttatggtttaatgtgtacaaaatctgttaagcccaaaacatatagttattcacaataatagtgatgtcaacatagtggaatgtacttgtgattatatgcttcaaaagataatgtcccttgatt

SEQ ID NO: 299619 - DNA, 5073 bp, Cannabis indica
caaaagatcatgacacatttcgtcagttgaaaaacacaataccatatgagagcaatttgttccatcaagaacagggatttgatgaagctatgatgatgaatcattttgttgttccagagccatatgattttcagatgcctaaagaatctcaaaagtttaaggagactaggttgtcaggtcaactacagggaacaaacgtggatttgctgaaaaactttgatctgcatgatatcagcagttctgatattctttttgcggaccaaaaaggtgaagtcattgacctgaccgcaagccctgccccaggcaaagagttttcctctgttgccaactcctcatcgttttttatgcctgaaatggaaaaggatggcatgagaaagtccagaactgctagaagattatcctttgacaaagacaatcagcctaaatttccaactagtgcagaaatgtgctcaggttcaaatatttggaattttgtaaaagaccagaagaagaatttacatgttggagccagcaattcctcagatatagatcttgaaaataatgctacacctttagacaaacgtaacaagctattaaaggattgtctcaaacataggtctgctgaaaaatcccaagggttacaataccaagggaggaactcgtcacttcatggagacactccactctcacatgcgctccatttggccagtccgcaacaaaagtctccatggacaatggagtttcttaacaaaataaaggaaaagagtagatttcgtcatcagtcccttccttgtgagactgctccttgttttgggtgttcgggggatgtatcaaaggttaccaagcgaagaagcccctcaattcttgaatttttcaagtaccaaggaggcaacactatgaggaagataccggaacaaaagaaacataagagatctacacagtcaagttcatcaaaagatgaaaaaccttctgcctctattcttccaacatggacacctctagataaaagagcacggcaggttgtctagacttcttatcatggttttgttttagtgctcaattaactgaaaacactataatttcattggtgttctaacatgactttgtatgctaaatgcagacactatcttttgcaaatgacggtaaaggccaaactaagctcgtctggaatgatgaaatccacaatccgaggaaaaagtttctccatcaaatatgaaatgtcaataaactttgctagaagctcatggatctgccattatttggcttaaagtggaggttggtctgtaacagatcacatgtatcttgagcttttactagtagtaagcttcagagtgtgcttttatcctgtaattcttgccctgcttccagtttaatatatggcataaaaatgttggcaaaattttggaaccctgtggcttctaattaccaaaagcgcattaatgtcttgcactatgctatattatatatataaacccatacgcaaaaatactcataataataataattaacttaatacaacatctgtgaccaaaacaattgactgaatcttgtatctgttgcttgagtgtcttagaataaatggttatcacttataattgtatgtctaaaatgaactacaaagacgggaaaaatactcatacatatatttcttttcttgtcacctggacctgagattcagtgtaatatagccacacaccttgatcatactttgctttagtacaacctgtttcccgcctcaaaaatcaacactgagaaaattataatacactaattctttttgccattcttgaggtttcgcacagtcatcacaagctgctgcctctcaccttctacctctgcaaatcgtagacttaactctgagtatcttccttccatttcttttagttcattctccatggatttactcttatccttgagtgatgcaacttcagttagtaattctgaaatgttatgttcactggcacgggaagaactagtttttgactctttctcagcttcctgccttgccaaagcaagttttgcctccaagttttccttttctttattcaatttctttaccagcatctctttttcaaaaactgatttcttcattcgctcggtttcatttttcaatcttactctttcttctttttcttctgcaagattggctttctccttattgagcctttctatttctgctctgagcttctgaatttctctcagaaagcttcatgcttttcttccttgtagagattttgagcacattcaagttgctgggacttatgtttagctccaacgacatcttccctatctgcttttctttcagatcaatttcattaacaagttcttccactctcactttgtcctggtctctaatcatcacaagttcttctgcgactttctgaagcttttcttctagaattatgttgttctggcgtagttcattagcttctgtctgtgctttggcagcttgacttctgaattcctcctgaagatgctcagctttattagaacctttcaaccttatattccttaaggcctcctctgcttggttggctttctgttcttgctcaactttagcacgtttaatcgaatccagctcattttcaaatctattggcttgtttctccagttccttctccaaagctttaacctgcatttcaagttcattgagggagaccaaagcatctgcaaattctcgagcttgtttcttaattgtttcttctaatctctctacctgagattcatgctcttcagtagttgctatataatatgcgcattcattttctaattttgtctgttcttcttggcttcgctttaacttcaaagacatgtcatagttatcctgtttcaaaaggtcattgttcaacatgagctggtttatacgcctgttctgtttttccctttcctccttgtaaatgtctatttcatcacatagatctccaattttagcctctaataggtccacttctgcatcattgtgtttcttagcaatcgattccgatgattgttggtcaacctgtgtggaggcatttttagcagcttctatcttgcttgaaagatccaatatttccctacttttttgatccagtgtatcttcaagatccctcacaaccagtatcaattcagagtttgagtcttgggtcttctgcagttgcaactgaagatcattacttaattccttttcatgattaagctcctctctaattgcttctaactgaactttcgaatccttaatcgcagcctgtaatctttttggagcctccgcctcatcagtactttgcaatgacttgaaatgttcacactctgatttgagtgcatctctctcctctctgagaataacaatgtgtcttgataaattctgaccttgtttgatctccttctcaacatgtctccgaagagactgtatttcaagttctgaaagttccgcttgtctcatcaacatggtattttcatttttgagtttttcagtggaatcatctgaagcttctttcaaccgcacacttggttggttgtcttccaaactgctcggtgattcaagtaagctgtcatctgaagctgaatctgctgaccagttcatgttagatctattcagacttctcttatttgtctcagaaccattaacccttccattctgtggggcagaatttgttacgaagggtgagagaaagctcgcagcatcccgctctgcgggagtcatgttgttgtagttttcatcctgaaaaaccataaccaagaacacattcacttaaggttcatcataaagagctgtttttttcttagagattttgagtttctgatatcaaagtactgtttggggaaagaaatacaaaagctttaatatatcttacttcagtataatttagattgtttccatctgtatcccagttgctcccatgactctccacacttccattctttacaagttgaggggctccattttcatctctgagattaaaaactacattttcagtaactagcagcagaaaaaaggggaagaaaattcaataaaaagagtagtgatgcacaaatagtaactgattgttactgatctttaatcacctttcatcatctccaagcatcctttgaatcagaacctgataattttagttgaatgtgaggaataatgaaacatgttttacaattaaatcacattcaaataaaagaactttggaagaaattggtcagtgagaacaatactaaaatagctaaatcatgtgagcatgtacaggacagaaagagtactaacatgtaaaattgcaccagaatttgcaaatttgagaggcattgagacagtcaatggttcagtctcagttgcaaaatcagagaaatcaattgaagcttcacctagataaccagattttgatgttccctacaaaaacccatcagaattagacctcaaaagaaaagaaaaagctcacacaagaaaagaaaaagaaaagattttgaaagagggaaaggcatggttggaaggtttcgtacagttgaaacaataaaatggtaaagtttctcattgatttttcctgttttgctatccattgtaagtttgactggttcaaacacaggattttcccatgtacaagttccatccttaactgcaactttttctaatttcaccgatggttttccagcatcctccggcaccaaagttatcatcactgaagattttttcaatttgggcacctgcaaaagtcagaagaaaaaaccagatatgaataataccataacccaacggcatttccaaccaaaattttgtcaagaactcgagaaaaaatcataaaaatttaaacttgcatagcaattcaaaattagaaaggaaaaaaaaaaaccccactttttcatttttgtagaatataatttacctgagaaacatgaaactgtaatttgaatatggctttgatcttgtttttcttgctccatgacttaaacatggtttccttctatctatcttgaaattgcttgatatcccagaaaatctttattcccaaaactcaatcactgctctggtacttgggccaacaatgctgcatcttaggacacttttcatatacaaattgttgagtagttacataagaaccaaactagacgtacctctctctctctctctctctctct

SEQ ID NO: 299620 - DNA, 2258 bp, Cannabis indica
ttggaactgttcactattccatgctgctagtcatcatgagaagagattcatcacaccaataccataaaacttactaaaactaataataatatctaaaagatttttctttaaattcaaagttttttttttctactttttcaaaactatacacatagataaaaaaaaaggccaaaatataatgtattctattctagtttaactaaaattaaaaataaaaaaaaaaaaaaaaaaaaaaaaaaaaaaacccaaaatagttaatgtgggtggaagaagtaaagagattctttttctatatctttctatacaatcttagaatcccacctctctttctaaaggaaaaaaagtaaaagaaaagaccctattggttgaaacgacccgcaaagctacggttgctccgacgatattaccgggaatcagcatgcagcaccaggtgtggtgcatccaaattccttaaggcccaagaaaaagtcatcatcagctaagctcatgttagggatgagaacaccctcgtcttcgtcttcatgatcttcatttaatgcatcaatatccatcatcaattcctcctcctccattgaaatgacatcgctttgtttctgatcatcactttctctttcttctggtagtattactagtgtcttcgcagctgggtcttgttcagtttgcggggccggagagagtttcggggtagtggtcgacggagactgatcagaattttttgtgattattggagtaacgtttggtggaggagatagtttattacgagtacttccggcgagtgagttccggtgagttggacgagggtgagtgtggtctccggtgtaagtgatgatgaaagattctgggtcgttgttgtttcgctcaacttgttttctcgccgcacaaccttttgagctactgcaacggtagtagttcctaaccgaagaaacacatgaaatttactcgagaaacaatcagaaaaaaaaaacattgaagacaataaaaataataataataattagtatatacctcggaaatggagaacctttgatgggcttttgcccgtatttacgccaagcccatacatcagtggagagattatcagccgttacatggcacaccgttttcttctgttgattcttcctgttaattaaagaaaacaataatgggttttgtagaatttaaagttcatcatgcaaagttaaaataatcatataataaaaattaaaccaataatcacactgtaaaaccttttcctcgatctgggcatcgaagacatgggtatggtgggcaattgaaatggagccaaaggtaaagtaacagtaggagtggtgatggtggtcttgttgttgacctgatgatgatgatgatggcgatcaggcgttcgaggcagtagtacaggaacttgatgatgatttcggtctagttcatgcaattggtactgtcgtcgtccacggtgtagtccaccataaccagaaatgtagggttgtcggggcatgaatcgaggcccaacaacgacgtcgtttgaagtcccaaaatgatgattcttctgctgttgctggtggtggtgttgttgatgtcgttcttggtagtgtagcagctggtgttgttgtccactagatcctccaaaatcagaaatgggggaatttggaataataccctgagcaaaattagtggtggtgcccgttatagtggtggggttataattattattattattattatttgagaaaaagggcttgtagaattgttgcaattcttcgaaagtgtttgtagttctgggctcaggctgctcagccaccaggttaggaaacgaaaacgggtcgttttcttcctcaaatgtcaacgaagccaagcaagacaaagtgtccacagacgaagacgacgtcgtttggccactaccttgcattgagtccatcattgtggtggtgactgaggctgagtctgagactgcccaagacgacgtcgttgtggtcgatttacaactacgaaccactgcgtacagatcccaatcttctgccatttcaaccgatcttttagggggttttttgggtttatagaattgcctagaaattctcgcctaaactagaactgatttctcttgtctatatgtctctctctatttttttttctactgttttctttgccgatttgaatttcaagttgggttatgagaagaatggatacaaaggacggcgctgacttttttttttggtgtgtgtgaataaaatcacaccaaaaaaaaaaaccaaatgaaagagaaagagagaaagagattgtgg

SEQ ID NO: 299621 - DNA, 1283 bp, Cannabis indica
aaattatcaatttattaattgcaatcatgtaagattacattttggaaatcagaagaaacatcacaacttctgaggatacgatcagcaacagaataggaagctcgagccaagaaatgagcaacactattcgcagaccgcttaacaaaaagaacagaaacaccattcaactcttttaaaagagttttacaatcagaaataacattaccaaaataagaaaccatgtcaataggactccgaattgcttgcacaacaatgaggctatcagtttcaacaattacattatgccatagtttcttttttatccaacttaatgcctcccgaacacccattccctcagccatttctggtgcgactaaaccaggccgacaacaagaaacagcttccaccattgtacctgtcgagtccctggccacacagacaaagctgtgtacgtttgaagctgcgaagagggctgcatcgacattaattttcagaaaacccgctgctggtgtgcaccatttttctgcagcatcttcatcggttaagaaagccacccgtggcactagatgtttgtcttgtgccttctcccattgctccaaacagtattgagccaaaatggacacccctgccactgtaggaactttattattccaaacaacatcattccttattctccacaaagcccaacatgtcatgatcaagaccttcttttgctccccatctaacttgtgtaacatactatcaagccatccataaaaagtacccatttgcacattgctggtgtcaataccagtttgcagccaacaaagcttggcaaactgacaatcaactaaacaatggaaagtggtctctcgatccaatttgcataatggacaacaatcacttacattcacatgttttgtccttaacaaagttgtagtgggaagacaatttgaagatgcacgccatataaaatccttcacttttggtggaacccgaaccttccacaacttgttccagaaaccagtcgaaagaactggaacatccccctctcgttcttgttgcagaaaattatacgagcttttaacagaatggaagcccgaactttccaacttccaaaaccacacatcacattgtcgagtttgacttaaaggaatactgaatatgatttcagcatctcgaacattcatcacatcctttatcaaatcgacatcccattcataccttcctgtcaccattagagattgaacattttgatcaacaagggctggatgtgtagacgttattctcggactatcctcgccaggcagccacgggtcttgtaa

SEQ ID NO: 299622 - DNA, 1957 bp, Cannabis indica
aaaaaaaaaacaatgataagcgaaaataaaatgaaacttacatgttgcacagatactactaaagaaaataatttgtaagcagttgggcaaattaaatgacgcccaagaatgcccaaaacaatgtatcagaatcagtttagaataaatgtgttcagtgagatcaaaacatttggttgtgtgcactcatgtatgtttcttcttacaaactcatgtatgtttcttcttacaaaatataaacaacagaatcatagcacagtgattgatatgataaaaagacctgaaagcaatgaaaactattataagcattgtcataagaacttacatgtcgtgggcacttgaactttttcacattatatgttcctcgcttgttcttcttcacacattttatgtgataacaaccacgacaatcaggaactgagcacactaacccctctccagggtatataaaaaaatgacaaacaacacattcaacctgagatcaaataaacagcagatatattcatattcaatctcaatcctggtatacaaagttgttcaaaatagtgacaatattgtggaaaacaaaaacatcagaaaaatcattcaaagaaggtaggcctttaagagaatataagccctagacctacaaagattcctagaatttaaaagatttggaaatcaactaaaatctttaaattaatcaataaattatcactataatcacatcaaaagaccattataagttcaataaaatcaaattttcccaatttttccaaaaatcaaagataaaaaatagatcaaatttataacaaatgatcactgtaatcacatcaaaagaccattataagttcaataaactcaaattttcccaatttttccattaacaccaaagatccaaaaaataatcaagtttataacaaagtattactataattacattaaaataaaacattataacttcaatactcaaactttttccaatttttcaaacaaccaaaaaaatatcaagtttataaaatcttctctttcccaattttctcagcgacaatagaaaattcaagaaaattgaaataccattttgttctcgccaacaagaaaaggcagggaacaacgagactcgggaacaccagattccttcttccggctaacccaatctctcacatggtcgtgcaaagccttagcagtggaagctttcttggtccgactggttcgcttcaatgccttaattgcagcgtcatctgtgacctgacctccaacttcaatctgtatacctatagtggccttgactgaattggagaaaggagaggaaatgggatcgggagggcagtgggtaagggcgatagaagctgataatgaaagattcccgaggtcgggcatggttgtcggtaggttggattgtgaagtaggaagctaaggaaaccctagaaacggaagttttgcaggaagaagaaagagagggaaaattaaaaccatggagagattcagaaatggtgggaattttgggcgggaatggaatttttctttttatcttttttttggtcaaatattttcaggtcaacaacaaaaaaaaatagtgaaattacatatataccccttttactgtgagatgggagtttcacttgtacaagcttttatgttatttttttttccctaggaagtacagcacctacttgaagagttgaacgcttttattttttttcttttttgaataatggttaaatttcattaaactagatcatccaaaatcaaggatgcaaaaacaaaaagtaaagagtctctactaaaagtacggtcagcctcagaaagagaagatcgcgccaaagcatacgcaactttattagcagaccgtctagcaaaaataaaagaaacaatatcaaaatcagcaaccaaagtcatacaatcataaagaatatggccataaggagaagccatatttttgaacttttgcaaattactaatgacccttaaacaatctgac

SEQ ID NO: 299623 - DNA, 2901 bp, Cannabis indica
attttaatatttaaatataattttttttattaacggatagtattaataactggcaaataaataattagaaaaatagtatttactgagaattaaaatttctcttattcaataattttttaactccgttatcttattttactcatacggtatttcttgatgctttcattaataataagatgaactttggagtttggtccattgacctgaaaattgccctattttatatgaagttttttaaattatgactgtaaaaaatttaaattagtattttttgataaggtttttatttggataaatttttaatattattataaattaaaggtcatttatacaatagagaaaatagaatatggaactttttctatccaaaagacatcttcatccaattctaaagcgtactttgctatgttgtgggcagatctattaacttgcctacgagcatgaataatagtagctctaggagaaaagaatagaagaacaaacgtcatcaattagacctaaaaaataagataagtttgtatgagaagaggtcaaagcagaagaaactctcaaggcatctgtttccacatgtgcgattgggaattgttgttgattagctcaattaagactatgaatgagtgcctttgtttccattacatcacttctaaaacagccttggactggtttggataatgcaacaataacttctcttttgtaatttcaaaccactgctccaatactcaataccttatctttaatgttgactgctgcatctacatttatcttaagaatattaacatctggtggcttccatggtatcccaattgctagcctcacaatgtgatctgaagcatcatgttgagccaagtcgtgctggtgtgacacaacaatttcaaagtgtgcttgctggcaggggtggacccacatataagcgaggtggggtagttgccccctaaaaaaattgagaatatatgatatttataagcataatattaactttagtgtaatggttaagctacttagattatacgttagaggacaaaggttctaatcccactaaaagcatattatttttcttttaagtttacttttttgcccccctcatttaccaaaaaaattttgccccctcactttaaattctaggtatgtcattgcttgctggtgtagcacatactgttaagaatgttgctgattgttggttgcacgagctgaggatgtttgttggtgtagcaaatactgagaagttaactgttgttgattggccgcatgggctaggaactttgttggtgtaacacaaactgaggataatgttgttgttggttggccgcactagcaatgtggtttgtttgtgaaacacagactgagggggatgatgttgttgtttctttctgcagctttgcttgactgatcgataattatccatgtagcttattgcgtgtgttgctagagaagaggcatcacattttgttccatcatgaagcactttattcatgtcattccagatactccacataatgcagattaggagttcaacatctaccttatccattgttgttgccaagtggattagataatcaccattgaacataccatgagcatgatcaaaattaatgctaaaatgtgtttttttttcaaacaaacttggcatgcttataggtacgtaaagcatgtccaatttattcccaagcgcttttacaccttgaacatgatgcccaatcaataaattttttgtgcaaggcagtggctatatgggcagagcatgttgaatgacttttcaagcaaaaaaatttaccattagtggtagttgtaaggcccaaaaaaacttccaccaacttttgaaatcatctatagttgattcttcatttttttttttggagattgagtttgctaggtggaaccctaatttaactgagtagatcccatgagtcgatcttgagattggtaaaagcataaaagactggtgacaattagatcaatatcgattttagcaaagtgttcttatagaagagacaacttccaatccatagtatcattgataaaggtggacataggcaaggttggttggccggtccaatgtagctgattagtctgaattcatcatgtcctagaatccaaggatccaaaccccacttctaactcgaaaccctttacctatcttgtatcgaagacctttcaatatagcagttctcttccccaatgtattccttggcatgttaaggaaggtgagtgtccaaggtgtactttcaaaaaggagtttcttgaaaagtatttatgcttcaaaaggcgacccaataaggagtttggattctcaaacaatctccatgtctattttgcacacatagcttgattaaaatcaataaaggaacgaaagcccatacctccttaaaattttgacttgcataacaatttctacattttccaatgaatcttagatccatctttgttggaaccccaccagaagttagctatcatatattcaatttgattacaaaacccaattagcaatcgaaaataactcatagcctatgtaggaatagattggagcactacctttaatagaacatctttacctccaatgcagaaaagtttctcattccaagcatgtaggagtttccaaattctttccttgacattactgaacaattctttcttatcatgacttgaataggcagagagaccaaggtaagttttatggcactcatagataggcattctcaaaatttggctaaaaaaaagagaacgacatgattgacttttgggtactaaaaaattgtccagatgctcgatgataaacatctaggatgttattgaaggccaaggctgaacttgtatttgcttgacagaataggagactatcctagttgttggtaaattgcactacaagaaaaatgagcattactgaggacaaatttcgttggtaaa

SEQ ID NO: 299624 - DNA, 2764 bp, Cannabis indica
actccctaaaaactattatattaaattatatgagacccgataatagcgatattgacacataagagggtgttaggcgccactagtgcctttagcatttctcttaattaaatattaaaatatgcattttaatataaaaacaaccttatttacatgtggctacatatgcaaaggacacatcacatcggaatataattcaagccactagactcgggctgaatagcacttctcatattaaactgtacaaacaaaaattattttaaaattacaaattagcctatactctagtctaagggtcaaatccagtttctggtcctaaaaggctcccaaaaaaatgtatgccacgcccatccactcccctctcaattacactaaaaagaaaaaagatgattagagtacaaactacttccccttgttacctctttttttcgttaaatttcttttcttagtcaatcaccatatccaagtggatgtcctccaattttttattggggaccaaaatcccaaagatgcaacgtattatcgtcggagcatgcaatgacatatcgttcgtcagctgccataacattgacctccccaatctggtctgccaatctgtaaaggtgatggccctcctctaactcccacaccctaatcacactcccggtgcacattagcgcgaacccacgattcatgcacccgaccaaccctctctccctacgccatgccccacgcctcacactaaagttacacaattcctctaacgtgctcgcccgacgcacactagcattcccctgtctatctactataatataggttgagttactcacgtccatcgatgtcaccatcaaaccaccctcgtactcctcctcaccaaggacaaacccattattcctcaaatctaacaccgtggccctcgtatctgtgcatgccaccgctgattgttgactcgtcactctgactcgacccaacacatcgttactcgcctcaatcagcatttgccaacccctgactgagtctgggttcgtcaacgccccaccaactgaaacaagttcctctgtgttgctgtcccagatgtggaaggctcggtcgggtacgcccgcgtataggcccacccaccagcgaccgcagccactgaaatcaaccaaaacaccatcgtcaaccgcattgccctcgaaaactcgacgagtatgtgtggggtcgttgatgagcgccacgtggatgtctccaacaagagtcccaaagactaggcgatggttgtttgtgataatgatacctgtaatagcgtgtgagaatggtccccaggatagctctggtggcggggacggaatgtgctgacgtggttgcgcgtggggaggtggaagagacgaacggatccatcagagaaaccgcaagcgaggtgagtgtctgagagagtgaggcatcgacagttgaggctgttggctgggccatcttcttcgttagggtcgaacgggaggatggtgtgggagtactgagccaaccgaaagttctctgctgtccgatgccaatagatgtactcgtcacgccatgtgttttggagaaggtaggaacgaccccagatgcggcgagttagacgatgccacagatggtccgacccggagacttcacgccacctggggcacacctggtacaacaaaagaaaacacaagttgccaagttttcatttttatcccatgcaaaattgaataattaataaaagaaaacaaaataaacaaaataatttatttttacagaagtgataaagaagaatttaaaccgttgaattggatattctttctggggtcacatcattgaattaatgaatttggaattttttgaaagagtgcaattccaatatatatttttttcaataaccatttatcatatcaacattttttattttaacctaatggtttcttattttaaccaaattgttttatgaaaaaaacgtaattgttatgttatattcagatatatgatataaaatattttttgtgatgatcaggttttttctttaataaatttaatcataacaaatagaaagtatttactcaattagtaagaccaagctcgtttctctattcttaattgactacaaaagaataattcacaaagcttactttgcaaaaaaataaataaataaagcttacttaaaaaaaagatttttgccttctaattatgacctatttaatatggtgcttcttagacgtagcaaatataaatactctttatagaattgccacatcaatgtatagttaatttgaaaaaataattttaaaaaatttaatttaattttatgttatcttttttaattattaattgattgctaatttaataatcttttgaaaatacgtatttttttaatcactttacgagactgaatatggttccaggagcaaattaaaatcctaaataacgaatgaaaaaatatatccgtaggtgatagtacgtacgaaatataaagagaattctaatatattatataatacattgttaattttaataaatatatagtaccatgcaatgcatcttaacgtaatataaatatataattgtagatatacccataacataaatatatactcgttaccgtgaacttggattatttagcaaaaataaaaaccgaaggtacagaaaaatcctaaaagtaaaagaccaatagaccatcactactacaaaataggctattcccaacggtttaaaggaggatcaattattggaaccgttggaaaaagtaagtggaagtttttcccatcagtttagcactgtagcaaaaaaactgttggga

SEQ ID NO: 299625 - DNA, 1978 bp, Cannabis indica
acatatatgtattattcttttataatatatacatattagtattaatgttaatttggagttggagaattgtgattgtgttagggttttcactttcatcactaaactttcttaatccttaagcaatgtctactgtttgaatgtaagttgagtaaaagcttttgtggcactaaagtaaagaatgaaagaaaacaaaacaacattgaaaaaggagaatagatagagaagcaaagaggtggagccatctcttgtttttctacataagtgctatgtaaccatttttttttataaatatatatatgtaaagatatccacatcacatattatacacactcaaactccaagtttgatttggatggctttggttggaactgtaaaagagataaaatatttacttaattggcaatggcagttgcaaaaggaatctgggaaatgggcctctattaattctctctccacacgcatatacatacatactgtccaaacatgaaaaagaaacaatctttgctattttaaccctcaaaaacatcgattttgggagaatagggcaaaagggtatttgtcaatatttgtttttttttattacatattggctaagagaaaagcaaattattaaaaaaaaaaaagtaccaagcaagctagtgacagagagaatctgctcagcctgttcacacaggaaaagaagccaggtctctctctctctcagcctaatagttttgtttttagattattctaagtaaaaaaataatataattggaaactcatttaggaaaaaaaatgaagtcttttgctttttttaaccataaatgatcaaaatactggtgggtttgcagctatgaaatggttgaatggaccaaactaataaagagtattcccctaacccttcaagaagaagaaaaaagttgaaagtgagataaggtttttttgtattgaagggttccatcacagatatcaattgtagtggctagaaagatatatagggttggtgagtggtctcaccaaagtgcagaagataatcagtagtggtagtagtagtagtagtagtaggtgttagctgttagagcatctcatctcatctcaaatcttcaattcaattcaatttcaatggtaatgttgttgactttaatttacccttttaccctcaagacatggagagcaaaaattgtaagaaaattggttcatacaataattttggaatttagtaaaaagcaaaaaaaaaaaaagggaaataagaaagacagcatcttgattagaattttggctggaagccaaattggatggatggatagatggacatggatggtcatatggaagtggtgaaaggagttggaaataaaaaaagcatggcttggaatgaataaggggaaaaggttaagaagtgacaaaggagggtattttggtaaattagacatgaaattgacctggtataataataataatgaataataaaagagaaagaaaaagaaaaaaggttttgtctttcccataaaaataattcatatattcatattcatccatagacttgagaaaaccagttcaccatctcagccccctcaaagggcacaaaagttaaggtacacttccaataactgcaacaacagaagaaaaactactccccaatttatctccttctttaaaggtttcatttttattttgtttttttattgttaaatttcatttcttcccatacttttcaattttagttattatactttctctctctaaaacaaggtctctgtctttctctctcctttcagaagaaaaaaagaaaataaaaaaggaaactttgatccaaagagagaagaaacgtagaagttccacgcatacaaactcttccatcaaaaacaaaggaagagtccacaacaccaccaaaccctcttttctctctctcctttctttctctctcttcatggcccagctggaccaaaatttatgtaagaaggaaaaaaccaaaaaaaaaagaaagaaaaagaaagagaat

SEQ ID NO: 299626 - DNA, 2858 bp, Cannabis indica
agggagagagagagagagtgaggatgaggaggaagaaggagacttcttttttctagttttgtactattcacttttattgttactatttttctcttggattattattattattattggtacagttagctgtcttcttttatatttgttcttttgtagcctttggtctcaattaagggtcttataattaatacacttgcttttaccacattaaaaaaagtaaatgttttacatttgattcgcttgtaaataaattatacaagagctttaatcagcaaataatatggttacttcagtattgggggcgtaccataaaacattgttatttgagaaatgttagaagagacattagtgttttgcaaaacaccatttgaagcaattaagtaccaagctaaaaaaataatgatgataattaaagcgacataactaactactgtgccaagctcaatttatcatgaggtttctcttttaaaaaaactaatgtgccaagctaaataaatgtgccaagggagatagttgggttgggttgggttactaattttcaagtgtatttttatttcttttaaaagtaaagcatttattaacaaaaatggctaccggtgtgaattcatttcattgcttccttgagagggaccataaatatggattgaaatggttatttatttaccttttacaaagagcatttgctgtataatttgatattaataacaatatcacagatttttagtagtataaaaacaccactaatacttcccaacaagtttcgttctcaaattacaaatttaatagtacaaatttgaaatagcaaaatatgtaggtcaatttaaagagggataacttgaaaatacttattttttttgtgtaagttaaccaaaattacaggcaattataactacttttataaggagattgctcaaatatcttgcagcttaaaggtcttgggatcgcacccatgatctctctcttttcccatccctccctcaccactaagttagctttagttagtggcttcccccacattaatattaaagattgaaaattaagtcctacgattgaagaaatgatattatagggacatcaactataaatataagtagaaaagataaaaatattaaaaaagagagtaaaaaattaaaatggctaacttaaagtgggtaccccacgtaatttcctcattattaaagattaattgacaaatgccaatcatttagttacttcaaaaataaatgaaatatctaacgaattagtagcaataatgtatcataaattcaatactatagaagctttaaatatgggcatgagatagatgccatatatgcgcacaaaatgttcaaaaaaaaaaaaaaaacaaacaactggtgaatgtgctaaaaatactaaaagtatgattaaaagcaaccattattgatgatgttattttttttatttctttattaaaataccacaattattgtcttttgagttttaaatagtaatattgtatattgttaactgatgtgatttctctattagttgttattgatggctgtttttgctatatcgtcaatatgcttctattacaaattttgtaagaaaatataattacacaaatgcttcttattcactatttttatatcttcctataacagttagattttttatttattgaatttctcatttaaaaaaaaaaagcattacccaacaaatttcatatataaactaaaatatttgtacaggtgagcattttaaataaaaaatggtaataagttgctaaacttgctattcatgtaacatgttccttttaagtagcgagaattatacttatatatataagaaaaagaattacctaaagccaaacaagaattacctagtcacttctacatgcccttcagttagagaatcatttatcttcgaataaaatctaaattaaattgaagaaactaatttactattatatcattttttttcttctttcattctaaaattccaaactaaaaaagctcactatcttgtgagcatatagtataaaataaataggaatcttgagccatatgagtcacactttatgtaaataaatatataaaaaaaaacagcaaaagccactaagaatatgtttggcttgtatgtacaagtcattctctaccttaagaattttatcatagtcataaaattcataactctctgaaagatagattaaaggtgctaaagcaattgtatccgaaagcattaattttcttttggctggaaagcattaattttaattgcttttgcctcaagtttctctccttcagtactgtttttctttactctgatagtgataataaggtgtcgcttaagtagaaaaatattaaacatacttggtgtaaaagaacaataagatccatatttgcttttgcttttccttattattatttttttcttacatatacatttatatagcctgtatccttctttttatgaaaagtgaaaaacatatgcaatatttttttttcgattaattatgattgtttattcagcacaattaacaaaataaaataaacataatagtttgataagaattggaaaagcacttggtgttggtgagtcattcattaatcattaataacagatatggatgatacatttataattgctataaaatttgtcggagttagtagatattcctttatttttataattaagtattgagaagctgaatttaatagccattactgatttacctaataaatcatctttttttgttttgcgaggataataaatcagcttgtacaaccgaggaaatatacattatctattctatataaagtgtgcctatgttttatgagaaatttatggatgactttttatttataattaaaaataaaataatttattaattaaaa

SEQ ID NO: 299627 - DNA, 1678 bp, Cannabis indica
tgtccaattgtcctcaagcagtaagcgaaaccgtacacgtgaaagaaaggaacacaacacaacacaatcgccggcgccgctctatcccgccgatcagataatgctccggccaccaccgatatccaattacggtgagtcaactccactcctttgactaaccccgtggtccccgacgagtaaagaatcgtagccgtatccgactggttcacctcaactcgccgtaactcaccgatctcactcgtcatcatggattcgaactcgtccgagtcgagtaatacggtgcctaatcggaggaagggtaccttccctgcggtttctgcgatagcgaaggcgacaatcggtttacatagctgaatttggcgggaaatctcagccgtcgtgctggctggattggccggagaaacaacgacgccgagagagagcaaggagtagtagagaatcggaatatggagcgagttaggagagagaacgaaggcggtgtctccggaggagatcccgagacgagtttggagagagaaagctaaggtccgtactcgtcgtgtgaaatcggtgaagagaatgcggcgaccgttggcggcgtcgatgagagctggagtggaagacggcggaggatgcgaggagtggaggtgggagaagaggtaatcgacgatggaaaacggcgtcgtttcgggtggtagtgagatgttgggtctgagactgtggtaggttctagtctctgaacagaacccgcttttcggatctatggccggaaccgggttcgggtttgggttttgggagcccatgtttaaatggctcaaaggcagcagcacgttaagctttggtgagaatttggtggactgatggaaaatacacctgtgacctgtctctcaataaggttagaaaaaagtagttataaattccaactattttgaccttattaggtcattttttttttgataatgactttattaggtcattttgatttggaaaaattaaaacaatttggggaattttagtaggatggtagttacagataagtacataacaaaaacaaattacatggatggatggagtgtggataacaatgggaatactttctacatgtttataactcccaattcacacaccacctcctcttaatttgtaggttagactatactgctagcaaaatcaattatatagaggttaattaggatttttattctttaaattttaatatgtattaaattataattttgaatttttttagctgataaaaatttctcttaaagtattgagagttcattcaattttactatttattgtttatgtactaaataatattcctcagactttgatatctaccaaattataatccttaaattttgatatatactaaatcatgcctcatgaactataattagacaaaaaattcaacaatcttaatagttcagggaacatttttaacgaacttaaaaatttatgatttagtacatattaaaattcagagggtaaaaattataaggatcaatatattcacgagagttgaattgttttttcttttttatcaatagattttcattgatcaaaacagccatatataccactcaaataagggcgcatatctcactcctcatctccagggctggccctaggcataggtgggctaggcccgtgcctagggcccacactttccaggaaccaaaaataaaaaaaaaaa

SEQ ID NO: 299628 - DNA, 3880 bp, Cannabis indica
gttttaccagcgtacatttgcagtggctaaaatttaacttttaccagcgcattacgtactgggaaaagtcatctttgccagtgcttttcattttattctggcaaaagttctaataccaacattgatttgccaacccccttttgccaacacagcacaagtaaattctattttaccagcgcaatactaacttttgccagtacaaaaatgtgctagtaaaagtgacatttcttgtagtgtgtcagtaagataaaatcactttctttctattaatcggtgtttgtcaatgcgtattaatttccactacaacacgttatatatcatgaactatagtaaagttgtattcgactttccacaaatacttacaaatccaacaatgagcacatgcatgtaaaattagttttagtattcataaaacgacaaacaacattacagtcgagtcgactacggaaagtgtgaaatccatagttttctctcaaagtaaattttatcatacgtaagtaaaccattgggatcaatttggcatgcatatattaattattaattatacatacaataataataataataataaatgtctcattaatttaattaaaatctacttgcaacttcccatgcttactcgatccactgtttatttatacataccattggcactttcggaaaccactaccgatcgatccaattgcttaattttctaattacattggatatgataatcctttgatctccatgtggtcaaatgtaaaacgtacgtacgttgcagttatatatgataattaatattatattgatttgtattgtatttttgtgacttcatgccaaacatttcattcatctatatctacgaacacttactaagtaggatatagcggtttgtctatatatcctagcttttaccatttatttatcattaaaaagctcttggagctttctagtccactagccttctaaatagacataaaaataattccattactttaaaaaattaaattatagaatagcatttaattaataattaaaattatgccggcaatgtaatttcataacagattgacacaaactgtatgttagaaaatattatatgcaaccagttttattttcttattatatcatgaattcctcaaggcagtattaattattaattaatatccatgcaatatatactatataaaacaattttaggttattaattatacataaaggcgaagagagtggcgaaagaggagatctggccggtgatcagtttaaaatgctgttctttaattcatacgtactttaagtaattaattatacatgcatgcatggcatggcaggaaaaaaaaaaagtggaatcctataaataaatggatttcctccaaatgtttcttaactctacaaaccaaatactaccaaaacaattctatagaaattgcaataatggcaacctacaataactcaagtctaataatccttggcttattgctgatagccacagcctcaccagtggcaaattctttggacattatctcagtcgttcaagtgaatgttgaaggcacccttcactgctctctccctccagtcccatctggctcccctaccctctccggagtctccgtctttctctcctgcgacaacggcctcaccaccatggccaaagcaaccaccgaagttgatggaagcttcaagattgtgtacactccactaactgtctttctctttgaccagttgaaatgtgccatctttgtcaaaacccctattgctagttgtaatgttttcgccggagctttgataaaagcaacccttgtctccgtcaacttgcttgacagcattgctaactacaacagtggagattttcaaaacattctttaataaactatgtaccacttatacgtacgtacgttctacgtatttcgtacgtccgtatggcgtatttttatagcatgttttactttaattaaataatgtggctctgcttggacagactatatatgttttcatttgtttaggtattgtaatgtgtgagctctatttacatatgtgctactttgtattctaccggtaacattatattattaattatagaaatgggatttattttcgtttgttgaatcattcatctaactattgttaattataggaagacaaaagaatcaaaattcaaattaagtagtgtacataaaataaaagtatcaaagggacaatatatgcttatttttttttttttgataaatgagatatgtgtattgctcataaaaacaacctaacatactacaacaagcaatttttataaaaataaaatttaattttctttggcataatatgatcaattctatatttaacttcttttttcatacagttgattttttcattgccacttttgattacaaaaaatttcattatgattcctccaaaagagtataaaccaatcccaccattgttgcagcacacacttgtctttaaaactttcactactacaaaattaggctttatctttgatttttaaaatactagctaccgaagacaatagaggcaaagacgtaggtttcaaaaataccgaagatgtaaaagtgacctaagtcttcggtcattacaaaataaccaaagacataggtggagcctatttccaaaatcacgaggggacatgcctacgactttggttattacataataacaaaagacatggggcatttatgtcttcaattattatgtaataaccaaagatgtaagagtttcccatttgttttcttaaaattatttttttatcgagattttcaaaaattcaatataataagattaaacagatgaaatgaagatggagatttttacgtggttcaggtattaatgaaccctagtacacgagtcaattttattggactaaatagccttgcagtttcacccccaatattcttgataagcttaagaaccttaactttttgttgtagtgtttgaataataaatttccaaccttttgctgtcagggataatgtagtgtttatagactaagtacggtatggatatacctgggacctgctatggtttgtgtgtaacatgacccgctaatggagtaaatacatataatatactgacttaggacccacggattgaggcccacccgtgggactgtgatcttccgtacagctggggaccatatgatgttgacaggtggcatgtgtatgttggctctgtgtagtgtagatgtcagagaagtggtcgtcggacaaagggtatgtttctcttggtgtgtgcgcacttttatggtctcacacaggggacaaaaccctgatattgcaggatttagtgtcgaaggatcaccaggtttgcataactttccgtgacgtctcttggagtgaccttctagaagtatctcaataattcatctagaggatctttgttattccttctttcctgctcttgatgtcttcttggatccggagtagtctggattaggatgaaagtgacctataatgtggacgggctagtggcccatctctccatgtggatctggcccattaccttggttggacccgtcttcaggcttcgattgactattcttgtcttgaatatgccatgtgtcctctttccaaaaatatggatgacatttacccctccaagctttctaaacttgagagttacgaaagctacagtgttctttcctagattattatggtcatgtggaaaatttgaaaaagggggtaaccttttcattttttatacctttaattgtggacagctatgaaccctcaagttctaacgagtggattacatgtgttctcagcttcttcgtccatgtacttcatgtgcattagtaaagtgtgtgatatgcttaggctagcgcactactacaaaaagtagaattcgcgacagttctaaaaacgcttttttttagaaccgtcgcaaaaaa

SEQ ID NO: 299629 - DNA, 2276 bp, Cannabis indica
agttattagttattgttattgaaattttaattttgtattaaagttctttaagcaagaaatgtttctttcgaaaatgaatatgtgattagtgtgagtaacagaatgattatgtttacaaagcttaaacaacttcgtttagattgattaaaacaaaatatacagtgggcagagaactaaattcaaacggtgaaaaacgacgtcgttagttagtattcttcggcgtgatcgtcggtcaagtctattctttattttcctccgtattactattgaataattagagtccacgtgttttgcggtgtaagaaaattaagagcgcttgttttctcgtgtcttgaagacaattttttagtacttttttcttacttttcacgttcattgttaatttctttgctaagtctctggaaaccacataacactccataccgtccaatatattttaattttataaaaataacttaattagcattttctaatatccacgaattcatttaaagaaaatatttttaacatatacatttacctttgtcttgacttttctttatgtattattttgtcagaatgtcgcttctatgactatatcaccaattttaagcagaacatcacacaagtacccccaaaagcaacctgaaatttccaaaacatcccgacccaaaatcgaaatcccactgaactgtactgattacaaccccacacatacctgccctacgaattatcccactacatttaacccagaagaagatgatcaggaccgtccttctccttccacgtgtcctgaatacttccgctggatccacgaagacctgagaccatgggcacaaacaggtataacaagagaaatggtggatagggccaaacgtacagctaactttagacttgtgatagtgaagggaaaggcttacgtagagaagtatcagaagtcattccagacaagagatgtttttacgctgtggggaattctacagttgttacggaggtaccctggaagagtaccagatttggatttgatgttcgactgtgtggactggccagttattctttctaaggcatatagtggactcaatgccacgtcaccacctccattgtttcgttactgtggtgatgatagttcacttgatatagtctttcctgattggtcgttttgggttggtaagttttaaacttttatttaagttataaacaataatggtactaataataagtatatgagattggtatgtattaataaagatgatgcttcatgtatataggcctgaaataaacataaagccttgggtgcctttattgaaggagttagaggaaggaaacaatagagcaagatgggtggacagagaaccttatgcttactggaaaggaaatccagttgttgcagccactaggcaagaccttcttaaatgtaatgtctccgaccaacaagaatggaatgctcgtgtttatgcccaggtttgtaatttcctatacatatatatagtccctttgtatccttcttttaagaattttaaaagagcttagacttaatcctttagaagttttcaatagagcattatgtgtgacaccccatattaaattacaccatgacaatttacaatctctcgtgttacttggcaactaagcattcctcttcctcttcgaataaatagtaattagttattttgcatgctaacatagtgtattgttagaaatttttatgattaaaataaatcatatatgattgtgtataaaatgtgaaatgaatcaaatgtatacactacacaaataaggatcgaaagatgtgtacatccagccattaataaatgtaaattaatgacattaatatattaatcagatctttatatctgcaaaaataagagtaaaataaatcagtgtggtatgattctttcaagctctctctaactttttttatgttgatatgatagaaaatgagtagtaagtttggagactaattctctatatttataaatggagactttcaattaaaatctgttcactacaattaattttcgaaatattttgagaaaattaaattaaaactattaaatgtcgtcaatcagtattagaatatttgatgtgatcaatgcatgatcaaacacctcgcaaataacacaatgcaaagaacaagattaagaacataacaagcaactgaaaaataacaatgcaacagtgaaaataaaaccagtaaaccagtaaactagttgcagagaaaccaataacaagaacttgaatatgacaataatggacaatcaatttaacagtaggggaattagagaagagagatcaaa

SEQ ID NO: 299630 - DNA, 1021 bp, Cannabis indica
cattatggttgtatggttgatctattgtgtcgagctggcctcgtagatgaagcttgtagtcttgtaaaaaacatgatcatctcgccaaatccagtaatttggcgaagcctacttgttgggtgtgagaagaataaattgctagtgaaaggtgaactcattgctgagtgtcttctccaattagaaccacgaaatgcagataactacatcctcctctcgagtttgtacgcatcagtttctcagtgggagaagatgcgtcttgttagaatggagatgaaggagaaaagaatcaaacccatccctgcctacagttccatagagataggcggtattgttcacgagttcaaaattcgcgagtcatcccatccagatgccaaggaattgagagaaattttaggagacatttctgtaagagtctctgaaactggatacaaacctagtgtcacagagatactacgcagagtggttgacgaagagaaagagaatgctttcggcgagcacagtgagaagctagcagttgcttatggattatggaagacaaaagcacctgctgttattagaatagtgagtaatcatagaatttgtggcgattgccatgaagtgatgaagattataagcaaaagttttgagagggaaataattataagagatagagttagattccataaatttgttgatggatcttgtacttgtaaggattactggtgaaatagaaaggtaaaacaaatttttgtctcatattttggttgtctaggaagatgaaagcttgtataagatagtggtgctagaatacttaatcaaaaccaggttccaatctacaaaatatgctgatatttgcacttgtgctgattgaattagattggacaatccaaaatctctactcgtgcaaattgaatgttgattcacatgtgaaactagtagatacaattcaattcataaatattatatattaaaaaaattacacatataattaatattttaaataaaaaatagtaatttgaaaatcttatatataaaaaaaaat

SEQ ID NO: 299631 - DNA, 1719 bp, Cannabis indica
ttttttttattatttttaaatgtttatagaatttgaaacacaatttctatttttatttttaaaaataaaaatgagttttagtaatataatttaaaaaaatgaataaaaaaagaaacagacaaccatttggtaacttttatttctcttttttttttcctttcgtttttaacttatttttgttttgaaaattttaaatgttatttaaaaaattaaaaataaaaaccaaacacaatataaccctttaattttatggatgctgatgctctgttcattgggataattaatatcacttttttagttattgagtagtgttaagcattcccattatccatatgctggattttacatacctttatctttgtgtgctctaatatccaatcctgaaattaagcacatatttgaagaagaaaaaaataataataataacaaaaatagaagaaattgaaaaaaaaaaattgttcaagaattacattatttataatggaggactaacctggaaaagtaaccacaatgccaaaataatgtgaataggaaccatcaaattacaattgaaagcctgtaaatatatatatatatatatatatatttatatagtaaagaaattagtatgggcatattttttttgtgatacatattacatatcacgttttgatagtgaaattacatagaatttagattggattgaaaatatgaaagaagaaaataaaagaataaactatagttcatcatttgccaatatagtaactttaaaataaatatatagaaataaattgccatggagataaatatgttgataaatattaaaaaagataaaattattatctcaattttttattaacagtgttaagaagttatcaaggggtatagtatttaggttgtttgattaataatattttcgtatcctctgtaatttacaaaaaaacaaatataaattacaatattttataaattctatcaaatctaatcttgctttccaaacataagatattcatgtgtttttcgattttaattaaattagaactgttgcttatttcaaataacaattacttaatcaagatattatatctaattaaatattgtactaaattgcacaaaaatcaacaaaatggtatagttcacacaatattttgaaactgtagtcaaatgtgtaacataataaaatataattcataaaaaaagaaaagaagagaggaaattaatgattgactaattcacaaaaatgagaattaatgtgtttgtataagaaaaatataaagaccataaataaaagtcatttattgttaaagaaaaaaagagtcgttttaaagtataaattctattattattatttaattattaaacaaattatagtaagacgtaagaaaggtacttcacctgaggaacacaaattgccacgaaaatggaaccaatataaatgagcaggagaagacacgtgccatggaacacaatttttctaactccaaattttgtgacaaatgctactatttcagatctgtaacttcaagacatgatgataaactgttaattactctttgtatacactacaaaccataaataaccaagtatgaaaattaggaagaagaagctatcttaatatactaaaataaataataattaaagggctcgtttggaacgccgtattaagtcgtattgtattgtattgtattatattgaattgtattttatgcaatattttatgtaaaactatatgtggtatta

SEQ ID NO: 299632 - DNA, 3639 bp, Cannabis indica
aaactttgtagggttttctcttggcgacgtgtacatacaacgtcagtgatatgaaaatttccaggttatggcatagaatgaaactgttgtagggcttcctcttggggacgtgtagatacgggcgtcaatgacatatgataagtattgggagtaggtacgagctcgtctgattaggtgatgtgatatatttgtgccaagttgtggcacgagctcacctgattaggtgatataattatatgatatgtgggtgcaaatttttggcacgggctcaccttattaggtgatgaatttatatgatatacgggtgcaagttctttagtaaaactttttatagcaaggatccccggaacatgctttttatgtcgttataatgtccatttttagtctttcactttggtcaagtttttaatattagcactatttttaataattaattaatctattagtattaaattagtttatgaaatcacacacgtggcgtccctatagattagagcgttacaaagactaaacccacaacgctactataaccatggtattcactcaaaaaatgtcgtcaagaagactcctcaaggtggtttcgacgtcctcatggataacgtgaaccctctctctttagaacactctcaatcgagcaatgtgtgagaaggggatacattagaagctgatctctaagagggcaacttagactaacgccataaacaagttagtgaagaccgtgaggtcgaggttaatgaggaagatgacaatgcatatgtcaaagatgggtacaacaaagatgggtatcattatgagcaagatcttgatgtggcagaagtacccaaggagtttcatgagactcgagaaaagctagcccatcaagagaagccttctcaaaagatggagatataatggctcccctccaagctaagtttagagatctagaactcggcagctcatgtagcgtgaatccaactagcaaacctgtacaaacgcagaaggccaccaattcctgtagatgtggacgcaatctgctttgaaaggtcttgttgcataaagagggactggtgcgaaagtacccaagcccaagggaaggaaaaatcgccccactaattccattaaccaggacggtgagactaggggacagtattctgactacagttggtcaactacagaacttcaaaagcgtcttgatcccaagtatgaaagagccaagggagagttggtgaggccacgtaggaatgaccttaggaatcatttgaatgaaaggacccgcagacgtgacctcctaaataatgatacgaaaagattggaagagcaaattgctgctctgacaaagcttgtacgtaagcaaagtggggccctcacggattccgaggattaggaccaggattcgtgtgttaggaggattacggaagctcgtctcctagagaacttcaaaatgctacaaattaaattgtatgataaaggtacagacctaagaacccacttggataaatacaacaagatgatgcaagtggctagagttagtgatgatgccaaatatttgtgttttttcctaacactaacttagtcagtcgaagatttgtggaagagattgcatcatgggtcaatccatagttggaaagagctatagttggccttccgaaagcaattcattgctacctaagattattatatggaagtttgctcgataagcaatgtcaaacagtaggcaggaaaaagcctaaagaacttcattcagcgaaggatgcagggagtggccaagacaaaggtgactgacgaaatgaaacttgtagccctacaatctagactcacaattggttccctgttgctggagagatgcagaggaaagggcagagaccttgtctaagttaatgtcaagggcacaaggctttattaattttgaagatgcttaccaacaaacatttgtagtccctctagctcctaccccaaccacatttactctgggattctcccgacaaatccctattcttagaactcagtacactctggctatctatggaccttctgcatccgtgcaagcacctacccaaactcattttcaaggtatgaagcagcacaaactggatgtagtattgttgctggacagtcgaagccccaagtggaagtttcataatagaacatgatttaatcctagagcaagaggggcagaaggaaccaaaactgtagagagactttgaagaagccaaggaaggaatatgaacaaaattacatcgattacaccatcttggtggatactaaggagaatgtgtacaaagcaacctggaataaggttcaggttgcccgcaaggatgcatctgggggaaagtacaagagagatcaaaataaatagtttgactatcacatagatgtgggacactccaccaatgaatgtggccattgaaaatatgagatccaaatgttggctagagtcagacatctaggacaatgggtccggattcttattatctatccgggattggggctgttcacggaccattgattgttttaggataccaggatactgtaaatcctccgtatgtagtaatccaccctcaagctcccagaacacaatgtccagctctgcttgctccacttgctcaagctacagtgaaagtattagctccgggacaagggaacccatatcctttaaccctagatccacaaccaatagaaaaacatgtagccacgatcttaggaggaacttatattctaggaagtacgagaaattccaaaaattgatattttaaggaactcgaaggtgaaggagagatgtgtgccttagtgtagtcgccaacacaacattcgcaaaccatgaacttgccaattacattcacgaaggacgatgcttggcacgctcatttcccccacaatgacccttaggtcataaaattccagattgccaacaaaaggatttgtagagtctcggtagacaatggatagctcgatctactatataaaaagcattagcctatctcttgaactctaagtcattaagcctctaagctctcaattctaagtctgaaatcataattctctcctctctctctttctactacacgccccaagggctctctccctctttctctctcccacgcctccaaggctctatctctctcactctctctctcattagagacttgcctactgattcatacattctaatcttaagagagctacaatagattccacaacacttgtgatctgagtagtattatctttggtatcattacaatcaaaagaggagaaggtcattacccggtaactaaaggggccaaacctctataaaatcctatgtcttatttacttattattcttatgtgtaacatgtggcaagcatcatcaataaatacgactcccgctgttagttagccaaattttgaggtcaacagtgtcagaccttttttgatttgttgaattttggttttgatgaagttgttggtcatttatttgtcattgatttcactatttttactccatcttgtcaaaattaatagttgttttctggatgtcttcatgtttctatggtggttatgtttgtgaatttggaagatggaggcatcgtagttgagtttctgtgcgcaaagtataaatgaaaaaaataatataaaagtaacgaaaaatcaacaataaaataacaagagtataatataaaaa

SEQ ID NO: 299633 - DNA, 4224 bp, Cannabis indica
gtttttctctcagtacttcatttaacaattaataataattcttctaaaaagtgatgtttatagaaaatttgagttacttttttcaagtgttttgtgagctccaaaactatggtgaagcgccaacagaagtggcaattgacacgacacaatcacaatatcatatatatactctattatatgttctcttgatttacttttgtttgtatgttcatactttcacttgtaattttcttacttttttattctcttatttatttatattttgagctttgagttataaactttatttaatttattttggttctttgtattattttacagaattataattttttttatcatcatttattctttcattgatttccctcatatatatacatctaacaaataatataaaataattgaatttttttttattatttatatggctagttttgattttataccactaatattattagtttaattttgtaaaactgactaattttaattttgtaaaattaatatgactaattttaattttgtaagatcaatttgatttaataaaaacacaccagttgtactataaacaccttcaacaataaagatgagttgcgataaatcctaatctttacaactcaagtttgaagtaatcttttctgatatgaaaattttattatctaattcttcgatatctatgtatgtctttaagatagacaatgaattgatagaaaaaaaatcccctactttttacttaaacattgatatttttattatttttaactttatgggtttaccaaaaaaaaaaaaaacaaaaaacaaaaaaaacaaaagaaaaagaaaaagaacacccaacttgtttgttcccaaatgctaaaattatattccacaatgctctaaatatccattatttttgccttattgttgaaccataagcttaatatgtgatgtttatttatttttaatcttattaatctttatagctaataagagaaaaaaatattttataccacggaatttggaccaccattaattatgcatagacttcaaaattgagggagcctcaagatctagcattttgagatcactaagcaaaacaaagaagagcatagatagatagaggccagccaaccccattatatcagtcaatttatgaggtgaactacctagcaccattagactatgctacctaggacaagcacaatcaatgaataactataattatttagctaactgagttgacaatttgaggtagttgacttcagaatcagggaattgtagtctttaaaaactcccatgaacattccatttcagtaaccatcttctctgcttgtttcttcttgattctcaacaacgacatgacctcatgagcatcgatcaatgcttgttttgaagtagctgctcgatcggctaaatcttcaaaactctttctaagcaaaaccttatttgccttcttttcgctcaactgtctctctagttcagcaatatcttgatcaacagtctcagcttgattccttagagtcgtgaactcagaagcaaattgcttcgcggtggtctccagttcatctattgatttttccttatcttgaacctccctcaagtcttgccgcgcacctgcgtattgctcaaagttgtctataaacttggttgtaaaacttaccatgtgattaggacacgcattgccagtaatcatgatggaaagtgaattcttgagctcaatttctcgaccttctttgatgatattggcaagcttcatattaaggcattctttgaaaacgttttttgcatgggaaatctcctctttgctaggaggaggggtggagctgctcaatgtgtttgagttggaattctttactcctaatagattttgaatgtctccaaataaggcatctaattcagacaaataagagggacttatttcagcctctacaagagttggctgctgaaagaaagtaacatagttagaatggctcgatgatctaatatgaaataggagagcatgaagtctgagttcacctgagcaagctgaacagatggtgaatcaacaataggcggggacgatgggatggttgtcgttttagcttcttcctgcacatccttggttataagagcaacctgttgattctgttgtaaggattcaattaagagagtagcagcagtaatggcttgagcatgagaagtgcttgttttctccacaagattttctccattaactttcgagggaattgccacttgtgttatttgctcaggaatgagattctctggtgttgtacggagattacttagatgagcatctggaatgatagtttgtgaatcaagagacttaggttctggctgagattcaatagggtcttcctgcaataaaagatcaattgtgaaaacatgccaagtgcagacagaatcacatctggtggagttgtgtagaagtttggactattggtcagttatcttgacataaatggagaagaagatgaatatcaaagaaaaaggtgataccagaacaacattttgaagaaccaaagttatcttattgaaaaaacatgtatttcacaagatcatacgtgaattagaaatattgatttaagctaacaaataacaatataatgtttcctaagttgttttcagtgatttaagttataaaagcaaaagtagaaaaaggaagtttggaaagatggatgaaggctagaactctaaaccagtattcaaaatcaagctggctcatacagattcttcaaagcatttattttgtatttgaaaaatcataatattggtttgttaaacaaatcccaaatgatgagtttacagcacaaattctaaatggactctaaaattccaaattgtcatgcagattgtgtttacagcacaaacacatggtatgataagaatgatgagtaaaataaccacaaagcaattttctcatggtcatttctggtctcgttaaaatcataatagataaaacattcttgtgagctgtgtcagaataaaaattataatcacaatattgacaatttgccagagcaaaactctacacaaaaaattagtgacaaaaatcaaaacaccagggcgataaataaatatttggcattaccttttcctctatctctagctccttttcatcttcctctttcttcaatgttacctgcaacgtaagttaaaacagcagaatgtcccttattgactataaaacgcgaaaaattccattcatttgattctctccatgtgaaaaattacaagacaggattaaatgcatgaaacacattgctcctcgggccaaaaattaacttgtttttttttttttttgagggttctatgcacactaacctctgctttaactatgcaagagtcgttcacaagaaaacctttgttagggtcatgtagttccccaagagcaagaaatgatgggataccccagttcttctcacctgctttaaactcatgttccaattctgcaaagtgcaaagtgcactgagaaaaacttgtttgtttcatgggaaaatgattacgagacagttaacttactttgagggacttgagttgagtacaaaaactggaaagaatacctcttgtaactgtgtttctatgatcaagttggttgataacagataagctaaacatggcatatatactccacccatgagacaaagttactgaatcagcaacagctagatatactgataaatgttccacgttgttccctttaggaaaaactagaatcctcctacacatttttcaatttaaatatcatcaaattattaccaaaagggtcaaattaaaaacccatgaacagtagtaacaaacaaaatgaatattttagtaccatttgtagcctcctacatggaatgtatccgaatatatccccttcacattaagtttagaaaaattatcaatttcccatgtgaactgcccagatgaagaaccattctccgactgagcttcaacctttgtattttcagctttagcttgtgaaattttaaaattaaatacaaatcaacaaattcttagaatattagtggaaaaactcaaaaatgagaagactttaaagtgataatgatgaaataaaaagcatgctatgatcataaatgaataaaggattgaaacaaaatgaatcaattaattgatttaccttggaatgcattagcttccatgatcagaagacgaaaagtatccacggaagaaaggcgaatagtcatcatggatggtcaatgggtttattaatttttttatttttaagtatatataatcaaa

SEQ ID NO: 299634 - DNA, 8052 bp, Cannabis indica
cattcctattcttattcacattcatattcctatgtttcaattcttcccaaccaaatgccacctaataatataaactaggaatttctcactctttcttttaccaaaagacatagaagagagtttttgaaatgtaaaaattgttggtgatgaatctcatttataactgtctttgcactattgatttccattgcctttcaggattgggataggcaaagtccaactcaagttatcacagaaatgtgcgggtttgtgactatcctctccgggacttttctacttcacaaaacaaaagacatggccgatggtacttcctctcaattatctcaaattcttccatacattctgaacctttgtttgataatgttattaaaatcgcgtgtaggttcaacatcgtccacacgcatgcacaaatattcagaagaggacggatttggcccagaagggatacctcttagacggcaggaatccatgagatcgccataaatcttattctttataattgagattctaccatgtcaagaatgaaatttgcattacttgtgtgggggaaagaagaagtagagggttcacccggcctttggtgttcatttgttatcggtacctcgtcccacttatccatccccggcatatcctttagagaagatgggtgagaatttttggtgtttctatctcctttccctaaatcgagtttcggcttctacagttagctggtttcagctgccatctttgtataccgtttcgcatattcgtcgtctttgttgttctttacaaccattgatacttgccaatgtaattttgtgcacattggttatacatatattgtactgtatctgacaaatgctacttcaatgaattcttgcaaggactaaaagagaatctgaactttgcccttatttgagtttgcaatctcattatctctttttgacttttttcttgttctggtcaaccatatataatcttatcttatgtggctctctaaacattattgtttgttgattaatcttctattattatatttatccaattaagaagggttattaccattttgcaaaaatcaattgaatttcctgtgttgtttagacaacttagattttgtatttttcaaagtattataaaatagtacttttaatgtaatttttaacattttttttaatataattaacttcaaaacaatttctgatttatgctttgctatgctgagagtatcttactaagctgaatttgattctatatctatattaattcctcttattaatgttttatagtacttttgaaatatttatatattattagtttattctcttgttttgcaagctcataactagaagagctttggtgtgttttgaaagtaataatccatttctaagttagtcattattattattgtattgcaatttgcaattttatgtttattacagagaaatataatataatattttatttttttcacattatttttagcaatattatttctaaaagtagtatagtagttagtaccttcaaaatttgctatcatttacacgttattatttaatatattatttgttttaactttattaaaaaaaagtattatctccaataattagttttttacaagcattctttcacatatatgctctttaaggtgaaatgacttaggatttaataagtaaccttttgttaatttggttaatatatgccttccaatctaagtgttgcaataaacatgcttaacccaagtgaaaatggcatttaggcctcatataatccaatccatcacttttaaaagtgattcaatcaaactagtaagtactagatttatataagttattgagttatgaaggaatttgtgtaatttgacaatttgtgttatcgtgttcatgttaacatgtttataaacaacactaaattaaggtaaatacgatcatgaaataattacttagtaagtcacacaacacaatacgataacactattattgtaataaatacgattatttttattttttataaaatatatgaaaattaattagtgttatcatatcaacatggctataacatgatacaattattcaatatgttgattcggctataacaaaacacgattaaggtaaataaaatctttaaaactgtataaattttaaaattttgtataactgtatcattatatttttaaaataatccaaaatttatattaactattatttttagtagaaatttacacttctacatttaaaaaagatttttttttacattttaacagtgttcaatagaacaacacaatatctaaataatagaaaaacaatatctaaataacataaaaaatattatacaataaaaaaatcaacaacaaaataaaatacaaaatacatagtattttatgtaaataaaatttaaaaaacgtacaaaaaataaaaattaaaaataaagccttaaaatttgataaaccctaaaacccaaagtagttgcagtgaaaatggttaaggcagggaagaacacgaccaccaccgagaagaagacttcaatggcgaatactgagaactcactcaagcagaagcgcaaaatgaccaagcaactccaagacgataccaagaacacgaacaatgacgaagaacaaccaactgtttcccattcagattccgactctgactttgactctgattatgatgatgccgtatgtagtaattaccttctttgattagatacatatgcttctataagtatatatatgtatgtaattttgtattatgcgtattctctgtttaaataggtgttgttgcttttcttttagatgttattattcgttttatgatattatctaatgttgattatggcgtttagaaattcagtttagttgttttgacttttgatttagatgtttagggttttcaatacataaccggggggagggggaatctaagacaagtggcgtcttcctcttttttcaaaaaagattttggcctgtagaaattcattttagttgttttgatttgtttctgtttgtagttctgggcaattctcgcaattcaaaagtcggaagaatatgaacaatgttttttctttatttcaattttcttaataggattccttggaaggtaatgactcggagtcagaagagtatggatcattgagggactcagaaagtggtgaaagtgatttttccgatgatcaggtatctagaatttttccccaagacaaaatgatatgaagagattttcagtaaaagatggaaacttattcattaccccaattatttctgcttacccttttcattccctgctcaaaatttaatttttgcttgtttaaatagcaccatggtgtttgtacttagctacatctggattttaatatttaagtttaatcacaataggaaaacatcaacactactaatggcgatggtttggctgatgatcatagtcatgagaaccaaagtgatagctccgatgctcatccagcagttgaagagagtgattcttctgaagatgaggttgtgtgttatttttcttatgaaaatatgtaccttttagttacttttgtttggctggattcattcaacttttcgtcttcttttgtttactttaaagtaggttgctcctcgaaatacaattggagatgtgcccttggtatggtatcgggatgaagatcatattggttatgacatttctgggaaaaagataaaaaagaaagaaaaagaagataaattgcagtctttccttgcgagtgcagatgattccaaaaattggtgagttttgcagaaagcaaatttatgtgctaaatatgttttcttgtttacattacctcacatttgcttggtgcttttttactatattgaaggcgcaaaatttatgatgagtataatgatgaggttgtagaactcaaaaagaaagagaccaaacttattcgtagaatgcttgctggaaaggcaccgcatgctgactttgatccatatgcggtacgtctatatttagctttccatttattggtcaattattagtaagactctttttgcatacaattataatttatgtgttctgaatgcagccttacgttgactggttcaaatgggatggtgctaaacatcccctttcaaatgcacctgaacccaagagacgcttcactcgttcgaagagcgaagataaaatggtatgctatttttatagagaatttaagtaaatttacattttttttcccttttatctctaatgaaatgaatgaaatttctggtatgttttccttctgaaatttcatttcacctactggttgttgagatagaacacttgaaggaatttcaaacacgagtagtttagttattcaggccttgcgcttttgctgtatctacaggttgttcgttatcgtcgggctattcgtaaagggttaattaaatttgacgagcctaaagaagaaccgtctgtctacctcttgtggggagatgaatccaactctaacgataagtctgggcatttagcctatattcctgcaccgaagccgaaattgccaggtactacttatcacctgttttctgaatgaaaattaagataaggtacaacccttcttctcatatttttccttattgagttttgctaaaaatttccccgccctcaggtcatgaagagtcatataatccctctaaagaatatatccctacacaagaagagattaatgcttatcagttaatgtttgaggaagaccgacctaaatttatacctaaaaggtaagattatttgtttcttagatgttcatcctgtgcttattgcttcttcggtcttaactcagcttatgatgtcctacttcttatcaattttgttagttttgcatcaatgagaaacatccctgcatatgaaaatgctgtcaaggagtccttcgaacgatgcttggatctttacttgtgtcctagagtacggaagaaaagagtaagtgacaaataaatttttcaaaagttttcctgctctgcatttagtcccaaattaatggtttctgccatgtatttgacttttttgcttcgcttctatataatatatgtatggctgctgatactattctatttttcttgttaatgttccagataaatattgatcccgaatctctgaaacccaagctaccaagtcgtaaagatcttaggccgtaccctacatcatgctacctcgattatagaggccatacagatgcagttttgtccatttcagttgacccttcggggcaatggattgcttcaggtgctgacattatattgattgattgtttcacttattattattattattgtagcctggacattctgaggttctaatgacccttgttgtatctacacaggttcattggatggaactgcgcgtgtttgggagattgagactggtagatgtttaagagtctggagttttgatgaagctgtgaaatgtgtctcatggaatcctgtgcgggatctttctatactggctgcttctacgtaaggccttatgctactgttaggttttgcatctttaagtaaattaacatttgagtatgattatagttgctgctcaagtatattaactatgaattaatattttcaggggagcagatatatatattttgaacactgatctaggaaatggagaagaacaggaaagaataagggagcttcttctagtcaagacacccgcaccgtcagaagactctggtaaatgagatactattatcagttttttattagtaaaaactgttggcatatgactttttaactgtttcttatttatcattttggcatagacactgtgtcaattgcaagttggcatcaagatgacaaacacggtggaattagattgaagcattttaaggtgtgttaataattgcccttagttttttctttcgacttgatgggggcacttcctatggagaagttttaactccttggtttgatgtgtgcttgtagactgtttcttcgatagagtggcatcgcaaaggagactacctttcggcagtaatgccagcagatatccttttccattatttgttttgttctttaaacatctgcaatatttggttgtttcttttcataactaattgggggccgctatgcgagcttaagtaatatgtgggtataacataaatattgattcttggttagggtaaatttactgtttgccaagtttccttaacttgttttttacgtgaatcgagggctattgtcattcaccagatttcaaagaaaataactcaaagaattccattcaagttacacgggcttccagtcacttcagttttccaccctactcgttctattttcttcattgcaacaaaaaagaatgttcgtgtttatgagttagttaagcaaaagctcgttaaaaagcttgagactggactccgtgaagtttccagcatcgccattcatccagctggtagcctttgatgcttcatttatttatttggtcatcacaactttttttgtgcatgaaatctaaaaatcttcattactttttttgttctattgtggatagaggcaaagaccgtgccagttatcctctaatctgtcttactttttgcatgtactttctcacaggtgacaatgtaattgtggggagtagagaaggaaagttgtgctggtttgacatggatctttcgtctaaaccttacaaaactctgaagtatgatgccacttctttgccatatttatgtacggtcatcacttttatgggatactatttactaatctggtttcgaatttttctgtgtgcaggtgtcatcccaaagacattacgggtgtggccttccatcgttcgtaccccttatttgcatcgtgctctgatgactgcacggcttatgttttccacggcacagtgtattcagatcttaatcagaatcctctcattgttccgctggaaattctaagaggacataaaacctcaaatggtagaggtgagaaagtagaaagatctttgaatattttctttaaaaaacttaaaataactgtgttccatttttactagagatgtttctatgtgacggaaagtagtcattaagatgttgcagactttagattgtttctattaatctttgtctagaaatataatattgaagccatagaacaacttcatctaactctttgtactttctctctgcaatttaggtgtgttggactgtaagtttcatccaaggcagccatggttgttcactgccggtgctgattctgtgattaaactttactgtcattaaccatatgatggattgaacaccctatttttagtgtcactccaaaagcaaggtggaaacgatcggtagggatccgggatcccatgaccggagaaccggcaaccaaattttgtcagatttgttgtgtttttattgttttgtggagatagtcaaatcattgatcattacaattgtcagcagtgattattgtcaaatgtaatttatcttttataactttggtcttcttttttaatttataaaaggaatggaaaggtgaaacttcttttctttaatataatttattcatcaaacaaaaaaacactatggatcttgcttaaatgtgtatcgaattccacatataatgttatttacaaaattattaccttttcctattcacaagattgcttgtagagaattattttctattttaccaaattaagcaagaacaatcattgtcacatatttagattattacaaaaatgtgattcccacacgtataaaatttgtatggaatttaagtgcatctctagatgtattaggataccaaattgaagagcttagacaatacctattggttagttatatgggatttgatattaatttatttatactaatagtagtacatttaatttaagcatttctccaaattgacaatggtagcatatattccatcttttagaaaataagagttttgaaaagtgaaaaaagcttgtataaaaggccccctcatacttaaaacttcctcaagtaacatcattgcatctgtagtatacaatactgtacatactgagtaaacattattactaaggccttacagagcttatacacattcttctttttatctaaagcaacaaaaaataatttagaacaaatataaaatgagcctaattcctttagagaagctgaactgca

SEQ ID NO: 299635 - DNA, 6842 bp, Cannabis indica
tgaacatgttgaatcagtaataacctttcatcttaccaaagatatggcaaccggtagagcatcatggtaaatacaccacgcaaaaattttgattttcggtggtagattaagagacaaaaagagtttccagcaagacttggctgagtttgagggtgaactcaaatcaaaattttcaattgatgatgctaaatgataacccaattgaacagtgtaggaacttgagttgtggtgatgtcaaataagaatgtccttgtttgagaagaaactcataagtatagtgagaatcctatcaacatctataggtgaaaaaaattactacagtaaaggtatataccattgcctttcttctgtgatgaagaatttgacaccacactatgaggagagtctgagtaaaaaactggtaagaaggagctatgactacagatccatgggtcagagccccaattaatgtcccttccttcaccaattttcaatcttaacccttttgaaagtaaatccttttccctaatgaataccttgtatgttaaagaaatagaatgaccaagatttgcatcaagaaaggagctttgaggatagtaacggcttttgagcaatttgcctaagagagaattaggattctctaataaccgtcaagcttgcttacaagtagagcttggttaaaaattttaaaggagcaaaaacccataccttcttcacccttgctatgacaaagcagattccacaagtgccaatgaatttttgaatcattttcatttaaaccctaccaaaagtttgccatcatagactcaagttgattgcaagagtatgttggcagccagaagcaacttatggcgtaagtaggaatggattgaaccattgctttgagaagtacttctcggccccctgcaaaaaaaaatttctcactccaagtgttcctaagtttccaaattttttctttcatatcactgaaaaagttgcttcttatctcttcccgagtatcacggtaaccccagatacttctcgtgacactcacaaatgggcatgaaaagttttgtatggaagtaaactttggcagccggtgttgtgttgggtgaaaaagacattacagacttgttcgggttaaggacctgacctaaggcacacttaattccctagtagatgctttggcatgaaagaacttggtgttacgatcactcgatttcaaccaatcaatctaagggcactattgccaataaatttcttcttactccaacaggtcatcaagaatagcttttgatttctttaattcagccattgtatcagctgtacggtttagggtgttgtttaaaacattaactttagaccgtatttctggtatatttctaatcaggtgagcctgtatctacgcttggtactcatcatatgtcactgatgcccatatctacgccaagtacgtcactggatatatcgcatcacctaatcaggtgagcccatatattatgtccatagtatcatcactttatcattgcctaatcagacaattgataatttcaaaacctgtcatgccatatggtgcattatactttttttacctcaagttacagtttaggtatgttagccgacctacttagagtacgataataaacttataagtgtttactccaaaacactacttaataacagtaaatgaacacctagggtttcctacaaaaccctgaggtataagtttactaaaataaaacttatatttttgctctaaaacatataccatatggtagatcttgtcagaagcttcgaaacggtatatagaacgtccaaaatggacactcaggtacaaagttatggcaaaaatacaattcttgagttctcgagactgcccagaaccggctaaccatttctaccaaaaccggttgaccgattggtcaggggcaaaaaatgtgattttccaagtttacacactcactgaaatgctaccggaacctatccaaaccacccaaaacttcatagggcacatatatattatacatactaccatacttacacaatagaaactaaaatcgagcccttaaatggaaaacgccactactgtttagacttatgctataaaaagttataaactcaattttcaacccaaaattacctcaattttaggaagaaaatatcaaaactagtcccatgactacccaagaacaatcctataaggtcacaaccttcatgactattctaattagcgaaatctctatatgaaaccaatttttttaaacttaaaatggaaataaaacttacattaagctttctcgctctgagaattttctatcttgctactaccaaagcttagatcgcttggtttcgaattaaaattcaaagataataaatagggagagataagggtttcatcggaggacgagggtttcatttagtttcatatgtgttctgtttataacttataacttatataaatatattgttaacgttaataataataataataagcataataaaatatatcaaaaaaacttttaattaatagctatcctatcattttttagccactaagaattttctacttttagggcgctaaattaaattcagcatattcctaattattccaacacctacattatcagcttatcataatattcctattagttcaatcaaataaacctattttaacatttctggcccccgatctagccactaaggtcaccaaacttgaatataattttactccacatatagttaacattgcattcacacatgccatataaatcttcaaaatttttaaattacgcgtatctactcaattctagaaaatttaaaatttatgttgaactagattaataggagcataattgcacttattacctaattaacccaaaatataaatacaaatcctaattatttaccattaggcttatcaggatattacatccatcccctccttagaataattttgtcctcaaaatgtacctgaataactcaggatatagctcccgcatctgtgactctaattcccaagtcgcttcctcgactttactattcctccacatgactttaactagaggaatcattttattttagagtactttctccattctgtctaagatttgaacacattgttcctcataagataagtctgtctggagctcaatatcatcgtaactcaaaatatatgtcggatttgacacgtactttatcaacatagagataagggagaaaaaagaaaaaagaaatgttacagtgaactcgtgctaattacatcatcccatacttaagagcagggttagccctaggccaaggcaggtcaggctcgcacctagggcccactcatcctaggggcctacataaaaaaaaatcttttagtaaatatacatattttttcgaagaatttttaaaaataccatttactttttcaataagggccaaaaaattatttttcctaaggcctaaatcaactcagggctgaccctactcagaaggagtttagcaaccaaaagaagaccacaactagggaagcgtcccgctcccagagggtttccggcaatcagggagaaaatatctgttggatgcagcgtcttgcttgtagagagtttttaatgattgatgtgtttttcgttcttttttatttgtgtactccctaaaggagaacttgcacaagaacttcatatttataaaattagtcacgaaaattttaggtgacctcaagcatttacgaaatcataaaaatgcaaacttaggtgtgtataaaaataactaggagagatcgaagctacaatcaatgccattttcaacaaagatagttgatagctttttaggacatggttgtcgcccgttttctctccatagtttagtttttcttggtcggtctagtctgggtggattatttaactatatccacagtgacctctaacaattttccaggtacaaatataatttgcacgtgtgattaacttaatgaactcaccaacacacacactgacactttaggtttatgaactatattactataatcgttggcaaccttcaacattcattaaactatcgaagtaccactcaattgtgtgaaattcattttcatgtatgatggtgtctgaactccccaagtgatcgaagaaatcatttcattggtcatatgccataccaaagtgccatttgaatttccaatcatgagccttggtggaattttttaacatattgaacattgatgtcactcatccgaagacttgtgatttggcagagttaactcattaaagagacaattgagattatctcaaggccacctatccaggctggcctgtgaggtgcaaatgattgattaaaaataaagtaccaaaaaaaatgataatctatttctttattcattatattaacaatcaagttctataagaggacaattgcgggtctctagctaatttgaaaaatataagtgaggcagctatgcaggtctcgtttattcaaaaatgattatccgctacactggagtagggcccatcatgtataaattatgtgaattttattcatcaatagagagatattatattgggtctcttcaaataaataggttccttctcatccattaacaaagtttaatgtggaccactattgaagaacattgtgattttaaagatcgtctcagatgctctccggtctagtgccttggtagtggcattggaattaagctggggcaattagaatggaaactatgcatgttttaggtactaaaacttttgtgattccttgaggttctcccttttctcttgggagtctttagtgtcgcttccttgctcagtatcatcgagtgacttacttgtaatgtcttcatcactttcctccattcctggtcatcatggaaaatagagggagtattcttgccgctactcctactctgactcatcttcagaagaagagggtgattctttattgttgtctcattactcgaggtcatcctaggagagggggggaatctagttcaatgaaggtactagatgttgatcactccttcttttcctaataattatcgaattgagactcagggagtggacacgatgagtaatgcaaagatactagtggatcaacaccactaaccttcttggtggcctctttgagcttgatgaaatcatcatctctaactagaaactcttgaatagtgtatattgctatgagtttcaagtcctgcaagaatggactcatattaataagtcatgtagccattgcaatgactttttcatcttcattgagtattcttatctggtaaagtattcctgacggtttttataattgtcacctatttgaccgtcgcaaaatgagtggaatagacaacagttcaaaactgtcgtcaatcaagcatttctaacggtttaaaatcatcagctatagtccatagtataggtgatattttaaaaccatcgctaatggattccatcaaagaaaaaccatcatcttcatcctcctcaaaaccacttcttgcatatgtcgcagccgctccaaaaccttttcaagcttcatcctcctccactgtcactattctcgtcttcatcctcctcaacactttcttttacaagctttgaattactttttgcttgacgatccttaaaactttcttcggattggatactttggatttcttttacacacacaaagatcaagatcaacaaaccaaatcatggctaatagaaatttaaacagtaaataagagaatgttgcgcttacatatgtgttgccacgagagagtggggaatagggacaaagtgagagagagtggaggagagggacaaagtgagagagagagtggaggagacggatggttcagctagtggtcgcggaggagagagagagagctagtaaaatgaaatgaaatttttaaatgactttgaaaaaatgaaatctatttttttcttggtttctgggggtttgatatcataagaggtagaaaataaaatttatgatgcagaaaatgaaaatttaaaatttaagatgcaagggaaatgaaattttagatttgaaacctgttaattttaaaccgtcacctatacattgcctgatggttttaaaccgtcaataattcccattaagaaaacacatgtttcccacttaaaagtggtcacctatacatctcgacagtttaaaactgtcaggaataccctattttttctcgacaattttaaataattgcttaatttttttagcggcgaatctcaaaaaactatttttaagactgtcgcaaatattcctttttgcactagtgcatataggcatctcaacatgaggtgtacccgagtagttaactaacttaactactatgggagctgactaggcaaacctattttatctaacatcactactacaaaaactactattccttacggtcttaaaaatactttttttgagggactgtcgctaaaaattgagtgtttataaccgttagaaaaattgaatattcccgacagttttaaacactcgcaaggtattccaacagtttttaggtctgccttaaaaaattgtaatttttttttaaacaagaatgactgatgactttaaaccgtgacctataatactgttataggccacgatttttaacagtcggcaattagttcaaatttaaaaattttcaaataacacatcttccgtcgctctaatataacgcattttcaaatctgaaatttcaaatcgtcggtctctctctctctctccgacctccgctccccgttgtcctctctccttcacatagacaacggtccatgagctccaccactagtctctcatctctcgctctctctttctcgctttctctttcacgagctccaccatagatgaaagcccgttcaagctccaccacggttgatcatgaccacgagcaccaccgtcactcatctctctctctctct

SEQ ID NO: 299636 - DNA, 1430 bp, Cannabis indica
tggcttaaaaaaatgtaaccatgatagttacatatttaatgtcactatggaaacctcctccgcaataatgttatatataatcacaaatttctttttctttattctcatatttaattattatttacacgaacttttattatgagaaacatgcgagtcactagttactatatataatattgtaaactttatccaagagaactaacttttatttatttatatattctaacttatttgaaataaactttttggaaaaatatttatttaatttttttcgtaattaagataatttggccgagaggattgaatgtgctaaagttaatttaattatattccatttttatatatagccctcacacacacatataaataaagatagtacttttcttttaaaaaaacaaggaaataaaaaatagtacgtttttttggaagagtaaaaatagtacttattatcatatatgtgtacgtataatgataatactaatagaaatacatgacttagtggatcgacacacttatatattgatcgaaatatatacaatcaagacaaccatatatatatacatcattatgtgcatcttttcttgggtcccggcgctatatacatacatattctatcttagacattccatgttgatctcttttcaacctctcatattcatttttggaacctttcacacggctagcttacctatcaacaaccacccttacatatatatgtatatcaattaatgttttgaattgtttgtacatctaaataaagtttttttgtactatataacgcatgattgatgagatcatgtgaggtctaatttattaattttctctaaattattagccgcataaatgtttacaaaaattttaaaaaatgttttatcttcattaataattaaatattttacaaatatatcataaattctcttattatgcagttttgaatacttggtcaattggtattggtgggaaattcaagtgcaatacgttaaaaagtgagaaattgaaagtttgcgtactaatgggaaagtgtttattttagtttgatggagacattattatcagtcataattttgttggtgctacgtaccaagcaccattaataggaaggagaagaaaggagcatatgctttgttacataatactatttttacatgcatgtgcggatcaatgtcaccaaatgtatagcaaagtgtgactaaatgtacatataacatttaatgttatacatatagcccttaattttaaatatatttaaactattaagaatatttccaataaaaaaatataaaaaattaattatatttaacacaaaaaataattttgtaatatttttacaccaaattttattattgtgctccatttgcataattataaattttaatgcaaaatttagagcacggttttagggtcgaccagtgatgtacatcatcttttat

SEQ ID NO: 299637 - DNA, 3045 bp, Cannabis indica
accaagaagaagaacaagaacatcaatgcaaaagaagtactcatcaagctcaacactataagggattacataaagagagagaatgagtttttggacaagtgtgaagagagattccaaaagtacaacatcccaaaacgttatcaaaatggtcacaaacaacctttaaaggattacataatgagattggaagagttcatggagattacttggagaaaagaatccaaaaagaaaagggcaaaagggtattgtaatttgctcgagttgatgataaagattgacacaaaaaacgaacttggtttctctgcttttaattctctcaagattcgtattgaagaaatcgctattgaaatctctagtttcatgattgactacatgttcttgatcatggtaataacttccagcacaagtaatcattttcttgatgagcttaaaactatagtggaatgtttacttgtggaaaagagatgtgtctctaatacttttgtaaccataattcgtttcataattggttcaatggagttggcaggaccattttggaacaacaataataatgagaaggattataagtttattttgaatgaggaaaaaatcgaagacgatttagttcatcatattttgaatgaggaaaaaatcgaagacgatttagttcatcatatcatcctggaagttcttcgtttagaggtgtgcatatatagtcctgaattctttcctatgatgctttcaaatgatgtgtttttctcgatgtcagagcatcttaagtgtaatgttttcaatgaaaaattgaaaagagttagagatacgataaatgagtggaaattgggtattaaatttggtattaataaagatgatgaagaagaagattattattgttcagagatgaaatttttaaggcaagttttggaggatggggttcatgagatttggtgtgcacctaacactactcaattgatcttatcaaacctagtgctcctttagaatcatcaactttttgttttagatttaatattgttgatttttttttgtcaagattttttcttattgtctaacaattataatgaatagtattttgctaagagtttttttggtttggtaaaatttctcattttctagtattgactcatatttattttctgctagctcttatatattagtgtatataacacaaattttattatgttatttgttctcattaaattttatatgaagacagtgtctttagtcgtatatatataattattgaatatcaaataaaatttgtaaagacttgtaacagactaataactttgtattgtatatatatatatatatgccttttcattgaagattattatgttattggtacaattcataaataaggattcttatgcttaaataaacgacatgtcgtttactgaatgattataaatgatgaaataaacgacacgtcgtttactaaatgattcatattctaaaacataacataaataacttctttttctttcttgccacaaagaaaaaccttcctagaaagaaagaagcagtaaaaaatcattcatcatgttgcaatggatgtaattgaagcatggagtgttgtctcatcaaacattttactgcaagatttgaaaaagaattaataatttttaatctattttttttatgcattttaaattttattccatttcatttctatttcaattccgaattacatttttattcttatattttgattcatcccaaccaaactccatttaatgcgttagagaaacaatcgaaatttgtagaattgatcaaacaagctctatttcttaaaaagaatttatgaaacataaaactcaaacattttattaataaaaaaaacactaaaaaaagaacaaattgttatgatgatgatgagttaataaggtgaaatttgttccatatgttatgaaccccatcaatgattgtttccttagcaattttgaatctcttttcttctttgatcatgtcaaaatcttgttcatcagcttgaatcttcaaatcattcaccttcaaactcaactcactcaatttattcccaaagaaatttcttagatgagttcccatagataagtacatctcatcactcaacaccataaccaaatcaggacaacaaaaaccaacttcaactctcaaaatttctttcagaatcattctcgcgatcttcagttctacatcgccccccgaaatctcacactcttttcctctattcacacccaaaccctttctctttctcattcttcttcccactaattcaatcacacataagaaattcttgatcacaatagaattctccttatttttctcaacacttagaatttttatcatatccttgaaatcatcaacattcttcattatgttattcctatcaccaaaaatcacaaccaatgaaagaaattcaatcattataacagagatatgtataccaagatcaatcacaaccttgttcatttcctcaattgtactctttctttgagattgatcaaggttttttagccactcaatcaaactcttttcgcctttttctcttcctttctcggcttctttctcccaaatcttcataaactcttgtaaattttgtaagtaaatcttgaaagattgtacaccaattagagatggaatgttgtactttaagtgcttttcttcaaactcatcgactcggttgcttagattaagagctcgtttcttaaactcggcgtaattagctttgaattcttcgtcttgcgccttcccgtaaagtgctgatcttgcttccataataagagaacgtagttgaattcctagtttatttatcccttgaaagtcatctgtgtttttcatttcgtataactttttggaaattccttttgtgatatgagttaatgggaaatcatccatcttttccatcatagacagagaatccatttttcccaattcaagaagatgatctttctaccttttcttcagagagagagtctgtgtgtacgtataggtttatatatattgacatatattgtgtttttctcttaacattacaacgaaagagtgaatgtgtgtgtgtgtgagagagag

SEQ ID NO: 299638 - DNA, 2154 bp, Cannabis indica
tttgtaaatttccctaaaaaatatgatgtgttattctgtgttttttgttttttttttttttttttttctctttgcagaatgatttagatcgtggatgaaatttcattatgtggataaacacacctgacggagaaatagggatgatttaggagggttgttaagaaggttgtggattaaagttaagaaaagaatgatgaatttgacatattgtcaaaacaattgagaaatgtcaaatttagtctatatatttgtattggagttattacttttcttatgtagttatttgccactttacattttgatgttgtctcttttgtaaattgtgaaattgaatataagattattacttttgtttgattattgctcatttattataagctcatatcggaatttttatctaaattgtgtaaatgggatttcggttggttcagagaataaaattttaccaaattttggtgtaaaaaaaatataatggttttacataattttagaatgtataatctaatatattattgaaataaataccttcatttgtcattaattagaattaaattttaatgtttattgcatctggttctgatccttactaatcatacttaagttatataaacatctatgatgaaaaataaaatgaacgtgatatgttatggtaattttttgcttaaatgaagaacttaatatctgatgcatattcagaacaataccaacttaagaagtaatatacatggaatatgttctagttgtgattcatgacatatactaatcaaaataacagccataaattacaagtactgctatttaaatccacatagaaagtcttctcaaaatgggacatataaacaactaatactcggtacataaatccaactctaaaactaatataaactccatacgtaaactatcaaaccaacattcaaaatgatgcataattcctgtattcctaaagaaaaaaaaaaattgagttcctcctggtattcaaaatgatgtataattcagcagcatgaactttgtattttttgtctttcatttttcattgattccaagcctactgattttcctgcaattccctccatccatagttgttctattctgtataattaaaatagattgtaagcagtaaccttggtaaatattgtccataatttcaagatttaaaataaattcatttttaatatatgttacctgaaattgttcattagtttcttgtgaacttctttgttgggttgaagaactaacggaagcttgaggtgtaggattgttgtttctttcataagttccgggatcccttggttcgattttctttgcctataatagcatagaatataaatattagaatgaatcagaaggtcaatagtatggatgcatagaagataaatattaagaacatatataatctattaaataaaaaaacaacttcaaaagtgaggagaaatagatacatactgaagtaggattgtttctagcacatgtcctcaagttgtgtccctttgcaccacaagaagaacacttcattgttacatattttctcttcagtttcttccccgaaacaacttcatcaagctcaagtttcctgcttttctttggcctacctggctgtttttttgttaattgggctttgcattccaatcttgccacttctaggccactcctcttgattcctaagcggaaaaatttggtgagagtacgctttcatgtagaattcttttgtgtaccacttgctaacatacaactctggttgttgtttgttgtgccatactgcagtcacaacatggctacacggaatgccagtaagctcccatcgcctacatgaacacacccatgagttcaaatcaacagagtacatacttctgtacatgttatggacctgccaaatcaattctcctgatttggtgggcaagtgggatccagcttctatcttgttcttttcaataatttttactgcttttgttctactttcttcttgttaaatgccaaaatattacatattttatagtgtaaaaatacaaaataaaattaattctttataatatttttatgaaattaatgcaatatatttttatattgaaaatattttattaaagattaattttatctttgtttataaataataattagtatttatggcataatagagaaaaagaaataaaaagttaa

SEQ ID NO: 299639 - DNA, 2504 bp, Cannabis indica
aaagtcctactgttagtattttgtttcatattactgcagtagtgcctggagagctgttaacgtgaattaagaggactgtaatctctctccatgcattttttccccttctgtttttcgttgacttttttcttcataaaattattattctcccttgatagtgttggcattttcaatagctttcctgttggttgacaggaggaaatttttttccatgttgcacagagacaagcaagtgtaacgggatttgaagagctgaggctggaagaaatagagcctttgcagtacagttttactggtgaccaagattcttccttgcaggaggtgccaatagaattggaaggtactgttgagattgaaggtgcgtttggttcctctgttcattttgaatctgaggaagtgatgttaagcatgactggaactcgaagagatcagcttactgcatgtgtatggtgtggggtagaatttaatcataatactcttgactctgaaatgcaatcagattctgttggctttatttgtccgtcatgcaaagtaaaaatatcaggggaattcaatgaattggataatggatcgcctgttaatcctcacccactttaagaaaaggtaccttcttaattttcaacccaggtttattttctttaatgttaggtcatatttaggtgttgttgattatggtgttctatgattatgttcgtaatagtaaaactattaaacaattagctatctgcattttatcatttggcaaaataaattattttggcttcctgctgtagttttaggatgcataaaattctatatcttagtacttgtagatttaatgttagggcactgcagggctggtttgcctgttgtaatcacaaacctgcacaaattggcattgttttccttctttctttattctttatcttgtattatataagtatttatatgttcagtctatttgtaatggaggatgccttgtctgattgttttggttggatcaggttccttagtgcttttgttttatttatttatttaatactggggaatacattagaaaataagagaatctttgtcataattcataatcagtttataataataaagtatgcaaaatgcaattgctaggggacgaggttccccaatgtagattacagaatagaaatctgatcccttgaaacaacatactgctaaatccttttgtatcaaaaagccatccaatagttcaaatcctgtaaatatttagaaatcttcttaagcacctcgaacattgtcttatttcttttagaccatattgtctaactcatgttcatacatgcgaagttccttatttcgtgtttctttcacgtaccaattctgtaatggtcccttaccccacttgaaatagattcctatgaactatgatagacttcttgaatattcattaacaccagcaatctgtaccaaactcttgtagctagtttgaaaatggacagtgtacaaacaagtaatcctgggattcgcttgatttttacaacactcatatcaacttggagacataacttgggaccgtttctttccctgcagagcttcatgtgtgattaatcttatcaaagaacgcaatagctacaaagttcactcttgtctacttcgataaaacgaaaatggtttaaaacttgaagtttactttgataccacaagctcaaatagtagaggtctataaatacaaaataagatgcaaatgaatttttttttaatatcttctttttctttttgagaaatttaaaattctcttgttaattggttagaatttcaattgtttatacgtctccaagcttgaatgtacaattattttcatattaatttatcttggttgtgtttgattttagctagttcttaagccaggtttagttgaagtgctactgactcttccttatcccctttcttgttgttgcagttgatctgagaggagaaatacaatggtgggtttggttcgagtccaatagatcgtacggtatctaggtttgtctttgataattttgcctgtcagactcatcatctgttacaattttttgtgatgaaaacaaaaaatgcccaataggtgtatttatttggtgtttttttttcctttgtttttctgttttaattagaaaaagataaagaagttattgatttacacaggtaaaatccaccaaacatagtctatctatactgttagcaaatctgagttgcctgttaatatattttttttatgttgtagaagtgtatattaaaatactattaacaactaagggacaattcaaatttgcaagtagaagtgtatattgggaggtattgataccaaaatattaaattatactattagctgtaaattttagtaaattgtatactataatctctagtactttatcactttatgtatatataaggtattacagtagaacttctatttaagaatactctattcaagaataacctctaatttgttataaaaaaatcaagtcccgatttgggccagctataaataaaaataacctctaaattgt

SEQ ID NO: 299640 - DNA, 4189 bp, Cannabis indica
ctaaatttaatttctaaaaaaattaaaaattgtgtttatttaaatatttgagtggcctatttgctaaagtaatttataatttatataataacacacaacaatgtaaacctaataataatatattttttttacttaaaaactaagcatagaaatttaaatttgtgatttcattattcgttattagatcaaaatttgatggtttgatatttttaaaattaatatttataattaaatttgtttagtaaccattcatgggtaatacacattaaaaagtgttccatatacatatatatcgaaaaccaaatgaaatttatttaaaaaataaaaaataaaaattacttggatggtcttcactgttgacttgttcaattgcttaagttgctcatctatttccaagtgttcttcttttgatattgatgatgataatgtttcttcagcattagcataatatgaaatataacataatatactaattaggataattgccctaattgccatggatgaatgagattttgggtttctgcataagccaaaacaatcacaatattaaaaaataattaaaatagtataatattcaataatatatatttataatattgatcaaaaaattagaggaaaaagaaaaagggggattgaatttgtatgtgtgtaccttgatgaaaggctcataagaaaattatttgatgaatagaatttttgcaatttagtggaatatttataggtacttattatgtctatatttaactatataaagatatatttagtgaaggatatatttagtgaaggattgtaaatgtatgtatatatatagttatggatatggttaattagaattatctaaatcaaatattctaaatatgcacttatgacattgactactaataataaattgttctaaaaactaaattaaatgggtttcggataggcacaatgaaatgaataattagatagtgtgcaaaattaaaagtcgtcagtggtatctaacactttctcatcgttattatattgctattaataagtatcaaatctcataaataatttaatatgttaacttttaaagaatattactaattagaggcggaactataactttattgcaagggggctaaattttaaaatttagtattaaataaaaatttatagcacataattattaaatttatatttaatataaaaatttagaataatttcttttgtatgtcaaaaatttcctaaaaaaatgttaaaatttttagaaaatatattctatttttaaattgaaaaaactaatacacttgtaatcaaagtacaggttaaataaacatataaataaaataatttttataattaacaaaatctaacacttagttaaaggagagatatctcaacttttactttaaaaatgaaaattaataattagtaaataattttgagccagaataaaaaaaattaatttaataagcaattgacttataaagttaattctattctaaaaatcaatttaaattttatttttattaaaatgtaatatattttatttttttaataaactaaatacttaaaattacactatataagaaaaatctgtaatacattctagtagacactcttatttctttttttttttttttttttatttttttttatttataataaaataaaattcaaatagttgtttaccacctatattagaagaaatagttatgcgtgcaataaattattcgaaccttattttcattactgtaatctattcgaaaatttctaaaaatatataaatagccctaaataactacaacgtacacgatcatgaaaaaataaaataaaagattctcttgaaagtcgaattagataaaaaatctaccggaacactcttttagagattgtactataaaccttctatattagttgcccacacacttaatttacattatatatattaattgtatttttaaattaataataaattttgttaagcatgtatacaattaaacttggctatggaactcttgttactactcaacccgttaagctgtggtatgggaaggtctggagccggttcattattcctaagcacaaatttattttatggcttgcggtgatggatagacttcagacaaagagtcgactattgaagtttaatatttttgatcacgattcttgtttgatttgtgagatagaagccaagaaatttagcttcaaacaacaagtttttgtaacagttgtggcagctattgtttataatgtttggagaggtaaaaatgagtgtttatggaattattgtttgcctacaatgaatacactaatttttaaagtgaaacaagatgtaagatatagaatttcaagtgtaatgccaaaaaatagtatctagaaaggatagagaatggtttgagagtttataaataaagattatatgtatagaaaatttcaagccttttttcaggttgctgattaggtatacaagttggttaaggaaatataataagcatttcttaaaaaaaataaaattgtttatatatattaatattactttataaatatttttatatattgaaagtgcctatttaataaaaaatcttggtttaacgttttttttatctgttaacttagattacgcttttaaaataaaaataaaatatttgtgaacaaattcgtttcccttttatccgcttctcttgttaagaggttagcttatttcaaaacaatcaaaacaaaaaaaaaaaaagaaaaaaatatacttcacttgcaagaatatcgtgattttaaaccgccaagactgagaaaaaattaaacataaagaacaatttgggtctcaattctctctcacacattggagcgccttggagagttctgaattcttattcaggtggtacatacatgttgaaaatttcagccactgaaaaatatctcagtcaatagtcactactgacattctcgtttggccaaccctcaaccctagaattcgaccaagatgaggctgctcaaagtagctacctgtaatttaaaccaatgggctatggatttcgattgcaagttgaacaacatcaaacattcattcttgttcatgtcatggtgatccccattaatctacactcaagattgtgagcgagtatatatatcttattcttcatattatattacacgtgttgtaattcatctcttctaccaacttatatataatagatatagtgtatatatgtattataacatttatgtaatcaatctcttattttagctctcgtattatttttacaattaagttataatttatcttcatttatattccattatatataaaatctctaacaattattactttcctacattgtgtttattttttcaaaagttattactttggatttttatctctatatgttaagattcaatcttgagaatttgtatgaattatcctttttattattattattttaaattcttacttaatatatatatatatataggactcaattcacattaggattaagcacatattaattcttgtatatttggatttatatagaaggaaattaaaaaagaaaattaggtgaaattgaaatgaataatatgttatgaacaaaacccacatggaaatgcaaataagaaataaatatttcccattctttttacaagaaatctagattaaaaaaaatgctttaattttttttagtaaatatttgttttttcaatgttctccccctgaaaaagattattttgaaagtgaagattaaatataattttagaatatatttaaaagtgagaataacttaaataatttataatatttcaacaaaaatgacaatatatatttatgtataattttataatatttaaaagtgagttatgaaaaaaccgaaatgatcaacattatttgcttaaaatgtataattttataattttgttgctcggttgtgtttgtaatagttttgtaattaatgaaaaatctcttttcttgattaaaaaaaaaagtgagaataatttacttaaatttattaacatggaaaaattgtgtaaagctaagttaatattataaatgtttcactttattcgtattttctatattttcaactcgaattccattattactttgcaactaaaacaataaaaaaaaaattactccaaatatttagttttactttaaatcacatcatcatcctataacatgaaaaaaggtataattatattaaaaatatatcttttttgctaaaaaaaaaag

SEQ ID NO: 299641 - DNA, 1390 bp, Cannabis indica
tttgagttttatttgtcaacaaataagtgagcaattcattttacgtaccatatttttttgggtcactaatgatggagtacttggctgagtaaacatcaacataagtaattgcagccaatggtaaatcttttctcaattgaatcacaacttcctttaatgcttggttgaaaaacttagctacttcattataaggagaagcacatccagctttatcaatttctgaaactttgtatggtaaacgttctaaaacatatggtaaacaaccaaaaggaccagtgttgtgtatccaaaagtatctccctccttgaccatatatattctacaaaatcaacccaaatcatattaaaacaccaattattatacttaaattgaaaaagggtcatcttcatttacctcaacaatcttcttgaactggtctaacacatcaggtacataagccttaacttcactactagtcatgttcaaaaagtaacctgctgttaaatcattctgaccaatatcaatggtgtaaagggcatcagagaaaacctctgcctttggcaaaagctttttgaaaacttcatctgtaagtacacaacaaacattattcttctatatgtataaaaaatagcagaatcgacctagtaaaacaaaaattaaaaattggacctttggctcgaaaagtttgagatctagtgtgaaaatcataatactcattgtattgaacatccaaagagatgggactataaccagtctgacgaaatgttgtgttctggggtctgactgttgaccctgctgtcgcaaagttgaccccatgactgaagttacttccgattgaatcaaggtatgcactcagatatggcaatccaaagctctcagctgagattgggatagagaaaaatatcatcttttagttcttagtacatttaatttttacatatggaatggtatagcatacatacatatatatatatatacctatgaaatcaatgacaaggcggccatcacagtaacgtccggcaggtctgtggaaaaaggtctcgccgtgaggaagagggacttgtccataaacggcagataagccgccggtgtctgaattggaatcgccgaagttaaatatggctgggaacttacatggactagttgtggttgttgttgttgttggcaagcatggtggcaataacaaactcaagctcagtgtcaatgctgcaaaaattacagtcaattccattggacaagttaatgagagagaaagaaggaaaaacgacagagatgagtggctgagtttaagaacgcaaatatgtgtgttttgttgtcttgttgtgtggggccttgtagttatggatgtgaatgtatgatatcctatgcgattttgtgagaattcctgaaactttaatcagtctgctgttat

SEQ ID NO: 299642 - DNA, 8348 bp, Cannabis indica
aaaaaacttgaattttgaattaattatccctctcaaatacctatacaaaaagagtttaagctttatagggattcttttagccattttattttttagaaaaccaaagtaaaaattttctttcttcattcttgatttttttgaagacacttgctagaatctccatcgctgaaaccctccaagcacattcaaaaagcttcaaatagtgagtaagttatccttcccttttctttatgcaatttctgccatatatatgcattctttttctgaattttgtgttgcaaaatttctgtgttcttaaacttgttcttgactgatccaagagtaaaggatgttaggccttttaactttgactaacatatgcttaggtcatctaattttctaattccgtaccacttttggcttgaaattttccaaattcacacattcgtgggtttctaaagaatttctaggtattcttcataattttaaacctatggacttgggaattccattttggaatgaaattccttctttttgaatcgccttggtcggcatatcaaacatgtttttcctcatttccctcgtccaactctcaccctttgtctccctcattttgtagatgaaccctggtgagtactggggaggtgatcatcatatcaaccaagatctccttcaacttgtttaggagaatcatgcccgattaggtgcgaactcatcttcatctggtgaaaacctttcaaattttagttttgaagactaggaagttagcagtgaccatttagagtccctgtagcctatggtacaacaccatcaataccccaaccagatacgtggagaggggtacggctattttatctaggaactgaagaaaagttagagacgttatcttttggcttcctaaacatataaggtctaactaggtgttgtagacacattttcgaagggtcaaccagctttgtcggccaagcataccaatgtaactgacattgtcatgactattgagaggcacaccttcgagataaagctaccgtccaggcatagaattatggcacggaccaagcaaactatgaggaaagactcagcatccaaccctcaccttgctcggctatttcaacaactgggtttgaacaagctaggccttcgagcgaggatgttgaggttgtcaagagggacattaatgtccaatatattgaggactggggcgaggtccatccaaacagtccctctaaagttgaaggagaagaagaagaaaaagaagaagaggttttagcactcccctttcggtggtttacgaaatgaaactccgagaacctatctccaagctagggtaggtcgttggtggtggatcgagattatattgaggaggaatacacagaggctcagcctctaggcacttgaggttcgaagggtcctcaatgggtctctccaccatctgtgtttacgtttaagagattaactaatctctttgaagagggcctcctcgggaaggtagaggcattcctacctagtcctaagtaacttgccataaatctcagaggctaataaagcgcatgtttggggccacatgataagtagtgtgccatgttgccgttgcatccatattttatggagatggctaattactaccacgtatgtccaacccagttcactcccaaatggataaaatacctggttgaattgtttgtgttgtacgctacccagggatggggttagccgtcctcccgtgatactaactggctatttgacctgaaatctagccccaagcaaaaccaaatcgtgatacttctatttttcccataatgaatactagtggctgagtgacactacggacaaggaggtgtccaagatcggtaggtttattgaagattactaatttgttaaggacatgggtaccgaccatgtctcctttcagcacaatccttcttactaccatcctccttttacgctaggtcttaggtcaagagcccgaaaattctccaactaccaaagtcagctcggaacatttctcttttagccactacagataattttatcaagtacgtgctttacccatctgatgagacttaggagtctgagcaagtggccgaggggcttacggccgagcaggaggctctgaagaagaagaaagcttcttaaggtgaccaagtaccaattaaacagcctgttaggattagggatgaccctgaagaagttgctcgtcctactgaccaagtggtagggaaagggaaggttgtggtagtcgaggaagaggacaaggattcctttgatgaggatgccccatcattacttgttaaggagggtgctcccacagatgtacatggtagttttttttccaattagccttgtttattcttgtttgtctatatttctaacaagtgtttttctttttatgcagccatgtcagagagaatgacgcgtgccttgaggaagagatcgatcaatgcttctggttataagtcttcggtcaagcattcaaaggtgggtgatgctcttcccaaaggcattactctgagctccaagaatccttatgtaacgccctaatgaataggcacactacagtgatctttagattattgtgcactcctttgctaatcaaagagttttctcaaaatagcaaaataaagcctatagtgaaggcgtgtgtgctctctcattattctcccatggtgaagaaacgacgagtgattcaaaaacctgtcattcgtcaacccagcgtgattgaaacagtgattgagaatagagaattagtctgtgataaggtggaaggagagatggatttggtagattcatcgactattcaagctacggatggagtggaatgtttagatctagaatcagagggaatttagaatgcagaggaagaggaagagtgggtggaggaggctcaatcttgggctgacaaagttgaaattgatgattaccaagcacaatctcaggtacagtggcagtacttcgctgataggaagttgcacattcaagaggagaaactctcgttcaaagaaccgttattcaagaatggattgaaaatttcctagctggatgtggaaaaggtcaaactacaagcaaaatgctgggaatcaactattgtttgtatggtgctaggagctaacccacctattgcagtgtttgaaggcttcattcgaagaatttggggcaacctgggcattgcccaaattgccaggatgaatgggggttgcacaataatggagttcaatgatgtagccacaagagatcatgttctagagaatggtatcgtgcagtttgatcataagtcggttatcatcagaccttggtcatcggatctcaatgctataaggttagtaaaatcagtccctctatggatcaggttgtatgatttggggttacattattgggggagtaactgtttgagtgtgttagtgagcacaattgggaaaccaattatgactaataaggttactaaagagagaacaatggtgaagtttgctcgtatcttagttaagatggaaataatggatgcacctcctagaataattgagtatgttaatgaatatggtagacttgaggaccaaggggttgagtatgaatggctgcccactaaatgtaaaaaatgtggaggttttgggcatggcatggcagactgtaggaaggagggaagtagtaaatggatgaagaaagaaggagtggtggccaaaaaagaaaagaaagaaaatggcacgagtttggcaacagtgcagtacaaaatggtgagacttaaacatgttcttaggaagtttaaccaagtggtcgttggagatgtttaagttaagtaccacatggccaaaacaaattaccaaaaagctaaagaagaagctcattctaatcctagggatgacaacttcttacaagctgaaaaacaagctgctagtaatttccatttccaagatcagctccttagaagttttttgatgcagcagagtaaaatcaattggctaaagaagagggatgattgcacagcctacttttatgcttgcttaaaaaagagaagggaagaaaatagaatcactagttttgttgatgaacaagggaagctgattgaaaattattctgatgtggtgaatcactatgtcaatcattttaaaaacttcatggggagtaaaagtatagcttttgaaagaatagatgcagactgtttgaagatgggcaacattcttaatctgtaccagcaactggaattgattcgtccttttatagaaaaagagattaaggcagccatgtttagcattctgagtaccaagagttcgggtccagacgtgtataattcaaaattctttaaagtactttggcttgaaataggaggggaagtgagcaaagctatcttggcattttcaaaaacaggtaatattccttgctattgtaataagacaacaatcactttagtacctaaaactgagatttcgagtaaggttgttgattataggcctattgcctgttgcacaaccatttataaatgcattactaagcttatgtgtaaaagattggaaaagatttttccctctcttatagaccttaatcaaggagcctttattaaacagagagaaattgcttacaacattttaattctccaagatttggttaagaattatgggagaaaaaatgtttctcctagatctgctgttaaagtaaatctcagtaaagcgtacgatactgttgactggagacttatggaagagcttcttgttggattgaattttccttctagatttgtgagatgggttatggcttgcctggagggatctacctattccgttgttttaaatgaaagattacaaaggtccttcaaggaaaagaaagggctgagacaaggggatcccctatcccccttaatttttgttatcattatggattatctcaccaaaagattaaagttagaagcaactcagaacactttcaaataccatccactttgcaagaatttgaacctggttagcctctattttgcagatgaccttatactttccaagctattaaacatctcaaaagagctctagttaaatttagtaaagtctggtcttggagctaataactctaagtctatggtctactttggggtagtttttaatgagctaaaatagggaattccggatgtgttgggctttgcagagggatctttcccgctcaattacttgggagttcctttgagaataaccaaatggatgaaggaagactgtgagcctattattaagaaaattaaaatgagacttcttacttgggctacgagacatctctcgtttgctagaagagcccagttgattcattctgtcttgctgggattgcacaactattggatgaatatatttattcttcctcaaagcacaatcaaagaaattaaaaagttgtatggaggtttcttttagggtctcaaagaagacaaaagcacgatacatgtggtttcttggaaaaaagtgtgtctccgaaaaagatatggagggttgagtttccgagagggaacaatttggaacaaagctttgattggtaagtatatttggggtataatgaagaagcatgacctttgggtcaagtggatcaatgtcatttacttaaaaggcaaaaaaaattgggagtacattctccctaatgacactagttgtactggcataaaatctgcaatctgagattaaagttcaataagcaggttttgatggcggctgaaaatagaggaaggtacaagacttcaaaactatacaatagtgttttacaccagcaagagcgaaagttgatgagaatgagctttaagtcgccatgaatgaccgtaatctaataccaagtgagaaaacagagtgaatcaactaagaaaatttgggaaaacttgtgtattagaaatgggactctcgtgttatgatcgagagccaagagtacattatacttatagttaagcttttacaaataatcaataacaaccaattctaacaaatctaactgaatgtttgttaggcccattcttgatagctaatgtctgagctggtgcataacaatttctcaacaatatctttcatattctaaattgaaagtacctagacaaatcttccatccaccaaaaaatcaaaataaacagaacaaaatacaatgaaaccatagaacaaatttctatgtcagtaagggaatcaccactttaattatatggttgagattatttatacatcgaaaatgtgtaatttaagcgtgtcacaatcattattcatacattttgaggtgctacaatttggtgagatagtaaatgaataatttgttaaataaataacaactttaatactagtaattgtttgaaatcttgatactcaagggtgtccaaatttttcaagcagctctgaaaaaatgacataccccgcacctccgagtatgatcgaaagagttatttttcctcctggaaccagctgaggtaagagcattgatgatggtgatgaagatgagtatctatctgaccaggacattgctgctggaactactccaaacaacaccaagactaacgaaaacaaagcgccacaaatttttcagctaagaatgtacttaaagaaaatttaattttaaaaaagaatgacactttagcaagcaataataagtaacagagactaaaatgagaaagaaagaaagaaagaaaatatatgacaccaaaaaccatacctccataggttccagcaaagtctagtgctttgaaaaagatatctggatctagcaatgataatgccagaggtggaaacagggtcaagatatatggcacggggcttcctcgatcagctggaagtttcagcactggatgttcaataaaaaatgtcaagagttaagacatcaatagacaaattgttagtgaatgaagtgactatacagatacaactcataatatcctacaaattgttattccatttttgtcacattagcatgattttaaatgtgtgaagttcaccaaaatagacaaaaattaatctgacaatacaaaaataatttgcaacaagacatgggcaatgtaaggtagtccactctgtatttgttctttattcttattttattaaaaaagaaatttccttactcagccagagaagtggcactactgtttgagctacccttcatggatgcacattaattgaccatttacatcataactaatccatgaaaagagcaaagaacatgaagatcacatatataagatgttaggatgatacaaagggtgatattagcacttacagtcagccagaaaatcggagagccccaacacgaatccaatgtaagatgttgcaatagcgagaagagagaacgcctcaacaataggctgtaagacgtgttaaaaaattaagaacaaacacttcagcaaggtttcttcaaattcttataccataaattgtctataaactttgagaattatctaaagagcttactccaacagctccattggaagattgcaattgttgtaatggatctatcatcttatcagcacctagttcaagatttgttatggttccaagaataacagcattccatacaagaaacagaattaaaggtatagttgtgcctaggataattgcagtcctgtaacaatgagttcatacacagaccataaattcaattagtcacttaaaagtagtaaaataaagctactgtaatgtgcttccctgacctataaatgaaaatatcaaactgaaagcaatgtattttgggtcagttcaagtgtccacagaccaatatgccaagtttccaagatcatgtgtctatccaatttgactaacacaaagacaaagacagtcaaatatgtggacataacttctttggtagatacatggaccatgtaggctgtcatgaagttatgtttcacagtgcaaacaaaaccattaaatctctactctgaatttttatatacagatacatacaaatacaaaatgtgttgcaagggagtcatattaacaatgacaacacaagggccctaacaaaattattgacaatatgttattattcattgttattattggtctcctgataagcatttaggttccaacttgttaattgttcccatacgaagagtgtaaccgcagtaatgaagagtgtgtataggcgctaaaactaattaaagaagggaggataaagagaagaacttgtggcgtttggttggaggtaatgaaatggaatggaaaggaaaggaaacaatttccattccattcttttgtttggttgcatattaaaatgttggaatgtcattccaatggaatttccaccattttggtggaataacaattccattttgaaatggaaggaaataccattctgatgcattatgagaaaaaatttaataatttttttatcaattttttatacatattaaattttattccattccattcctattcacattcctattctcattc

SEQ ID NO: 299643 - DNA, 2891 bp, Cannabis indica
attatggattcctgtctaacatctgtagtgtgattgtcttataaatcagattcagaagagatcaagaaacttttgaataactgtgtgctgaagcttaatggaggtctgggaacaacaatgggctgcacgggtcccaagtatgcagttttatactaaatccaatgctttttaattttttaatgaattttctttggcatctctaattgttgatcctgtataagatctgatgcaaattgactaatttaaactaaaaccaacctttcagcattcaaattttccaaagattgccaagcgactacccatattttaattttcgaaagattcaatccaaagaacactatgttttacaatgtaataattaatttttcatttaatttgaaagaaaagagaaacattattcgggcattgcgtgagtttctgtgagtttgatgaatggactcccagactgtatgttgtattgtgccatcttcctattttattatgggctatataagatttttgccatcggaactaatgacccctctcaatttttcagctcattaaaaatgatccccaaattatagtgttttaaagtggtttttctgtcaggttttgttactggtgacgtggcagtttagactactgccatatcagtgccatatgtgtaattaatttgagaaaaattatttgaacttttttaatttagttttacttaatttttttaattgattttttgcttgatcctaaattatttaatctgactctaactgaaatttttggtgtgcaggtcagtcatcgaagttcgggatgggttgacgtttcttgatttgattgttatccaaattgaggtttcttcttctttctctgcacacacagcacgagcatacatacacacgaacgtgttaagcaggtcttggcctaactctgttgtcattttgcagaatctcaattctaagtatggatgcaatgttccactgcttttaatgaattcattcaacactcatgatgatacattgaaggtacttacatttaatattcatacgcagttgtaatctcatgtcaaatggatgtagcgagtttatcacttattatttaaaaattttatgtaaataaacctagttgtttgaagtggtgaggagaagcagagtttttaaatttgcatacagctaaaaagctgaattttcagcataaaacaaacctgatattgtattaagaacttgtaggctttagaggagataattacattacagttttggtgcatgccaaaatttacaacgtggtgacttaaatttattccatgtgtttaggcacactaaaccgaggcattgttttacttgaaaatgtggtttatgtaggggtggttgtatatacgtattatattatatttataatttgtaagaatgaggctgatttactgacttccagctactatatatgtattatattatataatataataatttgtatgtattatgttatattatattctgtttttactgacttccggctactatgtttgatttagattgtagagaagtactctaactcaagcgtggaaattcatacatttaatcaggtttgctagtgttaattattttattagctccttcttcgtcaacttctgttggtacttcaaagaaatgaacttatatactcttatcttctatgcattcattcagagccagtatcctcgtttagttgtcgatgatttttccccacttccgtctaaaggacagacgggaaaggatggatggtatgatttactttttatgttggataatttaaattgtgaaattatgctgtactgtatctgcacataatttcttggttatgatcaattaatatgatcataaagcacttcagcatcaacaatattgttggtgtctgacttttaattatgatttatttatatttttaggttaaaatgttaaagcttgtcttgtgctctatgggagtcttgcttgcttgttttgacaaacaatttcttttttaaactgaatttgtttctagtccttgtgagatcttgaaaggtgcatttaatttgatgatatttatgtgaataactattttgaaatgtattctgcattacatcaagtcattccgtttctttcaacttagccactcgttcatgggtaaaaatgactacatgtttcaatctattgcatgataatagtgaaatgaattactggcaatctctttttgttctttttttgttgtttattttattttatttgaaatgtaatatcagtcttgctagtttttaaattttagaaagaactattgtttaagttgaacatttatattttgtaaacttacaatgagcgacaagttacaactcactataacatgctaaaaaaatagtaaatatgcttacagatatatttgtgatgtgattgtgtgtactgtgtttcatagtgctgagcagtttgtttacatgccttgcctaaaaagggtactcagatttactattaaatgtcagtcatgatatatagtttctatgaggtctttgctaatgttggacatcaggttgaaactaatgaacaaaaaaactgaaagttacaatttatgttttgaattatataactatccttcatcctagattcataatgtagagtaagagttgaaaagttctcatgtattatttaaccagaaacattgaccttaatgacttaagtggatgaacattagagaaaccaaattcttatgtaatgtagaattccatttcaaactcacacgatagttgtgctgatatgaatcttcatggaccatggtgtgagagtttcagttaatacgggtaacctgaaaaacctccaacctagatgcctaaaatgaggatagagctccccacttctagattcaaatatgctccacaatctttaattcttggaaagagaggttgattcccttgatgc

SEQ ID NO: 299644 - DNA, 3225 bp, Cannabis indica
acaaaggcaacataattgaggaagaagatggagatggagaaatccaatcatttttcaattcagctcctcctttaaggaacaatagtaacgatatcaatgcaaagctagagtgtttcaatgagatgaacataaatggaggaagaagaagaagaagaagaaggattgtgtgtgttacatcaggtggaaccactgttcccttggaacaacgttgtgttcgctacattgataatttcagctcaggccacagaggagcaacatccactgagtaattctattcaactctattctcttatattttcattattattattattattattcattattattcatttcaggtactttattaaggctggatattcggttatctttctctatagaaggtagtgaatactaataaatacccatctcattctcaaattcattctcttctcttcaattgtttcaattgaatttggtttggtttgttcatttcaggggaaccttccaacccttttgttgttctcttccagatgatcctttgttacagtgttttcagttaactgatgatgaatcacacatcaaaggtactcttttttttttgtatataaagatttggaaatatctatagtacacagccatgaacatgaacatgatcataactagcttgtataacgttattatatttttcaatgattttattcattgctttcaataaaaaaaaagtggtggttttgtttcggtattcaagaaagttttttaatctaaaatctatctggaatgctgcaacagatagaaaatacaccgaaacaattatttagggaggtgtagtatcttttggcagacacctaatttgtagctatttatgtatactattcgaaaggtaatcttaaacggctataacatacgcgatcataaaaaaaagaaaactctactaaatgtcaaaaaaggttaccgaaacaactctttaattttagttttaggagagtcttctcttctgttctgacactgagaatgagttggtttcatgtttcttcagtacaggactcatattctgaagcagtaaaaagggccattgctgaccatcattctgtatttatctctaattcattcattcattcattttcttactttcttggttgttacatttcagttctgcaaaagagaagagtgaatattactcaatgttatgaatgattatatatatatatatatatctaataattgcaggctgtgaaaaatggcttcttgttgaaacttcctttcacaaccatatttgagtatcttcaggttagattcgttcatgatgagtaaacttggcttctttctttgtttttagtctgttctgaagaagaagaagaacttataagtctactttactttgtgattaattaattggtcagatgttgaggatgattgcaatatctttcaacaaacatggaccaaatgcaatgttttatctagctgctgctgtttctgacttctatgttccttggcaaaccatggttagcaacaatctcttaaaaccatatccatatggtgatggtggtgtccactccatatgatattttgtttttgtgaacaacaatttctgatgaaatccgagtactccaaacttaaacaaaaccagtaaataaatagtatgagaaaacccaattacaaactgatgggagtccttaggcccctttgatgcaaatagagattttactcaatacatcgcatatctcttttctaactttgctctcctatatattatagtaatttctcacttaaaactaccctcccaaataaagactcatagaccctttttatttattattatatgctagcacaccatactaaatcctagtgcctaacaattgtatttggtcaccatcatcatcaccagggatttattcttttactcttgaagattttccttgttataaatagagagaattagttgagttgagtgttgaatttcttaggcagaacataagattgaatcagcatctgggccattgaacatgcaacttgctcaagtgccaaagatgttacctgtgttaagacaacactgggctccaaaggcttttctcatttcattcaaggtaacactaaccttaacatcctctctctgttgttgaataaaaacaaaagattctgtctgtgattgtgttttgttgaaacagttggagacagattcaaagattctgttgaagaaggcagctgcagctcttgaaaagtacaagatggatatggtggtagcgaacgagctgtcaactcggaaagaagaggttgttgttgtgacaaggactgaaaatattagagttaggagagacatgaatttggatgttgatgatgatgttgaacatcctctaattcaacttcttgttcaaaggcattcaacccatattaacaccaattctgatctatgttgatgatgatatcttctaattctaagcctcaaaatttactatgttgaatttgttgaagaaataatcaagcaataatatactgtcacattgtcatgtgactgactttgtatgaactcacctcttgtatgagataatttaatcttaatgacagactaaattaacagttgtacgtccatcttatttatttattttcataaattatttgttagcaaataatgatatgtaattgtagggacattctatagtgtgcaaggggtagttattttgtgtaaaatatagttattttagatattctgtaaatttgtgagaaatttataaaattttaacgttctaaaaacataattcaaatagtttatattgtatgtgtatttttattgtttttattttatacgtgtgtgtaaaataaatagtttaaattctatttttttattataaattattttaagtaaattagggtttttgcctcttgacacatactaaattatacttcttgaacttttaaaatcgttaaaaatctctcgaactattgatattgttgaatttgagtattctcgtctaatttaagaaagtctaatatggatgaaagttcagagaacataatttgatacatgttaaagttcgagaggtatgatttgataattatgagacatgtcaaagttcgaggggtatgatttaataaatatgggagcataatttaatacataaacaattactaaattagtaaagttaaatgaattgaccaaaaaaatttaaatttaacaatcttaataatttaaagagaatatttcaccagtttttttttttgattcaagcgtttatatattacatcatg

SEQ ID NO: 299645 - DNA, 830 bp, Cannabis indica
aacacccccgtgaaaaaaatttagaaaaaattttctggcatgtgttttcaggcatgaagaatgactaagaagttgtaacaggaggttaacggtagcattttttttataatctcattttataataaactaataaaaatcattaaaaagttaaagatattaatagtcttctctttctaaataatgagttatgtgtgtctatgaactactatagtttatttaactagaacatataattaaattgcgggctttggattagattaaaataatataatagaaataaattgtgggctttagaacatataattgttttattatttattttttatttaagcgtttatatattacaaccatgttttacctgggactcgaacccaagatctccaagacacacacacccacctatggccacttgagctagcctcaagtggtttaaattgttttattattggttagcaataatattcttttaaccaatttgtaacttgtaagtaataagttgaaaataaattagatataaagttgtaaatttctatttgccattaaaaagattaaatatgataaaattgtcttaagctatttcaatagaaataagttatattagaagaatatttaggttgttttgggattattattaaaaaaaaaatcatttttaattcatgataaaattaaaaactatttaaattctttcaaatccattcatgttctacaaatttatccatagagtgcatagaaaaagagaaatgtacctcttacattgttattagagtgtaatttcatagtctagtaataccgtgggcggtgttcggtaatatttttatttttcaattttt

SEQ ID NO: 299646 - DNA, 2093 bp, Cannabis indica
aaaaaatatatatatataaagttcctttttatatatattgaatctgtatcttaaaggagcaattaattaaattttatgtatataataataatataggtatgtagaccaactatcaagatgcctctacgtggaatacaaacacttgggaattgatgtacagtgtcaggtatcattacaaaattaaagtcttctcaaatattttaaaaagtataataaattgcaaaacagtccctcaaagttgaggagtggtgtgataatattaatattaatgtaataatgttgatgtaggtaccattgtatgtggcaacacaaatggtgtcaaaggctgcatcgatagagaaatcatcgatgtttataccaacagcagatgattatgcaagagctggggtgagaagaattgggtatgaatatcgatgcactccttattgggcacactccctccaatggtgttttgcctctttactctcagaccatattcttaatgcatggcgtttggccgttgttactcgcagaagaagggactccatttctactcatcatcttaattcctctctttaagtaactaacatcaatatttttattattatattatgttaaaactataattacactatatatgtttaatggctcaaatgtgtactcatgtaatataaaatattaattctctctaccttttaacaaactataggaatgaaatacaatttacagtcttccatggtttctccattaataatagatcccttattacaaatcatgatttggtaaaatcagctcctgattatcatcattgcaaatactgattggcagagttattaatgaatctatgcttggacaaatcgttgggtgctccgtgttctactgcttagagcatcttcaatgcaagcaatgctcgaagttgccattaaactttacattaccataaaatataatattttatcttctctatcttcttcgttttttgccattttttacaagaaaaatactccaatacaagcaaccctaaaaatatactctaaaatataatatttatatttagttttcaacttttattatttttctaaaaaatcaaaaaatcaaaaaaagacaaatattaaactatacgtctagggataaacatagtaaaatatacgagaagagatatctaaagatctcgtgaatcatattgactctcccacacgaatagggtgaaagtaacaacactcaatcgcctcacattatacacaacgtagtggtcatctcgcatcactaatataaataaaggggtacaacgagatgaagtacttctaacacttagtgttttttcctaataagatggataagaaggagaactcatgtttggcgagatgcaaccttcctagtcagcataaccgtctaaaggataaaaacaaggagcagttggacggttattagatattatcccatatataaataaatgaaacgtggcaaatgtccacgtttcatcaacagctgtaaatgaataaatcctaataaaaataatcatcaacctatattcctataaataagggcagaatccatgagaaaacgaacgataaaaaatagagagaaaattctgttatttgatatactgaactttgtactctgtattctaaaaaatattcctaataaaatggactcgtagagtatgtagattttaactacaaaagcatgtaaaatatctagtgtttattattattattaaattctgtagggtatttattgctaaaaaagctatttatttagttaataaaaatttgcgttaacaagctttattaagagactagtaggcagtcttagtggagaactttttgttagtagagtctttctaaataagaagatctttagaggtgtgaaaaaacttttagaaatgaaggatcttttccaccactttgaaatctcaccccttaaccaatttccttgagagttaaaaaggctatcaaaagtaacagataaaggaatagccataggattgaaagtcgcatgcaacaggtcctaatcttctcaaatcaatcagggggaatgccaactatcaatagatctaccagaacttataatgtaacaacctactagtttaggcgtgttatcgtaattttata

SEQ ID NO: 299647 - DNA, 5529 bp, Cannabis indica
tttgcagagatagactcacagacgatttggtcactagtatgatgattgattaatgccatgtatacattctttgtagtttaaaccaagtaaatgataatgtcagagagataaggatgctgaaatctagggtcaacttcatacaaaattgtttacctgaactaagatataatgtcaagtaatggacattattaaagaaacaatctatcaacatatatatttatatcattcctttctgatataaaaaatcacagaaagctctgtcatctctgagaatatgacaatacacaataataatgaactgtcatttcctgtggctgttgtggtaaatgactaagcttaagaagatagtgggaatgagctgaactactattagtattttcttatcctgtcctgtggtgtatggtttaaattgtagacataatggtaagaaagagaaaacctaggactataagacatgaagggctaaaaattggcctgcaaagtctgacaatgtaaagagtatgagagagaataagatgagaactctaaagcaattcacgggagttgtatggtgaggataagatgcacatgcacttgaagtctgattactcttgttcttgttaatctcctttgtagattttggggtagaattattgcttagtcctgcagcaacagcaggaggcacattggtagaattgggattttcagagaaattagtatagtcatcaacatcataacctgcattacagcacccaattcagtaagaaggtataagagaaagataagaaaaatgaaagtatttataaatgaaatgaacacctacaatcaaatttcttccagcccaagatgagtttctctctatcaaacaccactcgatagccagtcatgaagttctctgtcaaaagttagttatggtagcataagtaatataacaaagaaaactggcccatcaaaactgataacactgtatttgtaactccccacaaaaaataaataaataatgaaagtgtatattcacccatagtgaaataagaaaggtaaaagtcatcacatggttgttaaggcctaggcaataacaggcatgtctcatttgttgattgtggatatgataacaatggattggaattaaaaagaatgatttaattgatcatttgccaagactaaattatgagaagatgatctatatataataatcatcctaagttcctcaatgagattaaactatctcattctagatggattagtttcacagttgtatacttgaattaacttgtaatatattctttaatttcatagcatacacacatgagaaaaattgtcaattcctatcctgctcttcaaaaagtaacttaggagttccaatatactactaacatcaccaatgtgcatatttgccattatattgattcattataatcaactagagcatatgcaatcgctcaacagaaaatcctgccaattacaatgttaaaagacttacgtccaattatattcagttctgcactcttgacaactgccaggcaatatacaatttcattctgcaaatcaggtgcaagaaggattagaacttaaaggatgtagcgaatatataaaaattcagcaactaagagggaaagagacaggaataaaacttacctgagtggagatgacaatgatgggatcaacgacagcaaattgacttccacctttcatagttaagcgcagagtaggaatcaaactagaattcacatcaacactgcccatcaccatccagaaagaattagatttggaggtaaactttttttgaaaggaaatacgcataaatgtatgtgcgtactcaaaatgatgacaaacctcatatcataacaatattcaaaaggaatccttgagtctgatggacgtcgtgtatcatgaacctgtgaatgaaactgcaaaagaatatgaatggaatgcaagtgtaagagcaaaattacaaaaccataaatggtgagcatgcatttcactgtttttcttacactttctgcaagctttgtataggctgggtcaaccaaatatgtgaacgaggtccctgaatcaaaaagagctgccaaatccacatcaaataaagttgttccaactcgaatttgggtaacactgatattgtatgttggactgccagaaaaaaaaaacaagaatattacataaataacaatgcaatggaaaatttgtgtgtttgaaggttattcagcatctgtaaatagcatagtgcatgagattcaaagagttataaagtataggctgtatagtatatatagtaaggatacaaatgcttgtaatttcagattagttaatcgcctaatgtctgttgagtaggctttgtccaggcggtttttgttgcctgtttggtgtagccttttggcttgtttgctgattaatgaattctttttcattgatcaataaaaaaaacaatgccatggaaatcttctacaatgcccaaatttaatattccaacttaaataattatcagcatcaagtacaagagaatttaccacttactgtgatgggttcaaattaaatggggtctcttcctgatcgagactgcccttgtcaccaaaactaattcttccaaccccatcttgtccaaaacacatggaaaaagaatttgctataaacccttccctcgataaaatgctaggtactgatatcttctccattccaagcccaaataaaccattgggagctgcaacatcaaggaatgaaccgctttgaacctctccacaactgcatataattcatgatacataatcatctacagacgtttaaattgtgaaatgaacaataccaatcaagtttaacaaaaatttcatttataacaaataaacaagatgaaatggaactcacccgaaagtgacgtatgcctcaacaagttcctgatatttatcttcccttttcaagtgcaggacatcctctatcaatactccagaagtagatgtttctcctgagacataagagaccatgtaagggcaactgcctaattcaaggcaacgattccgacggccacacatagtattgttgcaagtaacctttttgcttgttgaagagcctttggggtcatacatattagactgaaaatcctggaacaatgaagcataactatacacagttaatgaagcggccacagaaagcatttgaatgcagcactaactatagcatgtaaggatgaatgtgcaaaatcattcacacatatgaatgcgttgaagattccaaaagtttcactttcactttgtaacacctttttctataagaaatgacactccaaccgataaatttagtcaatgttcacaatctagaattggacacagtcttctcttttgaagtagtaataattacagaataaaaaaccctccaataccattgagcagaagattaatattaagaaaaagcactggtaatatcattttagcattagataaaatattatattttcaataaagaaatgaataaggagttaaaataatcagaaagcatacagaggaaaaagttgtgccatcagtaggagcacatcggttacagtcacagggcacccaaaataggtcacttccagtatctagagccaccatgaacatcattcccggagtacccaacttgaccgtcgtataatgcagactacgttaatctccaaacacatttcaagaaaataaaaaaagaaattttagaaaccctgatttcaagaacccaaacagaaacagaaaaaatggaacaaaaacgaaaagataagaaacatacaatcccaaattgctgagcctaaaggttgagtttccttcggagaaggcaagcggcgcatcgatttcggaaagcttccggccacggaggaggcgatcgcggtgggccaatgcggcgtagtactcgtagcttcccttctccggcaaattttgaggcggagagagcttaccagcaccggaagtctccgaccacttcttgacgggttctgagaatcgatggtgcatcttgaagctgaagatgcggccatggcaactccggaaaccccagatcaaaaccaagaaggaaaagacgatgacggttttggtccctaaaggaaacaatggcaatggcatttttctcttttaaggaaatcttggcatggaaagaacactcttttacttgcactacactagatcttggagttgcagagaaccaaggagaaagagagtaagagagagagtggagtgattttctctgaagtgtattttctttctttcactgaaacttttgggtcttcttctttttggggtcccacttccttcagtctgtgacagttagggaagttatattggcggtttttttcttctttaatccatactcttttcttttctttttctaatccaaattaaaattgtttttgtaaagcttataaaggagtactatttttcattcttttttttttttataattaatcaatttttagatttataattacatgttaaaattataaataatttattttactgaaaataaaattttttatattctaatcgaccacacgtattcaaaaaaatttaaaacttatttttaacactataaactattcgaaattttttaaaattttacaagaatgatgttgtaacaaataacaaacaccttgaaaaaaaaatattctaatacgtatttgtgaatacataaattaattaagaaattgtaataagatttttatgagcatctttaactatgctctctaaacacattccttagttaaagttgagagtgagaatgagctagtagcttcttacgtttttattaaattttttaatatgattttagtcaaaaatatttttttttattattttataaaattaatttatatttgataaattcaaaatataaatattattaaaataattaaatattaccaaaagaatataattagaccaacaataataaaatataaaactctactttcattttcatagctcttaagtatatttaataacactgatttttaggggctgtattcgctatacaatgttcccaataaggctaagtatgaggtattatcatttgattatatagtcgtgttattttaaagtattgttgttttcaagatctagatcgactgattgataagaaaattaatctaaatcttatactattaagtaattaatattctcttatcataatttatgatttgacttttgtaaaacaaaattaatgtttaatattcatgtaacaaacaattcaaagctcacaagattccctacttatttatacacccaacaatcctcccctcaagtaaaacactacattgcctcccctcaaacgattataaatttaaacctgaatctctcgattccaacactcaaaatctccttgagtatcaaaatctcttcgaacacctgaatcctttgattctaacactcaagatccccttgaataagctaaatgaatctcttcactagttagattcgaaatcccttcaaatcaaatttgaacctttagcgactttagcagcaagctttacttcttttgtttgtcaattcgagaattcattcacgtggctaattttaaaggggaaatttgattttctatacttagaaa

SEQ ID NO: 299648 - DNA, 7270 bp, Cannabis indica
ttttacttggtgctctgattgtttagttattcatttagttccaagaaaattaaaaataaaagagtaaaagaacacaacgtaatcacaccttgtaaacagaaccaaaccctccttgaccaagtttgtttgtgatattgaaacggtttgcagcagttaaaacactattcaattcaaaaatacacaactcagatggatcttgttgtttggcaccttgaagattgtgtattggagtttcacttatctcggccaaacaaagtttccttaagatctccttaatgggccatgctactccagctttaaaatttggagttagattgagagatcaaacaaattttgagacgtacaagaaactataagagttagttagtctaagtgttaagttgttatctcacggttaattgcaaaccatacagtgagataacaactcaacagtttaacagactaactaactcaaatagaaactaaaaattgaaatgcacagaagatttattattttacttacaactgtggctagttctccatctatgatttatgaaaacagcagcaagaagaagggcacaagcagaaacaactgtgaggatgatgacaatcttcatggttttctgtcctaaataacaaatgaatatagaacatgtaagtgttggaataaagaagaagatgatatttaacaaaattcctttaatgcaacaattctcaccaagttcagctggtgcaaggcgaataaaaagatctgcaccgccatagggaaatacctgaatgtcaataagatcttctgaccagaccaaacatccaatttcatttacataagcataagctacgcaagaacaattgcttagacaccacgtgtagcaatcactggctttataaatattgttcacagacgtatacaagtctggaaggtttaacatgctcatcatgtgaaatccatctgttttttctccatttgatggttggctactatagtttttctgacaaagtaagttggttcttcttttgcaccctccgctccaaataccattcctccactcttgatctgattttggtacaaacccttttaaacacttgcaaattggaaactcagatgctttgcataccccaaaggctccgcaagttccatatacgtcgcatcgagtttttggtaataacttgacttcgtcgttgccagtaagtcttagacgaccttgagatgaaacaaacagacttctgccaaagaaattatcgaatgaatttaaatagagaaaagttgttcctttctcaaagtcttgttggagatcaattatatttagatatgatccacccatccctggaatacctatgaacttggatttgtcccatggtccacttctccattgaggcatttttccattgagccaatggtaaacttgcgggggtgactgtttcgagattccaagtgtgaaattccctggtaatggatcattatcacccttccaagaggtcagcacataattagctccagttttgagattataacctaacgttgctcctggtaagaatgtgtcccctaagtgttgaaagctctgccataagctttctcctgttttgtcatctttcaaaaccaagttaccattatctgaaagctctacaattgaaccatttgatcggacaggaatattagttgaccagataacagacttgttcttaccactcaccagctccagatttccgttactaccaattatgagactggcggaagcagagtctacaacttttaatggtttatctctgttagccacccagacaacagtacggggtgagatattcttataccacatgcccacatactgatttgcagaattatttggattgaagaagcctaactcaaaaaattggttcggggagactagagtttgtgtttgagataaggactgggatgaagttatgttataaattgcatagcaatattgagactgaaagcagaagaaggataacagaaatatattgaacatcgacatgctacacaatacaatctctggtgaatggactacttttgtccaaataacattcttccatattattaaatttgtatgactttatatttttatttttatttatattcaattttttcccttcaatttttatgtttctcaatttttatttgtttgtttgcttaattgaaaacctaaactcattttagacaggtctctgaactagataattttaactagttggtcactaaatttttttctttagcaaatatataaattttggcaaattgtttcttaaattttattttttcagtaaatttatacccaaatttttgttaattttttagtttttaatttcgtatttttaacttttttttttgttttttcaaatatttattttattttaataaatttttaaaagataatgtatagttttttacatttattttcacttttaacaaatttatatatacattgtcaaagataaatgtataattaacatatattttctcactgccagatgtttcttttcgctgccattgttgaaaatgcaacttaattggtatttctaatatgatatactgactgactgcactttcaacgaaaatgcttgaaagttttaatttgatgagatgagtcacagtgcatgaataaagtccaagcaacaattaatataggaagtaaacgtgtgtggtcatatgtcgtaatataatttttgaaattttcataaattaacacgtccggaatttgtcaaatgaagaaagtggtacttgaatttaaatttatatttatataaattaaaaaggaatgacaaaattattgagtctaaagacctctgtttaagttgtgtattttgattaaaataaatataatagtatccagtttattatcggccttgaagtaatgacagagtggcttcattcagtgagcttttacttatgttttggggttgacgttctcgttggaaagtaaagataggttgcttgggttgaggacgatcggtttcattggtcagcatgaaaaccacatcaaccatggttggcctatcttcagcgtgatcttgtacgcataaaagaccaacatgtatgcaccttattgcttctgatgcatcaaatatccctactaatgctccatcaaccaactctaatcccctgctctcactccacaattcccatgcctgtgtacatttcacaattcacacactcaagattaaattagaagttgacccaaaatatcaaatcaagagaaaataatgttagtatgaactcacataagcaataaggcttggttgttgctcgtagtaatggaagctagtgttcttcctcccattcactatctccagtagcataacaccaaagctaaatacatcagacttctcggaaaatataccagccatggcatattctggtgacatgtagcctctgcaattaagtaagacatgaataagtaaatgtttgttttagtgcttgaatcatttttgtagtgagacaatagcacaaagtgtatattagaatatatcagaataatccttacaatgtaccaacaaccctatgagtgtttactcgatccaatgttccttcaaaaattcttgccaatccaaaatctgatattttcgggttcatattctgatccaagagaatattactgaccttcaaatctcgatgtattaccctcaaattggagtcatgatggagatacaaaagacctctagaaaccccatggataatgttgaagcgtgaaggccaattcagctgtgcactttttgttggatctgctcaatgcaagcacacacaaaatttgaccaacaatgtttggtattactgatgcagtcattttgttttcaaatcataaagaagtgatgaaatcaacaattagtctattgatttattatgcaggtagttattggtgactgtctctgatcaaatttgggtgataatttaagtgagatgattaaattaaacatcatccttcttcttttcttttcttgaaaaaaataaatcaaaaatgcccatttcaaagcattgaactcaatgtagataagcaactaaacgaaaatagcagagtgagaaacagaggaagtagcatatgtgaaccaaccgaagataaaattatccaggcttctattgggcatgaactcataaacgagtaatttctcttctttttgaatgcaacaacccaagagcttgactagatttctgtgctggagtttgcagattaaaatagcctcattcttaagctcttcaatgccttgtgctgagcttctagatagtcttttgacggctatttcctttccatcttgtagttttccctgcagaagtgcaaatagaccttgaatttccaatccagtcttacttttatgtctagttgggggcagacttgaattaaacataaactacttaaataaaatatagtagggacaaagtgtagtgaaggtataataaatcacattaatatgagcaatcaccttgtaaacagaaccaaaccctccctccccaagtttgtttgtcatactgaagtggttcgtagcagtcaaaatactatctaaattgaaaatatgaagctcggcttcaagcgaatcatcatatggcttgtcactacaagtatgcataggactgttaccattatcattgaaatcaaaaacttttatgcttttaaccttccctgttataaaaagttttaactattagtatcaagtttgatatggaatataaaacttcaataataaaaggaaaaatttatagtaagattagaaataaaactcgaacattacatagatgtttgaagcatccgctcacggagcaactcttcatgtttgctctttgtcggtgtatggcgaaaactgatgcaaggaggagagcacttccgaaaatagcagtaatgctgatgataatatttttaattctcgttcctctgactagacaagttaattgcattaagtgttaggcatgcaaatgaaagaagagtgtatgtattaacagagtttgtgcaagaacagaatcattctcacctagctccgtgtgagcaacacgaagaaacagatcaaatccaccaaaggaaagctcctgaatgtcaacaaggtcatcccaccagaccaaacaacctattccatttacaaatgcataagctaagcaagaacaattattcaggcaccgtgtatagcaacctttataatcatcagtgatcacaaattcatgtaaatctggaagtttcagtaagctaatcttgagaaactcatcattctttcctccctctataatagcatttctactagtgttgttatcacaatgcaattcagtattccttttgcaccctccagtccaatttccattcctccactcttgatctgattttggtacatacccttgtaaacagctgcaaatgggagatcttgctgttttgcatacgccaaaaggtccacaggtcccatatatgtcacattgacttcttggtacttcccaatcagttatccaaaagtcatcgcccttgaattttaccaaagttgttaaatatcctttcgaagaaacaaaaacttttggggcaatggatttattgtacaagttgaaaagcagaaaggttgttccttcgtaaacttcttgatggagattcattgaactttgatatgaagtatctgattctggtatacctatgaattttgatctatcccatggtccgcttctccagcgaggctttgatccattgacccaaatgaaaagttgtggtggtgattgtttagagattccaacagtgaaactcccaggtgacggatcattgtcacttttccaggaagtcaacatataattctttccggtcatcacattaaatccgagtaccgaaccgggtaagtatgtatctgcaggatgattaaaactctgccataggttctctcctgatacaccatcactgagaaccaagttaccagtgtctaaaagtactagaatcgaactacttgatcgaacatgaacatcggttgaccagattacagagttgtttttgttgttgtttgcatcaacaagctctagatttccatttctcccaatcatgagacttatggtagctgcatctgcaagcctaacaggattttctctgttagccacccatacaagacttgtggtacgaggagaaattcccttgtaccaaattcccacatattgatttgctgaattattaggactaaagaagcctaactcaaaaacttggctgggtgagactagagtttgtccttgagataatgattgggatgaagttatgttgtaaatttcatagcaatatcgagcttgaacatgtagaatactagaagtaaccagaggctgcaatctctattatattttgaactcattggtttcaagagagtaacaaaccttatttagtgtttacgctctgtatcctttttactcattcgctataccacacaaggcccaaagctattcaacataattttggaacatcgccagaaaaaacatagtatgaaatgaagctatgcttttatatttattcaggggcctatgctcatctagtgttattttttctatatggctaattaacttttctgctctatgaaatttaacatgtatgaaattattttgtgtaaattttgaaggttgttaaaatttttattgaattattattgaatttaagaattttttttccaattttaataaggaaatgatgaaagtttaggggattaatttggcaatgtcaaagtttagggacatgatttggtagatattaaaatctaggtagcatgatttagtacacgaacagaattagtgaaattaaataaaattagacaatctttaaatccaacaatctcaatagtttataaataatttttagagtttaaaaaattagtgcatgttaaattttaagggaataaagtcataattaacttttctactttgtaatattttagaagtaagaagtttctatcttaattagcctttctttgaatgcaataaaatttgtcattctattctgactaaccattttttttatatatctttccaataagaaaactatgaaacctcgtctttcacctaatgtgatgaacgtaaagcacaaatgaaatttcgaagaaaagtacttacataatgtttatgtttaatatattttcaaactactgaagtgacgttctaacataaatgaaaacgttgaattttcatcactttggattagtctaaatacttttcaaatcatgaatacaaaatgactaaagggtgactattcaatggttacatttttattgtaaccatatggttacatttttctttaacctgtaatagcaggttactaataggtagactttccttttttagatttaattaatt

SEQ ID NO: 299649 - DNA, 4966 bp, Cannabis indica
aattatatattaataagatttcaagtagttctaaatagctagtccaatcatgtacactaaagttggtagtcactttaattattaaatgcatgaacattgccattaccaactcaaaaaccatatttaaaatttacattataaatcacctttctcaacatttattacctttgattaagatgattaattattttgaattttgtattttcttaaatgaaaaaatagattttatatttttcaaaataatacaaataggatattgaactcaattttcaataatttataatttttttaatataactaacttgaaaataataaacaaataacaaaaaaaaaaaaataaacacttttgtcataacacttctagatcgggttttattaagttttaattatagatattaattaattaattaattttttttgtattatttatgcatatatatatatatacacataattatatgtatatatggtttaagaaacaagaattgttcattgaatcaagtcttcagtcttctatttacttataagatgataattaattaattaattaattgtatgtactttggtttgggtacttaaatctctgtgattgtgatcagtacgtatattattgtgtatatacattatatatttatctatatgtataacatactgttgtgtatatatgtatattattattggtcatatttggtgtgtggattttattgttttttttagggaatttataataatattaatctatatctgattttgcacttattataattgatctctttatgccataattatgtatgtgataagataatatatgtatttatatataggattaatgttatgtttaatgctatgttctataaattatttattttattaaatgataaatttattttaaaatttttttaaaagttaattaaaatttttatgtctgaactttgatttatatcaaatcataccccctaaattttttgtaaccattaaaaattctccataaactattgatattgttagatttaaagacttttgtcctatttcgttcaattttactaattcagttatatccatgttctaaattatacttactaaattatatctctcaaactttgacatcaaatcatcttcctaaactttcatgcatattaaataaaaatacttaaatccaaccattttaatagttcaaagagaactttaaacagtcttttaaattttaagacacataatttaatacatatcaaaattcaacaaacaaaaattaaactaattatctttattattttgaatgtcgaaacaaatagaaaaatccatcaaaacaagtttttaggggcctagtatagaaattttctatattatatacaaaacatattccaacaaatttaaattttgagtaattccttttagcattacatataacaacacatactaacaagcatttgcaacattaaatccaattttaatagcaaaatagtgaaagagataataactaaaccaaagagacctttttctttgataatataattacttgtttacaaattccataattccccttgttagatccctaacaaaatcagttttctttcttaatttctttctggttttgattattactaacaaccaaatcaaaacaagatattccactaataatatttatatatttatatttatagataaatactaatactaacagcattatcatataccaataaattagatcactcactcctccataacattcaccagttcatactcaaccaaagacagattgttatcctccttcacctcgaactcagctggctcggttacctctacgcggccccatttgtcaacggctagcctcatcgaccccttaaacatatctatcttcgcattgcgaagaatgacagttgaagatggcttcatcaagtcaactgcataaagaaatacagcaacaaatcatcacggtgaggattcggaaaacaaccagacaacttctaactcttgaaattttacataaggagaaagattaaataagaggggtactcaagacaaaggctaaacagtggagcattagtaaggataaaatttagtaactaaacaacaagatcgagtccaactaaactcggaatgggagggtcatttggcactccaactccatgacatctaaacaaatgtctagatacatgtgattatacttttaaggaaacaaaaatagtaatgattgtcaactactcaagagcccaacattgctattgggcagtacctagatgaagcactttgcaattgattcgtgatattttctaaaagttatttaatcaatttatataagactcaatacttaattgcaccaagtataacacataagaaggtactagacaccactggaactttttaacattaatctacacaaaaatatgtaaaatgaaatctttctcatttaggaacattattgctcaaactcatatataagaagagagtcagtctccaaattctccaacacattttcctcattcataagaccccaatacttcctattctagtgtaagttaaaccttaactaaaaatgtttgcatgaatgcagcatcaatgttgcagtgagaagaatattaatattacaaggtagattaatatatgtctcatggttgcatcttctcaaattcatataacaaaagcattcttaattaaaatttgaaatggataacaaaacaggtctaatttcaaactgttattgaaagaaagaaaagaaaaggtattccggcctgactacaaaatctacaaaaagcctccgaactaccataagtaaatgtaacttttaacctcattgtgttttgtgatattgctctatacttgaattgaacatgttatcttcaaacaattttacaaaaaaaatagtatcaactgcagctaaccaaaaatataatacacagcttgcttaatatttctttttatctatttatatttaagctgtacttacctggtactttgattctaaggccaacttaaacaccaggatcgtttttctcgctagaacagtttggtaataaaatgcatccataacaaaaattacagatgcaaagtataaacattttattgctaagatgaaaacattgtggaatgtggatagtttcagcttaaaatgaatataatgctgggaaaaagaatgttaagtacaaacaaggaattagaatccgatataccactaaggaaaattttaaaagagaaaacaagaagatcaaccagaaatcgtaatcttccttctacttcggttacaatacaacatcaattgtcaactttaaggtggcgtttggttggaggtaatgaaatggaatcgaatgaaaaggaatcaattttcattccattcctttgtttgattgcattttaaagtattagaatgtcattctaatggaatgacaagggaaagaccattccacttcaagttgagaaaaatttaataattatttttatgcattcctatttctattcccattctcatccctattcctatgttttcattccttccaaccaaacatcacctaattgtttcttttgataaagactacaaagaggttaagctaataaggtgtaaaggaaaacacatcaaagattaatgataattagagatacactactcaacagattagacaaactaaacaaatgccataccttttacctgtcataattttgaaaaaaccttaaatgacaatgctctgagtaactatattggtcctaccaaaacttcaacaatatcacaatcccaaacccaaaatatgatcttttctcaaaatttccaaacacttccactgaccaaaaactctctgaaaaaagtgttctatttctgttcataaacttaataaagtgatcacttcacttcttaacccaattattagttttacaaatcaaaatccacgaaatgtacatctacattgcaaattgtccaactcaactcatactatcatcactcgagacaatttagtcctccaagtggcacaaacaaacaaaaaagatcaacaatgctttgactaactacaattacttctaccaaaacttcaacaataaatttttccacaatcacaatcacaatcacaatcccaaaatttgatctttttctcaaaatttccaaacactaaaggtgctctattaataaagtgagatcccagcactgttatctacaattgcaaattgttcaactcaactcatactatcatcactcaagacaatttagtcctccgagtggcacaaacaaacaaaacataaaaaaatcaacaaaattacatataaaaaagcatataaaatcaaactgtatctatcttacaagaccgtacaatgccaattcactttacttcatcatcatcaataatcaaatttcccagaaaaataacacaaacaaacaaatcagatcaaaccccaaaaccctgttttgatcaatttcccaatttttctcatttgatcaaaaacaatcaaaacaaaacccaaaacccaattttgaccatacaaacaaacaaacaaatgaattaaaaaatggttcatccaaattattattaccttgatcatttctggcagtgaacaaaatggttccagtctcgtccccaacaaggcactcagcgattcgagtctgacgaaggtgttgggacaccgatcggcctttctgtaagacggtggtggaagtgaggaccttaacaacaagggtatggccactggtgccgggtttcaattgatcgacctttgtgaaaacgggtttcctcaaacctggcttggcattgctctgctccgattctgcaaccgtcgtcgtcgtggctgccatagctgaaattatggagaaagcttaaacctttagagactcttaaccctaaccctaaccctaaccctaaccctaacaatccaaattatggaaatggaatttctttctctgtaattttttgtttctttgaaaatatttaggagagtggagaagagaacctcttattatgtcattttcaatttttaaaaaataaaaaaa

SEQ ID NO: 299650 - DNA, 5001 bp, Cannabis indica
aaaattaatgtcaactgattgaagtatacaacaactaaactttgcagcgataagcttaaaaggacatccattcttaatggtggtaaagaataatggtgaaccaatagcagccagtttgctggacagcatctacataggttaaatcatgcaataaatattaatatctaaattgtaaaactaagctttccttacaatttctattcttgccctacattagcagagaaattacctatagcagtctttgaagaagttagaagtgcctgactataggatttatggcaagtccgtgaaattgactcaatggcggccttcacctttggaatatagtgaccaatatcgtgacctgacttaaacaatagacataagacgaagacaacaaaacaataaatgacaagcaactagaattaatgacagaatatgttaatgcctttaaatatttccaagccaatatattggcttcatggtgacatgaaaattgcaagcaaagcacgaagagcaataacctttgcttcactaagactatcttgcttaagcggttctaaaatcatatgattcatggcataatcaagattgtgttctgctatggtcacacagaattccacaagtttatcatgttggacatcctgggtaagcatccctttcgcagaacagtcaatagtttgggagttacactgtctaagtggtcccatatacgattcgaagcctgatttgcggcatggacactcaggtaaaacctcaaaactcaatgaagacaatccaatgccataaagcggtgggtcttgtcctgaatgattaaaccacatcatgtcacacaacttatcacctgaaatggaaatccataagggtatatcaccaagacagagaagaagagttaccaagggataatcaacctaataaaaagaacaatccaaatgagcacataagaaaatacatgacgccagagacggggtgtgagagttaagcacattattatttaatagaactataattaaaactaatattcaaaatatacacatatagattaaaactagtgtgtgtactcatcattaggtacctatgttttatcaaaatacaaatttggtaacattgttgtcagtaatgtgtaccctgtatatatattaagtaaccaaaactcaaatttgataaatataattttatcaatatgatcaaattatctttaattatatgcgtactcgattcaaatcccaacgacgagattatatgatgcagttgaaactgagactccattaatttgctttctctgctttgtgatgtttggttacactcacaatgacatcaaagaaaatttcgccttctttcggtgaggaaaagctcgtctagatttgtatctaactgagctttttttcctcaaattttgaagcatcaaattccttgttttcccatctggttgaaggttgcagctgcgcatatttgcataaagctttttcgctaaattgatctcgcctcttaaacacattccttgaatggctgcattgtagagggatgcatttggtgcagcctgctgcaaagacaataaaatatttgaaaggggtcaacattttaagtcattgagagtctaaatcatgctcaagctcaacaggttgatttatgcttagtagcctatgtctgaaatctgattacaatttaactaagcaaaacgataggcttaaatttgattggaaaactgcaaaaacacatagacaacaaaaactcttttatacttactttcaggatatcctccacctcatcccagagagaaccccaaatgcaaactctaactatggaaagttgagttaatgtgtctgggatgcacttctggtgaaccatgtgatcgtacacttgcactgcaatatcagccttccttgctgtctcacaagcactaataacaagattatatgatgcagttgaaactgagactccattagtttccatttgccacaaaagctgcaaagctctctcccataaaccaagcttcgagcaagacatcaaagcgacatcatacaaatgcgaattcaactgagaatctttctcttgcttgatgttctcgaagagctgaagagcatcatcatgtcgattcaccctgtagagtgcactaagtaatgcattccatgtatatgcatccggtgaatggcctaaagatttcataatatcatacaccccaaatgctagtttgacctccccagctttcccaagtgaattaatgagtgcattgcatgaaatgggatttggcttgacatttctcttcaacatgttttggaaaacattcaatgcaaaatcccattttccttcttttgcacaagcaccaattatagcttgcattgtgtcactacctggttcaaattttctttgaagcatctcacagtaagcatcaagggctagttcattctgattacatcgaacaaaaatgctaactaagagactgtaagttacccttgtttcactatgatgattttctttcatacttctccataatctcagtgtttcaaaccagttgttcactctaccacaaactgatatcattgtattgtaaacaattgtatcaaaactattcatagcttggcaatctccttctatttcactaaacatttgaagggcagcatcagatcctctagcaccagcaacagcttttagtatcaagctataagtatgtcctgtggtcatattctttgtcttcatgaactcaaacactctaaggccatcatctagtaacccattcctcaagagacaagataaaactgaattgcaggcatgtaagttcggacacaggctcgataattccatggacctgagcaattccaatgcacttctgatcttgttggtcctactaagcaccaaaattcgctttgacaaagtttcttcatcagtttcctccaaaaaatgaactctttttacattcaacataacctttccttcagaaactgacctgggctcctttaaatcaccaggttctgaatctaaatctttgaaagtccctaactttccccaaggaggtaatttctgttcaacttcaaatcccaatttctcacttgggttcaattcatcactgtcatcttcttcactctcaatagtagaaactctattccgaacaagaagtgaattattcacccttatgcacccggttatgaaacttgtcctaggaatcttggacttggttacccacatagaaaccatgtaaacctcacaagggggatacttttggctaaaattcagagctgaatgaggatgtaaagaatggtgaaaatgctggaaaccacgcatacaactaagtggagtatataattggtggaagcaagtaaggccattccctgaagccataatttgtccccccataactataaatcaataaaatgttcacaagcgtaaggtgtttgagaaaagaccaaccttgaggaaggtttgagaagatgatttggtaggagttaggaaggagaagtggtgtggactgcggtggggaaggggaagagtgtgaagattaccctgaattcttgttcattcctcggattgatccaacattcgtttcgtacttaataataataataagcaaattatgtcataaaacctcaaccacattctcagggatttaacacctccaccgccgttgaatttaggaagtttatttttcttatttaatattgttagccgttcaattacatttttccatcaatttagtcccacatttattgcattaatattaagaatttgaataaattaagagttaatatttctacttaaatcaactccagatttctctatagaagtatttttgtgatgctttagcctcaaattcatatgataggaggttcactaatttatgtatattattataaatctataatctaacataatgattctaaaaccataaataaatgtgtaaaagtactttaacccatgttcatttcttttggggagtaaaaacaagtatttattgtcaactttaattcgttattctcgttctttctattctctttcattgtctaattaaaatcaaagttaatttagggtgaaattgaaattgtttacaattgcttttattatttattgtcaactttaatttgttattctcgttctttctattctctttcattgtctaatatcattcgaaattaattgtttagataaaattaagttttaatattcattataattaattgctttaattatttttaatttctatgggacgatatcaatctcttgaccactattattacttgtcaatttgtgcacttgcaaacatatgcatatataaaattcgcatgtaagctcaacaaagccttgtatggcttgaagcaagcccctagagcttggtttgagaagttatcaacaatcttgctgcactatggctttcacttctccaaaggatatcaatcctcgctttttagggttactccatcgaattgcatctatatcttagtctatgtagattgtcatgggaagtgatgacacacttgtgaattagctcaatgcagaactcaattctactttgctctaaggtatctcagtttagtagattacttgggtattcaagttacaaggaccctagatggaattttactttcacaagcatactactttcaagatcttctctacaaagttgatatccagaatgttaacacaaaaaatacaccaatgaattgtggccccaaactctccacttgatagtgaacctttcaaagatgttactctttataaatctattgttggagccttacaataatatgccactatcacaaaaccttaacttgaattttgtgttaacaaaatgtgtcaatttatgcagcagctattgcttgcacactggacaaaaaaggattctcatgtacatagctgggacacttgactatggtcttttacttaaatcaactctaaatttctatctagaagtattttgtgatgctgattgagcctcaaatccatatgataggaggtccactatgttagaacttattttaccatgatcttaatttattaacatgtatgtttaattataaatctataatctaa

SEQ ID NO: 299651 - DNA, 1325 bp, Cannabis indica
caaccaaacaaaagaatagaatagagattgtttcctttcatttttattccattttattacctccaaccaaacgccacctaaatttatttcacagttagtaaattatgacgttgttgatgttcaataataaatggttacttacttaccttttttttttttaattatttaaagtcaagagatgcatgatataatcatataataaaattcagaagaaaaaaattggcatagtcaccaatattgtatttaattaagacaatcttaatcttatagatacactatcaatcttggaatttacacttaaaatacatatcagcattggcagagatctgcaaacaaaattaattaaaaaataagtatacaataaggtggaatattttatatttaatggtcttcatgggactacagattccattttcctatgatacaaaaaccaaatcaaagttcaacataccaagaaaattgggcaatactaggaaatgtgagcacactccaataaatgatgattctattggtacttagtttaatgaaacttagaacatttaaaatgataccttaaaaagtgttgtactttgttttgattactccaatgaataataatatgttaattaatatagagacaacagattcagctaatcagaaggaatgtgttttctttattcaatattcatgtaatttaattagattcttttgatgaaaagaactaaatctggttcatcttttaagatataaaagaaagaaattaaaccccttttaaaatttataaaaaaaaataaaaaataaaagaaaaatcaagttggagaaaactgcatttgtctaagtggaaggcaaatgtaaataaattaaagtctttttcttcaaattataagatcaatttataaagtcaaactcatgcatgcattaatggtgatcacgatcattgataaagttctattttccaaattatattgattaattgatattggctttgtgttatatcaacatggtttattattatatgaacttgtgtctttaatatttaaagttcataagattcagatttgtagaaacttttatgcagtgtttagtttaattagtttctatatatttttttaaataaaaaataaaaagttatttttaatttaaaaatcttttaggaaaagatagcatttagtttctcccaaaataatttttgagaaattttgttttaaaaatgaaacaatttacccttttctttttttggtttaaatgtacttattaggtatctttgctatcattttttttacataaatagaaggctaattagcaatttttccccccgaactttgacatgtactaaagcatgcccc

SEQ ID NO: 299652 - DNA, 3258 bp, Cannabis indica
cttgatgcgaccaataaaccacctcacattcacatcgaccttgtctttgtgtgttgcaggttgcagctggagcaattctggaacacattaatcaattgcttcatacaccagttttaagctactcaatgatcattccattccctaaatatatggctctattaaatcaacagttgtctatgttcctattgaagaaattgtgaaggacaacaattatgaacaataccatggcaacttatgaactctattgatggtttaggatgccatccgttacaaataatagcatgggagaaaagaaaaaaaaaaaagagagagagagaaattaaataaaaaattaaaaaaaaaaaaaattaattgcccttggttgagatgataaaaaagtgaaaggaaaagtgcaatttttaacagatcatgtttaatttacaaaatgaccgttcaacaactataacagacaaagctccaaaactcgttatgtttggagttggttgtgttcgtataatatgactattttgctgcaatatctcctccaaacagacttcttaaggcattttctttgtgtttagcaagcagaatagaaggcctcaaacttcccacaaaaaaagaaagaccgagggcggtgcctccagaatgaatatataaataacagaaggctcctcccatgacaattgttagatgccttccgtaagtgcaaaaacccgacctgctaaaggtgcaggcaatgcagacaccgcttgttcaatttcctgaaaaggcaatggttaaaaaacataaaaattatgagaatgcagaagatgagaattattattttaaaacaaccaatcataccttcaccatataacgagctgaaaagtgtataagaagaattgctttattctcaaatttttctgcgtgacttattatctgggaaattggccatgtattgagagtaggagatcattgaataagaagcctattcatatataatctatgaatcgagtatcaaatcatgcaagcaacgtaaaatcatcgaaagagttctgtaactgacctcagccaaatgagtatgtccataatctctagcatgtgctactgaaactgaatcatcaatgaaggtgctctgcatagatgtcaaggaatcaagattaaatgttaccagtcattaataaaagcttttaaaaaaatattaaaaatatccacctccatgacaagaatccttgcttttaaaacatctacattgttgtcgtcaacaatgaagtcagatgtggtgtctccagtaaaagcaactagaggttccctcactgtgtttgtgatctataaaataagaaaaaacaacctggtcaacaaaacagagaaagcaagaaaataaaagaatgaaggttatggaaacgtaagcaatccaaaacaagatatttaaacagcttaagattgtgacaatcaagacagacctccacacctgatgatttcaaggttttaatttcattagctgaaaggccaacatgctcctttttaagtttctgcttcaaagagtaaactatataaccctgtcatatgtcaaacacagtcagtcaagccaaacatacatgaaacttgaagtagataccaatggaatatagccttaataatatcataggactacaactattttttatacctggctcggtatcccatggtatgtcctaaaagcccttactctaagatcccttcttacatttacctcttctcctgctaacaaaatttcattagatatggaacatgcaatttaatggtagctggataaatgcaaacttcattaacagttcaattttaaatagacattaccaacatccagcccaattagattatgttttagctctgattgatccatttttctgtgaatattgaacagttgttcaacatcttcttttatacattttggtacaaaaattgttggaggcttcatactgtacaatccacgagttgcaacatacatgggcaatcctccctgcacaatgtcaaatatttgcaaactgtgaataatgaaaaggacaatatttgctaaattctgattttcatctttagtattctcaagttgtgaggggttctagttcatattgggaaatttgtgaaattatgcatcaagtgactccattatcaagaattttccaattaccgtgggaacaaattcacgataacaaatagataacatacgacaacagaaaacttccatttattagaatttcacccatccaaatagaacaagttctctaattcttcttcaaccatcaatcatatcaagtgcacgtatatgctccctgatctcgaaacaaaacttttcagctacttttcaaatatacattcaataattatggatgctactacaactctggacctaacattggagcatagtaaaacttcaaaaacatcatatttgatacattaatttgtcataaataacagggtgggaataataaataaataaaatccaaaccccatcaggaagggtcctaagccagaatattactacatattcaggaaaaacacttgtagcaaagtaagaacgaaacccaactacaacttcgaacaaataaaaagtgttaagagtttctcaaagaataagaaaaagggccttacaatgtggtccatatgagcatgggaaatgaagacgaagtcctgagagatggcacgttgaggacatcgtccaatatcgaaggccaacttgagagttggaaagattatgcaagtttcatgccctccaatggacaaaccctcaactgggtacccttcgattatcaatcccctgcccctttttgaagatggttccatgtctgatttaggtttctcttccactgactcagaagtttttcttaactcagccattatagactagaacaagtttgaggttcttctaaactaaagaaaaatattgacagaaccaccccaaaatttataactaggatctttaggttgacgatgccagtggtgacaagacaacaccttctacacgcaaaacatcaaccaagtcgaatcctagcaattaaatgaagttatgcccaatacataatgaaaaaaaaaaactcggtcaacaaacagaagtagtaaaaacaaccaattttaagagtttaaaatcttaacaagataaatacacaacttaccacaaatcagagtatacaatagaaacataataggaaattggtggagcagaaactattctatctaaatacaacaaaggaatataaaatttgggtcaattacaatataaaatattaaattaaaattcatatgtttaaaaaaaaaaaaaaaaac

SEQ ID NO: 299653 - DNA, 3588 bp, Cannabis indica
tgttagtagaattaaaaagtaatttttttgtttgactaaatgacaaacatgacaaggagaagaaaaagattgagattccaaaaaatgtaatgttttattcaatgatttagtaatgcatacagaagggtgtctgagcgtaagtgccacttttgaacatcattacaagaggaaacaaaattacaagtgggaaccagagcttgttggagaaagaaaatgtgtccaatgcgattagtagtctcaatccataaattatgagatgtgtcctaaagaaaacaagcattttgggtgaataaaacattataatcatggtttgtagtaattgccgaaacagattattagttaaactgaaattcagggacgaaaagcacattattgaggcataaatgttcatttaaccgaactgtaccagaactatgaataggtattttaagaccaataggtaaagtgatacacgaagcaataggaactttctaaaaagaaataaagcatgctttgtcaaaacaaattggatgagtagtactactatcaataatccaaagtttatgtagagaacgattcagatttactagtgatgtttgatgccaatggagtggtgacatcaatggaagattgtgctaatgtatctattgagtaataaactgagaaatcatctcctgaagagaagcaagcttttcagacacatcaagagatgtgaaagcttgataagcagtaggacccttaggaggttgggcgcggtcagtagtgggacttttagaggattgacctcgatcagtattagagcgttgagtcgaatcagacttgcgtttctcattatagctaggggaaaccatatagtatgtagcatttctctttcaaggggcctagtttctcgcaatgatggcaaaaaggatgcatccgtttattgtgaggaggaagcgtagaggcagcaacgatgagattcaggatagtgtgaagcttcctttggtgtttgtgttgaataatggtagagaagactttcgaaagagaaagaaaaggttcaaggatcaagatttggtgccaaactgcttggtaagactcattgagactagtaagaaaacagagaaccttctcctaattttggaactgaaggttatcagtcgaagcttggcaagtgcaaggaaagtgaggtcaaagtttgttaatgtcatcccatattgcctgaagcttagtgaaataggcagtgacagaatcgccaccttggcgtaagtccgtgagagattcttggagctcaaagagccaagggacattgccttaactaaaacgattagtgagttcattccatatgtcaacagcggtatcaagaaacatgatgcttctttttatatcaagagaaacacaatgaataatccacgacatgaccatttgattacagcagatccaagaatggaacaatggactggacagagctggttgtcgcaagataccatcaatgaaacctgtcatatttttgctatcgagagcaagattgaagtcgcgatgccactgttgaaagttatggtccaagagaggtggagtaacaaggattagtcctggatgatcaattgaacagacgaaatacggattgtcttcgttagccggacgatcgtgggtttccaaataagacatggatctggtagaagaaggaagatgatgatgagcaacaagattcattgatggagctctgaaagtgatggaagaaggaggatttgtacgatggggacagtgaccaagatttccaaagggaaaatcatcaatgttcactgttgaaaacctttatctaaaaaagcctgctatttgcatctggttgggtaatatgatgttgactaggcatctgacccagatgatagaaaacctacctcttgctttgctatctattttgtgtccaatttagtcacttgaaaatacagataacaacacacaatctcaaggtcaagtactaaggctgagtatagaagccttgttgtcagtgttgcagaagtaacctggccacattccttgtttttagagttgtagatttagcttcctaaagcttttgtcatcatgtgtgacaacctttgtaatgcttacactcaatccagttcatgcaagaactaagcacatagagcttggtcagagaaagagttctataaggttttattcaagtcaaatatgttccatctttagatcaaattgcagatgggttgacaaaggttatctaaaattcaaagtttcctttcttgaggaacaaactagcaattgtaagtaactcctatttccagtttaagggggcttatgataacagagttagccatgttagttagggtacaagttggctagagtagttgagtttgttaatgttttagttttcagcttgtaaccgattctagtttagcttatcctgcgcatgatgaggttttgattgtataaatagtaacattagtgacaaatcatattagaacattactctcgaaaactttctttccctttctctttctcttcctcttcatatgcattttctttctatttttctcactttccaaacatgtcaaagagatctaacaaataacaagaaaaaaactcccaacaacaccttcaactaaaaaacaaataagctgctagcggtaaagcattaaaagagtgccaaaaatgctaaatttccagcccgactgatcatgtgacaaatcacacctatcagtacataattgttcttttaaaaagatagaatttctactaataggtaaaccaaacataatccataacatgcagatatttctcatcgagtaaaatcaacaaaaataggctaattaagttatttacattaaattcaactaaatgacccataagccgccaaatttgaagcattaaacattgtgaagaatactatagatttacatccagaatgaacatgtgacaggtaatacctattaatgacaatcaaccaaagatgtgccaataaaaatgggggaaaacacaaattattcaaactagaataataaagaataacatgacgaatcctattcaaaattccagtattaaatatcaatgaaccataaaacaaggtgtcaaaagataccaaaaataacatgtccatccaaactcaaaaaggactggagatgaaatagggatataaacacactattattaaaataaaataaaacagtaagatatacaccctcttaaaaataaaaataaaaggaaataacataaccagaggggataaaaaaaaactaaacaccactaaggtagatttcggaactgtgtcacaatcattaggaacatatcatctactaacaccaaccccacactatatctgattgatcctcatcctaacaactacaaaataaaaccccctaaaaatcaaaggcaaatgatgttgatccttccttagaaagaaactttcttcaaatatgctacaacaaagccctctcagtcccccaataatggccacaaccgaatccatagtggatctgacaagccatggccgaagaggaagaaaaaataccactagcgacaatagactcaagccctaaagagaaaaactctcaagacgcaagataggaagaaaagtattagtacataatattaatatatattaatatatataatatatat

SEQ ID NO: 299654 - DNA, 4877 bp, Cannabis indica
tacatagttgaagagagcttaaatggattgattagtattacctatatcagagtggcgtactcgtgtataagagccatgagtccgtgggtgtaatggcccaatggaggcttgaagcgggggcgttacaccaagctaccataacagcttcttcaaccaccccagtactcgaatgagacatcaaattggcccaccagtctccaaaatttgaaacaacattacccagagaaattgaagttctaaatcagcaagacctagcgaaagtgcatccaacaataatatgaaaaatagattcatcataagcattacacattggacaaaattaactagctccacatgtttagttctcagttgagcccgagtaggaaggcaattagaaatagcatgccaaagaaagttccaaacttctgggggaattttcaaattccacagtttgcgccaaaagcttgcattattgtttaaagaccacgaaccttttaaatcctaaaaaaaatggtaggcactcctaattgaatagatacctgaagtttccttcttctaataccacccatcatgtacaggagtagaactcaattgaatgtctagaatcagctcacgatcacaggcattaaacaaatcatgaagtatatcaatatcccaaactctctcattcaattgaaataagcttgatacaaccttgtttgtcaaacctgggtgattagaaagcacatacgggtggtcattacccccgtatgtgctttctaatcacccaaaatgaaagtttcatcacccccaccaatggatctacgaacaccaactcgaataagttgtcgggacttaaaaatgctcctccaaatgaaacttggattatcaccaattgtagctgaaagaaaagagccatgtggataatatctagccttaaaaaccttaccggctagagagtcaccttgagtcaataaatgccagccttgtttgcctaaaagagccaaattaaaatcatgtagattacgagagcccaaacctctatcatgtttatgacgactcaagcgagaccaactcatccaatgaatgcctttactttgagaagaatcagattgccaccaaaaccttgccatgagacgttccaattctttgcaagtacaagtggtaagagaaaaatactcatagcataatttggaagagattgggtaaccgtctttagtaagaacttctttaccaacccaagaaagtagctttccctcccacccttggatccgcttcttcaaacgatcactaagaaaacccaaaatagtagtattcttacgacccatagtattgggaagacccaaataagtaatatccaaatcaacttcctgaatccccaataaaccacaaatcctggtttgcactaactgctgtattagaactgaaaaaagcaaaggactttgcaaagttaattttttgactagaggcacctttcaaatacccgaagaagattaagtagctttacaatacacataactgtcgtttgcaaataacatgtgagaaaccactagagctctcctagccaccttacaaccccaaataattcatctcatacctatgtaaaaggaaagaaaactcctttgcacaaataataaacaaataaggcgataaataatcaccttagcaaatgccccaagaagggatcaaaagacccatcacccttttgccatgtacaaacttgtaagagactgacaacacacaagtcattattagcttaatccatgtaccactaaagcctatcctttgtaaaattgctagtaaaaaaggttactctagacgatcataagccttactcatatctagctttaaagccataaattcatttttgcctgtccgcttttgcttcaaattatgcataatctcaatggagaacataaaattgtcagaaatcaatcttcctgactaaaatacactttgtggaaataaaataaaattaggacaatatcatattacacttagtttattaattataattaattaatttctatgttaatcacttgcacttgtttaaatagtccaacaattaaaaataaatgtaaccatcacaattatatatttattataactattaaaacttatctatataaatttatacaacttctaatgcatgtatataagtgagaaatgctaaaagggactagtagtgtctaacactctcttacgtgtcaatatcgctattggtctaacaaagtatcaagttctatatagtttaaatttaaatatattaacttttaaatagtatcactaaccaatcacaacatatttaaaaagtactaagcaccacttaacactgctctatataatatttatataatgcatttcttaaatactatttggtttaatttgtagatcaaaagttttttaaaaatactaatatcaaaaccaaagagtaccatttaattttcatgacaatttaactccaaaactaaagtggaaaaggattatacaagcatacgaaagacaataatatatagaaaaatgataatataatattataataatgtacacaatattttcatcaacaatagaataattataaccacttaatatacatgatttctacattcatgtttacaaatcaatatttaatactttaatttcatcacacatatataattatatttttatttattattccattatttattatttatagtaataaaaacaaagtatctcaacccttcttcattctgttttggtgagcttgaaacgatccaagggcttagttccatcaatgcatttttcaccaaaataagaaatatactcttgcactgtggtatctctatactttggaggattattttccgataacaattccttaataggtccatacattttcgaggttggagttacacatgtggcaaagaagcttgcaatagaaattctaggaccgatatggctagctagaactcggtgttcaacacttttgaatctatcattcgttataagctacaaaacataacaaaaataaataaataaattatttgatcgaagatcaaaattgattaaggaagaaacttattatgtgttaagacgtagttaagaccatatagctaaaatatgataaatttactaatatatatagccaataatagtagtttacctgaagaagatctccaatgtttacgactagagctcccggttgaggggaaacatcaatccatttattgtcgttgagaacttggagaccaccgatgtcatcttgaagtagcacggtgaggaaatccatatcggcatgcttgtttgtccccatagttaattctggttgcggacatggtggatagtaatggcaaaaaactagatgaccctctgtgcaatccatgttgtacaagtgatttggattcaacccgagagcctcagagatcaactcgaatagaaaaattcctactttcattacttgtttcgaatactccacaagtatgtccctataaagtttaagcaaaagaaaaaataaaaactcaaaaggaatgttatacaattaatccttcttaattaaaacaccatatagaaaagaaaatcaaacaaaattataaacaacatgagattcattcattcacacaagactagtacatacatacctacacacaaggggcaattctttagggtttggagtattgggagccattcgataagaaaaagaatctctccaatcagtagatggagaggtatacaaactattgttggtgttatacatcactgctttactataatctcttgtataaaacgctttcttcacctcagtttcttgctcatgaaaccgacgaacaccttctttcatttcttccataacacttttcgaaatgctatggttgataatttgaaaaaaccctccattttctgaggcttctctcactctatcaacgatctcttttcgcttaattggatcattaaaacctttaagatctataattggaacgctaaattgagaatctttcaaaacaggaatatcatcagaaatcgatttgtgaaagaaacgaggaatttgagtaattccagcatcaacaaggcctttcactccagctttagtctcatcaaaagctttaatctctttcaatctatcatattcttcaaccatttttctttttcttattctttctttcttgttatgaattaaggcttcatatcatcatctagcttttaatatagattggatttatataccaataaaaaattgatccaattttgagaaatgtgacaaggttggaattaaaaattatagtacatacattgtaacttgtgtaaagttttgtctggattagattaatatattatttgatgcttaatataggggtcaaccatgcatgtaactgtacttttaataatatatttataaatctatatttttttgggtgattaattatataaatatataatttttatttggttttgtggacccaaattttgaataaattaataatccatatattattgaattgtgtgtatcactactgacatcagtttcgattcatttataattaaccataaaactctaccaaaacatgtgttataatagcttataatgtaattatattataatttgatttattacataaaaaaaatcattacttgattaatgtgttatattgtttactatatagctagtgtgttagtgtaaataaacaactaagattaattggaacttagcctccataatgtcaattaatctaatctcttacaaagtgtggggcaccaattttatgtcaattgccataaaaattatatagttgtccacttcatataaaaactatataattttctaaaatataagtgcatgtttggcatcataactaaaaaactgttttttgtttttaaaaacaaaaattgttttttgaaaataatttggcttgtttgaccttgtttttttaaaacagttttca

SEQ ID NO: 299655 - DNA, 4673 bp, Cannabis indica
catcgtcttcttcttccacaagaaggtaggagcacttcaattattttgtgtttggttttgagttcgtttggatattgattatgttgctttatgttaaccagggtcatctatgtacaaactctcccgaacatggttcaggctagaattttctcttttctagctgtggaacacaagcgattttgccggcgggatttgtgtaatttggcacggattgttttgagtgacaatcaaacgcttgatttttgggttgagagagctgcccgccacctgcttgatgcggtgtctgagttgaattatgagtggatttcgtgcctaaacttggattctggggaggaggagagtacggaagatgagtttgagtccttgccgagttggcttaaggatgctgcgggtagcagtgaattgcttccatggcttcctatatcttttgaagatttgaaatcatggaccttgtgtggaggttctggtacaaataatgatactttggatcaagtagctgaggaagtagaacaatttatggatggaaaagctgacaaagatgagattcatgattcccaatgtaagaattattctgttgggcctgaaattcacaacaaggcacttaatctgaaagctcagattatgaacttcgaatcaactacaaaagttgtaggcctagctaatgaaattcgagagctttgcactgttagaaaaggagattcttcactagttttggagctgatcgaaccttggctcgcagacaatgaaactgcttctgttttgatttctcaactttcatatggaagtgaagaagagttaacttggccaagccaggttatctgctccatcattcttcccaagtttttggttcttaaagaaccagctcctcgtgtcctactggccgcaacattagaattttgcaagctccatcagaaaaccgctgtatatgctctcttgcttccgctgatcctctataaaaatggcatcaacaatccaatatgtgatgttatcactagggtcatcaaggaatgcttgcacccagctcatgtttctgctttctgtcagaagctgctctgtagtggaaaggatgagagaggagtcatctgccttccttgccaccagcatctcatatcagacgaaatggtatggacagaatcattgtttaacctgttccagagcattttaaatcataatgtatgtttaactcaggattcggttgatcgtattctttatcaagttcatcatttagctgaaagattttccaaatctttgaaatttggaaactttttattatgtttagtaactaaatgttctccactgttgaagtcacacaaaagccttttgactgaagtggttgagaaaaccaatacccttttgacaaaatctatattatctaaattggcaagtatgtagcactacatttttttgggttctttagcttcagtcaattggaaaatatgcactttacttcatttttactcctcattcgaatgctacttttaaaaggattttagctctggaactattctgtggagaatttttataacctagccataatgtcttgtttaatgtgtttacttagatattttctctgtgctgtgttcatcaacttttggatttatctattttctaatgatcattgactggaatttattcgtgaacgtaatacatacaaatatattgtcaatgattcggaataggtcgagcttttagtgttatatcttgacaatgtggagggatatattgtgtcgagttggaattttaactttagataggctcagaagtgtccaggaaatgaagttcctttaatggtttgattagttgtcatcaattaatattaattatatgttggtaaactttagatgtttctcaaggtgaacatattgaatttgaactgaaaacgatataaagagttaagaaaaagtgatataatatatattatattaattttatagaagaaaatctatcaatatgccactgcagggaaggtgtaaataaaataattatttttataggatcaagagatcaaagaagcgacatgattgaagctgtgagactgacctggtatatgagtagatagttgtataacacagtagtctgttgacataagctacttgatcaatttatcattctaatggataacaattatctttgtttgttcagtggagtggactatcataattcattcataagtttttaattaattgtacgtgatagaagtagaacactcgagaaatataatcttcactcatgaccaaaacaaaacaaaactagagtataaaggataagccatgcttgtcactgcttgaaatcatcacttgaggccaatgttccctctcagtatagaaaggggaatgttttggtaatgtataaatgaagaaagaaacatcttttatttgggtatttcttttctttcgttggtaatttatgtgtgaaaacataccaacaacaaaagtagcacacaaaccacgcgttggttagtattacatataaatattgtttataccaaataatcataacattttagggtagaagactgtcgttcccgttggccatttgcttcatggattcaaacctggggcccttgtcagaaaactttgtagttgcataaagtttcaggtaatcttggaaacggaagtgattcgggtacagcagcttgggtgcgggagaaatgatagcatcaccggctgggttatagaaggtagcaatggacagtctacttccattcttctcagccatgacacggtgtaatgcactcttataccttccattactcaatatttccacttggtcacctgtgttcacaaagatggtgttatttttggatgggggaactgcaatccattctccatctttcaggaattgaagaccgggaacttggtcatcttggagcaaaagtatgatcccacccgcatcagtatgctctcgaagtcctttcacaagttctggatttggacattgagggtattttgccacctttgtccccacagaaggacctttggttccagagaaagcatcctttatatgatctctttccaaaccaagattctcacacatgagcccagaaagcttctcagccagtttaatcatgtgaactatgtactcgttcatcgttgagctgcaattattcttggtaagttaacaatttatttctagatatacaacatataataaagaaaaagtttgatcaagttttatgtaaagagcttagctctgatatcctgttggctcaccaaaagtcttttggaaggttttcaatttgttccatgttagataccgggcgatgccaaatgaagaagctgctttcccagtctacgtcagaggtatgtcctttgatctccaatcttttagctacctgagactcatagaactcctgcttcaaattttcctcatagtgtgtattcaccaaatgcttcactttctccatcaacttttcatcaattccatggttctttatctgcatgaaatgagcaatgtcttattaagatgatgcaagatagaagttcatattagattcgagaaaatgaaaaactaggagaacaaaatacttacttgaaaacagccccatttttcacaagcttcgtgtagttgagccattgtgttgcttcttttctttccatccagctcagcgaaatctatcactgggatctccatctcttttctttctctcttaatctgcatgtgtatagttatggaatggagtggggtatatataagcgctctaaatggtgcaattatcttagttagtattgcaataaaatggtaagttttggtagttactgaatagcagtactcaccgaaaggaaattgcttagtagggaaaaaagcaaaaagactagtccaagtgcaactaaccccccatgtgtgagtcactagtttttaaatttcttaaaaaatctctgttgtaaaggaagccttttactccttttaaagtttgtaaggaatttttcctccctgattaaatcattccctctttgtaactatttctcagcctctcactaaaatctacaaatgtacatattatattagatgcaaagccttttttgcttccaaaagaggaaacagaaaataaaaataaaaaagtaaatagtatgcttccttttacaggaatttactctcattggtaacttagtatagtgtgaatcatagaattttggaaaaccaggggcagtttgacactgatgagttactttcaaatcagcatagaagaataggacaattatgggagtttatttattttatatataaattaaacaaaaaatgagtcagtgtgctctgtatagtgtgcccatggtatatcgagatcttgatggttggttcattccctttgaactctacttagttgtttcattagacaaacctagattgaaaagtacacatttcaataaagaaattcgtctcacaatcaactttgatcaacttgtcaacaaatattactttcttttggtcttctaattatatgacccgtatcatacatataagctataacaaagatctttctttgtgcttggactgatgatgagatagccaagatgtttagattagtgagttactgtcattgcacttataaaaaggaaatgggctgaaaaataagttatgagcattgtgaaatatttagagatatctgacatttccaattaatctactgaaatctatggcgagaatattaaaattcattcccgagaatgaatcaa

SEQ ID NO: 299656 - DNA, 1328 bp, Cannabis indica
aaaaaattgagtttttaaatagcttcattagtttgaaaaataaataattacgagataagtaccgaaatttttaaatttgtatgcaacataaattcaaatatttttttaacgtcataagcaccaaatatttgtaaaaaaaaaaattcgtttagttttgtcgaacagactccgttttgaattaattaaaagaaaatttgaacgtaactcatattatatgtttccatccaaacgtagcaatttagaatctgaactttatatgtgtcctgtttaagatactaaccgaatttatacatataaaattggagaaaaattatacatttactaatactgggtacttgtgccgaaattattaaatttatactactttcaaacccaataatttagatatatatgctactatttatatttttaaaatttttctcccattttcaattttcttaacaatgacatgattttctctttcttatgttataagaactattatagaaaaagattgaagtatttttattttttttaaatgttctacaatttaatagttgtcaaaatttgaaggatatatacacaaataagaatttacaatcacatgtcgctatatttaaaggaggttcagtaaatgtaaaagttaagggtataattaaatttgaactagtaatatattttagaagcacgcacgatctagtagtgctccccataatttttttcatccttttagcctctaattccaaagtttttcttgatcatgggtttggggagaaaaacactaatatgcttcttttgctttcaattcaatttctttttctacataattataattaagaatttggtcaattgataattactctatgatttggactagaaaagagtagtgtcttagacggagcaatctaattgagattggattcatgatgttttttcacagcttcaaactctttctttttttttcaattattttaattggaagaaaaaaaaggcaaacaataacaatgtataacatgcatacatatacggaggataagaaaataaagtgcttgcggaaagaaaaaggaaaagaaggaaaataataaaaaaatcatcagaaaagttagatagcaagaacggtgaagaaaagatggaagaaatagcgtgataaagaacaacacgataaacccgaaaagtgacaaaaatgttaaataattattaggcagtctatacataattcccttgtaatcaaacttcagttatttttttctcttccatatatggactctatgtaattaacagtctatacatgagagagaaacattcattaattataatgtggattcatatgtggattccattttctcatt

SEQ ID NO: 299657 - DNA, 6331 bp, Cannabis indica
taatgatccccctcttgattcttggattcgatgtaatcaacttgcaatgtcatggatcatgcactcggtttcacctgaaattaaaagtagtataatgtacttagacaccacatgtgagatgtggaatgtgttaaacaatcggtttaaccaaggaaatggtcacacatttttgagttgaatgaaacactaacctacctcaatcaaggagatgattctgttagtgcatacttcaccaaacttacagccatgtgggacgaaatcaaccagttaaggccttgaattccctgcacatgtgttgttgctgcacagcacttggatcaccaaaattatgatcaagttcttaaatttctaaagggtctgaatgattcataccatggcatgcgtgatcaaatcttgcttcttgatcattgtcctcctttaaacaaagttgtttcgatggtaatcaaccaagaaagacaaaggacattaggccatcgcacgattctcccattagctgctaccagctatactgttcctcaagaatctacccctgtagccaatgcagcctcaaaaaattaaaggcctaggccacactgcacaaattataaaaaacctggccattataaggataaatgctacttcttaattgggtttccccttactatggtaatcgaaaactagctgactctacaaacaccagaaactctaatgttggcaatcacaccagaaataatcctcaggcttcacaagtttccaaccccacacctgatctttccaacacacaactcacaccagctcaatgtcaacaacttatatcaatgttgactcaacaattacaacccacaaatgcctcaacatttacagaaaaagctgttgtgaataatttttcaagtatttctaatcccttttcctagattatatatagttgtgccacacaccacatttgttgccaccttcaatgtttctcttccattcaatctaatcctactacattttttgtccaattccctactgttacaaaggttcgaattcacaaaattggcactattataatcaattcacatattacactcaccagtgtcttgtttgtgcctgatttcaaatataatctactctttgttagtgcactcacacaggacaacaagagcacaattttctttgatactaacagttgctatatctaggacccttctcagacatcgaggattgggatagctaaacgtcttggcaacctatactatttgcaacaactcgatcttgaggacaatacatctgtacaaacttgtaatattcatttagctaatattcgatggcatactcgccttggacatccatctgtaatgattactaataaactcaataaacgattacaagttcttgaaatttcaattccttttaattgtcccacttgtcacattgccaagcaaaagaaattaccattccaattgaataataacatttcttctactatatatgatcttgtccatatcaacattttggggccatactgcattacctctattgagggctatagatatttcttaaccatagtggatgatcattcaagacacacttagttatatttctcaaaagcaaaatcagatgccccattggcaatacatattttttttccaattcatacacactcaatgtaaaatcaatatcaaagcaatttgcacagataatgctaaagaactcaatctcaccactttctatgctacaaagggagcactacattacactttatgtgtgggtagaccacatcaaaatgctgttgttgaaaggaaacattatcacatactcaatgttgctcgagcacttgcttttcaatcaaattacctctgcaatattggagtttcatggtatcaactactgtatatcttttaaataggactccatctgtctaattaaaggacaaaatatcctatgaattactccaccataaacctccccaatacactcaccttcgtaactttggttgccttgcatacgcttcttctgtcactataacaaccaaattctcccctcgagccaaagctgttttcattggctacccatacaacatgaaggcttacactctcctagacattcaaactaacaatattttccattcaagagatgttatcttttatgaaaacatctatccttttggcaaagtaccccaaacacacaacttagataattttttctcaactatacttgagaccaattcatctcagcaacataaaaccccacctattgtcactaagattaatccatctcagccaaacaatcaagacatccaacaatctcaacataatacctttgagattaatccatcccaccagcttcttcatgagaaacatcactcttattctcccattcctgagatcaatcaacctaagcataaaaattcatcacaccaacataacgaaccaagcactaccagatcaggtcgtgcacaacaaactccaacatatctacatgattatcaatgtgacttagtgacaacacacaatagtacagaacaccctctcattaactacttgtcatatcacaaattctctctagaatttcgagcggttattctctctctaagcctaatacatgaaccaacatcctataaacaagcttccaaatacaaagtttggaataatgctacgaacaccgaaataaatgctctaaaaaaatcatacttggattgttgtcccattaccatcaaaccagcatgtaattggcaataaattgatgtataaaaataaatacaatcctgatggttctgtccaacattgcaaagcacgtttagtgaccaaatgatacaccgaattaccaggcatagactactttgatacatatgccctagtggccaaatttaacactttgaaactcattttgccttggctgctatggcacttacaccatatggacaccaacaacgcatttctacctggggacttgaatgaagagtttacatgaaacttccccaaggttacacacccaaaaaccccattccacataatgatgtctgcaaattgcagaagaacatataccgtctcaaataatcttctcggtaattgtatgctaaactgagttctacactcttacaacaaaacttcactcagtcaccaaatgaccactcactgtttataagaaatcaatcaggcattttcatggctttactcatatacgttgatgacatcgttgttgttaccaacaatacatctgcattacaaaacttcatcagcacactcgatgcaaggttcaaattaaaagaccttggtacacttcattgttttccttgctctcgagatagcctgttgttctaaaggcatatccataacacaaagaccttttacagtccaactcttgcaagattcaggttgccttggttcaaaaccggtttccacccccatggaaccaaacaataaactaagtagtgactcaggggaattgctccaaaatcccgcacaatataggagtctcatagggaaactcctttacctcacaatcacatggcctgatatcagttttgccgtaaataaactcagtcagtattttcgatgccctcgagtaccacacttgcaagttgcaactagaatactgaactacctaaaaaattctccaagaaagggccttttcttctatgcttcttcaccagcctcgatacaactccaagcctttgcagatatgattggggagcatgtctcgacacaagatgatcaataacaggctactatgtcttcctaggtcgttcgctcatctcctggaagtcaaagaacacacaaatagtatcacaatcctcagcagaagcagagtatcgaacaatagcgcatgccatttgtgaactcacttggctcacttccatcatagaaatttcaacgtcaacatcaaactaccttcaactctatactgtgacaacaacactgctatacatatctctaaaaaatccagtatatcatgaagaaccaaacacgttgagatagattgccacattgtctgagaaaaagtcactaatggtgttctccaaatgaatcatgttccttcaaaagccaacctagcaaacatcattacaaagccacttttccctactcagttcaaagaaattctttccaagatgggtgtttgaatctttaacactccaccttgaagggcctattagagttagttagggaattagttcggtttttccgttatttttttctgttattttttcttctcatggattttgtcctataaatacttgtatctctccctcctgtatagaacatatattgcaattcaataaagctttcttttctctcattgctctgttcctaataagtaccattgttttatagtatttatcaaattatcaaatttttattataggattaaaacttgatagctactaatattttggtttgttggtctccgactattccatgttgtattagttttggttcatattttactcaagtcatactttgtggttgcttctatttttgatgatatataaggtaatctataagctttaattttgagtgattattctcctaattttactctatatattgcatcccttagacatactctatttcttctttaaaaaatttctcattaaattttagttttgctattttctcacatatagggttggaaactcatgggtatagggccccattggtatcagtccctattggggacaggattcttcagttaaacggggatggagatgataatgattttctatcattaaaattcaaatgatgcaaggtgggatgacactcccatcccgatagaattatgtttatatttatttatttattttatgataacaagtactttagttattatatgtgtcttattataaattttaacaatatattagaaactttttagacttttttgaataatctttcttactttaaattatcacatagtatattatttttatttttatgtaagctaatttattattattattattattattattattattattattattattattattattattattaatgaatctccatgggaattacccagtcatgacgggaattttgtacttcatctctataaaccactaaactaattagttagtggttagaagttaattcatttttttattattgttctattacgaaacttgtatacctttttgtctttcaatataaatatgaagatactgtgctaattaattggttaacctccattttaaaaaatcactattctctcttcttctcttttcttgtctttctggttttgtatatctggtccgtacctggaacattgccattgtgaagctttacatggtatcaatcaccactgacttctgtctctgatggcttctactgataaaacgttttcatttggtgcttaaatcaatcctccaattgccacttctcgcgctactcccccaactatgaatccaatggctactccagctacttggaatctgtttgctcattctctctctatctctcttatagtgaagatttattgcaccaattttcttgcctggaaatctaaagtcattctaatagttataggccatgatcttgataatattcccttcactggtatgtcgctgcttcaagtttttgttactgttgaaccaaatcctcaatatctgcaatggaacaaatgcgatcaattgcttctctcgtggcttcaatcctcgatgtatgaagaagttcttgctaccgtgactaatttcttcacctcctatcaagtttgaaagactttggaatagttttttttctgtcaatctcgagcaagattactccatctcaagggtcaattctcgcatgttcgtaagggagctttatccatttttgattatgtggataaagttcagtccctatctgatgccattattattgcaggttctacaatgggcgaacaagatgtgattctgaaattgtttaatagacttcatcctgaatataactcggtggttttaagcatcaccttccgtagtgatgcattgagtcttgatgaagttcacacactcctcatggctcataagagtaatcttgaacaacataatgccatcattgatcttactatcaagatgccagccaatctctcttatggatcaccaagaactaggaaatcctggccatatcagtctactacacgaggctctacacttgagaatcaaaattgcttatatggtcgttgatttcgtcgaggatttatctcaaattatcatttgatttgtcaagtctgtctcaagagtggtcacacggctattgtatgtcactaaaaatttgataagaattggattactctgaaacgtggtgccaccatcccccctgtaacaccctaactaacataggcgtattacatgatttttaaacatgttgtgcagctcgttgctaat

SEQ ID NO: 299658 - DNA, 3306 bp, Cannabis indica
tttaagttatattatagtagcttataatttaaaaccaattagttacttttacattaatgacattctgatttattccgagattgaggaagcacatgagaggcatcttcaaatgattttatagcgtctacgagaacatgaactttacaataagtttaaaaagagtgatttttagctgtcccaaataagttttttagggcatgttgtgagcaaggacggaattctagtagacccagcaaagattgaggtagttcgggattggccacgacccaagtttgctactaaagtcaaaagtttcttagagttagcatgatactacataaagtttgtaaaagggtttgctaagatttctacacccttaacagagtttcgaaaaaactgtaagtttgtttggactgataagtatgaaattagcttctaggagttgaaatagagattgattactgcaatagtattaactttgttgatcaaggatgagaaatttgtgatttactgcgatgcttctaaacaaggattaggttgcatattgatgcagtctggtaaagttattgcatatgcgtctaggcaactaaaggattatgaacaacgatatcccacacacgatattggtagtggtggtgtttgccttgaaaatttggcgtcattacttatatgaagaaaagttgttggtgactgattttggtggttattgaagttgttggagttaaagctttaagcttgagttcatggaactcaagcttgagctttaatggtaactttgtaattttgaggtgatttgttgattctatgtgtttggttttgttttatttatgatattaagctattctgaaaagtttggtagggttcagaggagttttggttaggtttttaatgtttaaactagtttttggtcattctatagtgacaaacggttaactgtttctacagagtattgtaaaatggtgaacattttttcccaagttgaacccaaaaaacggtgaaccataatgggaaaacgttgagccatttggggtattttccagtacctatgtttttgtgttttatagatatttagcatattcctacgctatttatcgatagaaaaatgtctaattttgagtttaagtcttagaacgggattcattgagttatttactgatttattattgtcgtgacataggacttaagatcactgagcattattccactcaggttggctcgtacacctaaatttagatttgaggtaagaaatatcaattgtatcacattacatggataattggaaaatggtaattactgttaacatgaaaaaaaaattataactataatctgaaaccattgttggattttttacttatcgattgcctcattaggcaacgatagtgacattagttgactcgttagaaacgagggttaatggataatttatgaagtatcatgaatagcttatcttattatataaataattgaattattatatagcgtaatgttttatataattatatatctaaatgtatggttgttaatggttattatttcattaaattcatgaatttgcatttcctacttttcttgttgagtctttgtggctcacgggtgctttccggtataggtaaggaaaaaggaaaagtggatcagacacgagtcagaggtttctcagcaaatgtacatatcaaccccatcgtcttctgagctcagtggataggatcatgttttaaaatattttggttatgtacaaatattttgttgtaaaatgtaacgttacattttagtaaagtttggaacaaggggatcccccactcaataatattttgagaagggtttaacatatattttaataagtaatttagtaaatttttaattaaactacaatttctcttaaattagtagtttattattataaattttataaaagtacacatgtggcgctcttacgggttacagctttacagccttagtagcacaaataaattcattataatacttctcatagaatatggtttagaatatatctcaggtcatggtattcaagtcttgaccttaggacatgatctcccactagatacgggcatcctctcgcaacataaatatagcacaactaacccaattgttaccctcaactcgcataaagtcaaagatagagattatcatgctcatctactgttccacctttcgtggatgagaaccaccctcgaacactggtgggttctgtttcctgaaccgttcgtacaacgactccaagcaatttctcacgtcctgtggcataactagaggtgccaaaggaataagaacttgagcaggctatacctgctactcatgaagctcccttatctcattccctcagatcatctcttacatcgtgacatacatttgttcctaattttgtagaggtggaggattcgtatctccacgccaatcctgagcccagatagctcgcggttaagcctatcagatcgcctcggaggcataactcaatacacttccgaccataggtttcccataagttagagctctcgaacaattattattactaatcaacatctccatacttaggcaaatattatgttactttcaataattcatatcatgcttttctagcaacatattttttcacatatcacataagcatctaatcaattaacagataagtaaataacacttattgtatcatgagtcgaactagtcttcacagtatatgcacatatccagctggtcttcaagatctttaaactttagttgctctgataccatgttgtagctccctaatctataaggccgccacattgtactttttataattactaacagtttaggaaaaaaattgtggtttaattaaaactttaccaaataactttcaaattataaactacaacctcttaaaagttactaagcttggagatccccttttataaagttttttacaaaagtgccatcatattattttattacaaaatatccatacatattcaaaacattgtaaaacatgatcctgtcaattgagtacaatagacgatgagattgatatgtacattgactggaaaaccttcgactcgtgactgatccactttacttcttcccttatctgcaccacaaaatacctgtgagtcacaaagactcaacaagaaaaagtgggaaatacaaattcatgtacaatgtataacaataatcaatagtagtcatataactgttgtcctcaaaagtgagtgttttaatatttatactcgcaagtgcacgaatcgtttcggaatatagtgttcatgtaagtgcaaggtcgaacccatgggagttgactaacatcaaaagaaactatttcaaacaaaataagaatat

SEQ ID NO: 299659 - DNA, 2218 bp, Cannabis indica
cacatggaagcaccctaatgactgtaaattggcacattaaattatagcccaccaccactagcattttaaacccaaaactatgtccactctacccctagggtaaattaatatatatgtgtgtgattttagtggaataagggggatatatgggtgatatggtggtaaaagttttacaaggggatgctttccataagctctcttaatgcttagaagatgttgtggtgaatcaagaagactcacaattaaagaatgcacgatattaaggtatgtttattattattcaatgccctaaataaaatgattgaacttggatgtttatgagtattaattgtgttcattattattgataatagaatgctcattgtgtagtaatttaacattatattcatgtgaggtgttcttcgtacaagaatccatgttttgttttttatttgagccttgttttcgtcattcatagtagttgtccaactaggatggagaagagcttctgaaacaaaaattggtccctcaaaagtagccttccattttgcttctccaagatatactttaggcttgaacacactagctttcccccttgtaaccatagggtgagtaggaacaagaggtttgggaatggtagccgcatggtcagaagcagtgtgtgatgtagcaaacaaatgattatctgatacttcatcaaggtaaaaaataatgggagatggaggtagtggtgacataccagcatgagcagaaataaggccggtgcgagaaagatggtcagaacaaatagaagaaggtccttcagagggtgcagtaggaatagaatgagatggaaaaaaacatggagaagcagatggtgagggtggagattgtgatacaccaacaagaagtaaaggagaccatgaaagaacatacacatggacaggttgtttagattggtatgtgttaagaaaactagatttgaaaggaaagtcatcttcattgaagacatttcgtgaaatgtaaagcctactcgtgctactcaaacatttatagcctttgtggctatcactataaccgaggttgagccatttggtggactgatattgaaacttgtggattggatatggcctaagacaagggtagcggttgtaaccaaaggttttgaggaacttataatttagcttcttaccaaataaaaccttaaatggagaaagactttttaacactggtgttggtaacctattgatgagatacacataagtttgaaatgcatcccaccaatatttttggggaatactagcttgagcaaggagagtcaaacccatttcaacaatgtgtctttgttttctcccagctctcccattttgagctaaggtgtgaggacaagagtgttgaaaatttcaatcgtgagatcactaaaggcttggtattcactccctaccaatcttgagttgtttgttttttttttatcaaattgattttccacaagtgcttaaaactgaataaaagcttgtagggcttctcctttagttttgagagggtaaatccaggtgtgtctactgtgatcatttatgaaatagatgtaaaatctataatttgtgttggacataattggggatggtccccaaatttcaatgtgtgtaagttctaatggtactttggctcggttagaatttgaggaaaatggtaaaatgtgagagttgcctaatcgacatgcttcacaaaagtgttcttgctcattttgaaaggacttttcattaatagaattcaacacaagatttaacacatggttggatggttggcctaatttcctatgccattcatccttaattaaaattaaagacttctcaattgtagtctgagttacattggattgatttaaagaaataacaacaatgcaggattttgacactttgtaagtggagacatggtagctgtgatatttggcaaaggtatcatttggtggagcaaaattgtagagtccatctctaagcctctcttaaagcatcaccttctgtgtttccttgtccttcacaacacaacaatcagaggtgaattcaacattgacattattatctcttgtcaatttagaaatgctaataaaattcttggaaatattaggtacatgaagaatttcttttagaacaagagcactattattactgatgtgtaaaaaaccagatccaacacgagcaattttaagtttagtactgttgctccagaattcgcccaaaatacgtggaccagtcgagagggg

SEQ ID NO: 299660 - DNA, 9433 bp, Cannabis indica
ctaactaacttcagctcatgatatctactttaatactcccactcaagatgtggaatgattgttttgcaatcccatcttgttcttgagcacctaaaattgagtaggaaacaatggctttgttaacaaatcaacaacctgctccttagtcgaaacatggacagttttgattattccctcctgaatttttttccttacaatgtgacagtctatttcaatatatttagtcctctcatgatagactggactggctgcaatatgttgtgcagccttgttgtcacaatgtaaaattgctggccctttacaatcaactttcagctccttcaattttgaacatagcaaaacaatttcgcaggtggtatttcccattgcacgatactctgcttctgcagaagatcttgacaccgtatgttgcttcttacttttccttgagactatagaatctaaaagaaagatgcaataccctgtagtagatctcctagtgttaggacatccagcccaatccgagtctgtgtaagcctccaatttaattttaaactttgatgacataaaaatcccttgtctaggagtacccttgacatattgaaggattctttctgccgctgtcatatggctagccttaggagttactagaaattgccttaatttgttcattacataggacaaatcaggtctagtaatagttacgtattggagttttccaatgattttcctttaccgtgtgggattagccaaagggtcatcttcggtatcttggctaagctttaagttggcctccataggagtattgatttttttttgttccaaggtgtccaagttcttcaaggagtttgagagcatagtgcctttaggaaacaaagatgccttttgcagaccttgcaatttccaagctaggaaaatacttcaaatcacctaagtctttgagtttgaatctgttgttcagcctcactttcaatgcttccaattgagggagatcattggaggctagaataacatcatcaacatatatcaataggatcataaaaccacttctcaagtgtctaatgaaaagagagtgatccatggctgaatgatgaaaaccctcttcaattagagcacctgaaaacttttcaaaccattgcctagaagcttgtttcaagccatacaaagacttctttagcttgcaaacaacattaggtgacaactcccccttaggactatacccaggaggtagagtcataaaaacatcctcatgcaaatccccatgtaggaatgcattattgacatcaagttggtgtaaaaaccaaccattgatagctactaaggccaagacaagcttgacagtgaccaatttggtgactggagcaaatgtctcaaaataatcgatgccctcttaatggtcgtaacccttagtaactaatcgagccttaaatctctctaccatgccatcagcattaaatttgattttatacacccaattgcatccaattgcatgctaatgggcaggaagagtgacaataaccccagtgtcattagctttaagagcaattatctcattgtccatggcattatcccattcaaatatgccatgagcttgctcataggacgctggttcagtaagcctagaaatggacagaacaagagcccgatatgttggagaaagctgagagtagtcaatgaatttggagagagggtagatagctccctgatcaagatcctgagaaatagtagaattagtgcaattagtcaaaaaacaatggtaatgattcaagtatgaaggcttatgagtatgtctaataggtcttgtagaagagggagaaaaaggtgttgtaggaatattttttgactgtgggggcagggaagaaataatctctgaattgggagaaggtgaagagttgctggctgtgatttctggggtgactggatcaggatcagtggctggtgtaaaaccagaaggcagtagtaaaaaactgtcatagccagctggtagagaagtagttaaaaaaggaaaaatacattcatgaaattgaacatctctactgcaaaaaagcttattagtatggagatcaagaagttgataagccttcatacctggtggatatccaaggaaaacaaatggggctaatcttggtgggaacttagacgtagaaacagcaagagtagatccatatgctaaacagcaaaaggctttaaatgatcttagtggggttgtttatgatgcaatatttcataaggacacttgtttcccatgttgggagctggggttctatttataagatatgttgcagtagcaagacagtcactctaatatggtaggggaatataagattggaagagtaaggctctagcaacattaaggagatgttgatgttttctttccacaacagaattttgtggtggtctatggtcacaagagtgatgatgaatgatgccttaggtcattaaacaaggttgggaattggagttccttttcattgtctgatctgacacttttaatagtaatattgaactgctttttggtaagtttaatgaaatgtggtattactatttgagcaacagatttatgtttgatgaaatgcacccgtgtaaacctagagctatcatccacaatggtaataaagtatttaaaaccctcaacagataacacattaaaaggtccccatatatcaatatgtatgacatcaaaacaatgcttagcaatgttatgattggaaatagaaggcaatttcctttgtttggcataatggaaaatagaacaatgaaaataattgctaggataattgctcaatttcaattttttatttaaaggatgagtcttgatgaaagaggggtggccaaatctatagttccacactattgcatcacaaattttagaatctgaaattgaaaaaacaataggaaaatcagcagaaaaattagttttctgaggaaattttaggtagtagagagattccctattctttcacccatcccaatctgcagagtcttcataatgtcctgaatggtagaatggttaggataagaaaagaaagaacaatcaactgaaccagtgcaagtaatagttgcatttctaccagataggacatatgtttcaaaggtaggaacacacaacacattttttagcacaattttgtcagttaaataaactgaacctgtgcaagtaatagttgcatttctaccatcaggtaacttaacataggactaagatgaatttttaacaatattaacaaacaatgaaatgtcagggcacacatgatgtgtagcacctgtgtcaataatccatctcttactttgaataaaatttgtcttaccagattcatgggagacaattggttgatcatcattagattggggaggagattgatctgaatttttctgagacagcatactcattaattttttacattgcataataagggtagagatcagatcttgatcattctctccattctggtcaatctgattactctggatttgttgtgaacctgagaaatttgcaacaacctttccattttgtgatgcaccagaatctctagctagaaacctattgtagtatttatgccctagtggatacccatgaatcttatagcacttagacatggtaagaccagggattccacagtgagagcaagtcactttagatctattgaagttagagcttccagcaaattgatcattagaagtcccagcagtagaagcactagtgtctttacttgtttcagaattagtggagcaaacctctctttgtctctcttctagtatcattgaagcataagctctgttgatcataggaaggggttcttgcatcagaatctgagatcttacattgttataagactcattcagacctattaaaaatttaagaaacttgtcttcctcttgatatccttgtataattttcttagcaccacattgacaaggaggcagtggcctgtattcctgaattaagtcccatagggcctttcttcgagtgaagtaagtagtcacacccatatcacctaggttcaataactgcatcgggctcttagcttgaaaaatccttggagcattcctttgtctgaacctttcttgaagatcatcccagatatctactgcaacatccatgtacataatactctcaacaaatttcttgtgatatagagtgaagtagccaagaaacaacaagactattgcatcgattccaggcatcgtagtcttcatcattttcatcaggttgactaagctttctattgacgaattgcatcttgttcctcgcaagcaaggacactgtcatagtacgcttccatgagtgataattatcacttctagtaagtattttagggacaagattggcactaggatgatcactgttatacatatagtatggatcgcgatttggatcattatgagatctagaattaggttcgagaacagagaaaggatttgaatcttcaaaggtggtcccttgagtggtttttctttgagtattacctcttccacgtgccatggacaagcagcaacaagagattcaagaagaatgatagtaatcatgaactgaacgataaacagagctccatgatcaacatggctctgataccattttaggaagaagaagatgaaatagagagagaaaaacagaatattattgacattgaatgattacaaagaagtaagcaaatgaagctcacttatatacacgatgatacagaagaaaattagttagagcagcaactaacaaactagctaactaactaactgattacaactcaatatagcaaagctcctaactaacttcagctcatgatagcaactttaataatatatgatcctgaccatgagagttattgggagaattccatgcctagctaatacaatcctcaaagctgcttttggtgagacatcagctatcgaaatggaatcgttgtttggagacataagaggtagcctcagtattgctaagggaaaggattaaagttcggtgatcagagccaaagaaatttccattgagaaggttagcattgggcaaagatgatgtccacgggagttttgagatacccaaagctaatcgttcttggatgcaagtgggatgtgagtgtttattagtccatgtgtaagggctcttgttaccacggatgggatggagtgtgtaagtatctaagaaagtttagaaaaaaggcgaaggacttttatttagagtgcccccaagtttgtcaacaagggaaagaaaagcattaaagtcgcccattaagagccaagggttgttatatacagtattaccaaggcgatggaggagttgccacgtaatggggcgattattgtgctgtggggctccataaaaaccaatgaaagaaaaagggcaacgattaggaaaccggatataacaatgaaaaatgacttatattatatgaaagtaaagttacatcaacaccctgagtccataacaaaaagaggtcgccactaaggctgacccgagggacttcaagaccattagcaaaagaaagcttagctctaagtttattaatagcaccaacagggagtttactctccatgatatacaaaatggttggtttaaactacttgactaagagggagagtcgacagaatgctcgtttactccctaatctgcgagcattccagcttataatactcatggatcctggcaggtgcgctgagcgttacccgcctgatcaggattgctttcatctaaggactttgcttgattacaattatgcttgaggagctttcgaaactcagctccatcaattcttgagggtcgctttggcttgattctacgatcgggggaagcgctattggttggcacagaggatgctccaggagaaaattgcagtggctgagaggccgttaagtcagcaagtatagtggagaatggcctagagacaggaacagtgtgccaagttgtgccatccgtgacagaggggatcggcgtagtaggttgtgtggacaatgttggcataggggtatggagttgctccgtagttgtgacaaggataaagtgatggtgtactggtctctaatgggacatcgacatcaaatcttggggaactgatgggtgtcggtgtagggctcattgggtgaatagggtggtgggaggtgttagggagcatgatgttgcgtgtgggggtgtttagaatgggattccatcctgtcgcaaaggaaggagcgtgagaagctgagtataagggcaaggtttcgtgtgtgttggaagatcctgccacggaaagggcctattgaaaccatatgagcttgactgaagtgttgaataccactaatcgaaagtggggcattgtaagcatgagttggcatgctctggccttttggcacacacacgagttgatgggtatccataaggtgaggatgaaatatctgtgggcggagtgtggcgcgagtggttgcaatatataatggattggaggtgataagaaactttttctctgagggtgtgatcatagcggagcgagggggtacagaagacgaatcatatttggccaagaactcggcacagtgattcacaatatgacttaggcgtccataaaaatggcaaaaattaggcaagttttcgtatcgaaactcaagccaaacaggggtagctatattggcgaagtggaaacaggctccgcgatgaaggggttgagtaacgtcaatttctatccgcacccgaagataaaaccctcatgtttcttaaagagaggcagtatccacatcaatgaaacgaacgggaatctcaccaagcttccttgctagagcccaggatcgatcaaggaaagggattccaaaaacttcaatccaaaaaggagttaaagtaagcatttcgactgtgactgtggagccgatttcaagggggtcataacaatgagcttatagtcgaaatgccatggttgcccaataagaacacgccgttaatcaccaaagcatccaaattatacagtgaagaaatttggttctttcaccagaacattgatagagtaacgctcatgccacatttggtgaaggcattttttgaaagcaacttcgttaaaatggcaattagtgagcagcttaactgcaaggaaagtagagggctcttccccaacatcttcttcaggctcttcaggtagttcaaagagagtggatttttgtttcagtgtcactgaggtttaaagtagtgctgagagtttgagaaagttattccatgacaaaatcagactgaacaaataaagaataccatgggaaaggtgtgtgatatttgtggagatggattaatggtttatagtgaagtgaggagttagattagatgagcagtcataaaatggtgggagggaatatgtagtggatagtgtgatatttatagtgggcggtgtatgagttataagcattatacgaagaagcctttgtgaaggttgtgatgctcgaagacaaaagaaattactgaagccattctgaagaaatattagaataaaggcctgaaaattgaatgcaagtctctgcatatcagaggaagcaggggtcgatggtgatatactgtaagtaccccctaaagatttccaaaggacgcctggaatcaaggtaagctttaaggatcgtaaggtaataatgagaagctcggggggatcagagatgtgatggtaatttaattctatttatggaatgaatgggcaaaattgaaggggaacatacggttttggctaaaagaggggggaaaccaaatttgggtaggaacattaatggcaaaagtgacattaaacaggaagttatggaggaagtgatgcatacctatttgggaggggtctagttgcagggcggcggtgttggtggtgatgattgcttctgggtctggctgcgagttgacgaagccgttaacggtgcgaaccgagatgtttcgtgtggttcgagatggagagctattgtcaccacgggttacagatcccaaatggataagagcgtcgagcaccaatgacgacgacgacaacagaaccataaaggcggtgcacgaagaagccctaaaacaagtcgaaggaagactcgagaaggtcttccattctccaacactctctatttttgatagctatagttattctctcttgtcttaatgtataatagcacactctcattatcactaggtatgatatgaccatttataatatgtcataatatataaaatttaaatgtgccaagtatcacacggaggtattttaatattaagtctcatactttttaatttaataaattttattaagaaccacactaataaactataaagtaacgtccatgatacaatattttcactttaaaatattaattaacaatactctaactttaaataaacaataaattttatcttttcacatgctttaagttctctctctattttgtagtttagtttctttcttgtttccttggttcttgttgtgttttgttcgattgcttcaagcattagatcagtatgtgagattgaagagcagcatgttggtattgagattgaagataaggaggaatgaggcttatcgtatgataatcgaacgattaatctgatgattatcattggtatattgttgggtaatttattatttaagggtctattgattcaaacattatacaacatatgatggtttctttatggcagtcgggcaaaagagtctttgtgaaagaactagatccaaatatttatttgtttaatttctacaatgaattaaatattcaatgtgttatgacaagcagtccttggacgtttaatcgtactcaatttatttttgaacgtgttaaaccaggggtttatcattctctagttttgaagcgtttgcttacgtgggtgcaagttcatgaactgcaacattaacaaattcaactatattctggaagacaaaagtgcttttattggagagtttgtggggactgaccttaagaattttcaagggttagtgggactatctacgattacgagatattgttgatatcactaaacctttcaagagaatgatgaagatttatcaaatagggagcgaatgattttgggttatgtttaaatatgaacatgtttctacctttttcatcatttgtggcttcattggtaactctaaatgattttgctctagattatttacaactctttttaaggaaattgtgaagccttattttgagtttatatgagctcaattacatcataggagtcagttgattggctcaaaatggttgagaatcgatacacagaaggatgcacgtttttttagttgttctagttctcatcacttatatgttcctagtttggtaacttcttaatgccctatgattatggagaataatggaggagatcgcgaaggtcgtgttgtcaagttaaagggaatattgttggagagaatggtgggattattaatatggcttgttcgaatttgaatgtttggtgaacattttttgacagagatgacgaggatctgttaggttttatgccctaaataaaactccatttcaatgtaatctattttat

SEQ ID NO: 299661 - DNA, 4563 bp, Cannabis indica
ggtagctaatttgatttaataaatttaattttttagttaaaaaaaatacaaattaaattcaataatataccaaacaacacaatattatattaatgttatcggatatagttgatcccaatacaataatggtatattcaatctaattattgtgctccaactctatttataataataaacaatataatttaataaattgaaggttgtgtcactaacacaacacaccatgcctttcaacaataatcatatacatccaaatttctatagtcctaatttggatttataaataaaaataaattataattaattatatattttctaaatcttatatctattaataaaatattttttataaaaaataattacatattaataaaatatatacatatattttttatttgcgtagaattaaaaattttattctaaattataatacatgtataatattatatttactcaaaaataattataatattaatgattagttattgttattattgttacattacttttatttttgggtatttttaatttttttctagtgtaattctatttagttataacctctaaattagaatataatttatttgttctaagtatattcttagataaaatttctactgtatatatatagtggcggatcttgaatttaaaacgaggagtataatttcttttatgagatatggtaggatttaaactcttgacatttatcatatatgtaatctaagttaattattacattaaaattaatattatatttataaatattatattttattatagatatacatatagtaactaactaaattacatgtgagtccaccccaacataatttatataaattgaaacttccataacctacgctcttataaacaattaacatagtcaaattaatcaaacacgacatttccatatcaatgatcaaagaataaaaatgaaacatattatatatattatttgtccttcatttcttctctaataatacctaatttcttatgattaaggaaatcaattatatataaatatatatgtggaatggattaataataaatattaaaggatatatatatatatatttatatataatagggtaggaatgtgatcaaacttgtgattgatgacaaatgattccaccttcaattttggctagctgtttacacccaccataatggaccacccaacccaacccaaccccaataatctctttataccatcaattttgcctccctcctagacaacccttattaaaacgcacactcctctttttcaaaattgattctttaatttcctcattttcagaacaaatgtaccaattcaatgtatagcttacttcttagtttttagaaaacaaacaaaaaataaaaatgtatacttctaaagaacattattggtatagttcaccatctcaaacaatattataataaaatatataaacgaacctataacaaataaattttatgagactcaatacttacgtttatgtccctacaacaataaacatttattaacactttttatagtgtcatatcactattagtggaatatcggatagatcctatataacttaaaaaaaataaatttttaaataaatcactacatcattgatgaaaagtgctaaacaccactgatactatatattaatattgaaaacattattttagaaaaataattccttaatatttttatttattttgcttgatttaaattgaataaaagaacaaatggaacccttttttcttttcttttctttttttaatatggaagaggaaactatgtttttccatgtacaagttttttacatggggttatacaaaataatcaaatatatagaacaaattaaatctctaaaaaaaaaaaataaataaaaactttttacaaaatacaaaagaatttaactggtcaacgccactgttgttgacgatgttacaatagtcgtagtagtagtagtagtagcagcagcatttgtggcattattaacgccgtaactctccgttaaatctccgtccaaacccgccgcccatcttctcaatatcctcaataacgtcgcagccttccgtctacccctagacgaaccagtccccataacttcccaaattaccctttcgattcccgccacacccacaagctccgccaccatctccgccccacctttccggcaaatcgtaaccagagtcgcagccgagctctctcgggctcgctccgacccgtttctcaaaaccgacccgagtttctttatagcactgtaagctgctgcaatggctaacaaaccacctctcttaaccaccacttcgattatcgtcacaccttcctccgttaaaccctcgtcgatcgcctgaacggagacatccacaactccggcttcgactaatcggaaaacaccatctctatcgccggctaaattcaatatcgctgccaatgcgtctcttttggttgactccggacccgttttggctaattcgagcaatcctttcacgacacgtgtcttcctcacgagtcttttcctgtgggcgtgcacactcgataaactgaatatcgttgcggctgcgttacctttagcttcccacgtggcacccgtgcgaagaacctcaacgacgccgtttaaggctccttcagtttccattatacggttcttgttctcttcgagaattgataagttgagaattgctgtaacggcgttgacttggaggtttggctgagccgagccgatatcggaagataagtaacggactaggaaaggtacggctccggcttcggctacgcagattcggctttcggagtcggttttggcgagtgctcgaagctcgtaaacgacaccgtttgcgtcctcaaacgattgggattgagataatttgttgaccaaaaacgaagccgtcatcttcgtggcttccaaagccgccttgtttattaatgcaaggccttttggtttgtctttactctcagccgtttcgaaaggaatcttctgatcacggcaccacatggcgataaggtttttcaacgcgcagttggggattaactccgtgtgggccagggtctgacctgtctttggacacgtgttgtgtcctgattcgatccacagcttgattgattcacgatcgtacgtctgacctgtcgccactactactgggtcccgcatcagatcgagacttatcggacaccggaaatctgacggtacagggatttccgatgccgattgccggcgaatgatatcaggctgaggagtcgaagcgccgaacaagacgcatttcgtgtagcgaacgattccgatcagtgctacgagttctgattttgatttatcgtcgttttgattctgaacttcttcttggagagactcgatttcttctctgcaactcgatgagtctcgaattcctaaattcgtgaaaatttctgaaagtttggaatgatcgggaacgatctctttcttgattcgatctagcatggttacgatctcgagtctgagaatctcatcttctggatcgagataagctttcgtctccgaacactgttttctcaccaaacaaacaagttcttcaacatcttcgcttaattcaatctctttcaaaggaaaaatatccaacagagtcgataattctaaagtcaattcatgaaaattgttcgccatggaattattctgaacgagtaaccacatcttactagtcgatccattagaacaatcctcaatcagagccttaatcctctgcaaaacaataaacatttcttcgaaacaaagaacagcagaggtagaataataggccatgggagctcgaagaagctcttcaaacaaaatcgctagaagcttcgatttacgaatcacggagagcgaatttcgccggaaaagaaactcaaaaggcttaagagaactaattcttttgtgagaagaagaagagattgaaggagattgatacctgagagcgtttggagaaacaaacggccgccgccgagtgggcggcgctttcgagtggggaaatgcttgagcagaaatggccatgaaatgatttgattgagattttgggatttgattttgattgaagaagaaagggtattaagggtgtgtttggatggtaataatattgagttgattacagaacaagtttagtagaatacaatactattacgattacgatagagaatagataaacgtttaagtttgagttggctttttctttttctttttatatatttatatcaatttttatatttattatataaatacagaaagaaattaagtatggggtcaggtcagccctttgatgtcgttgactgcttttgtatcttttcatttttgaatcctactctccctattaggtaaaaaataataaagtaaaaataatataaggtaaatagtgacatgattgtaaataaagttttaaattaattatagattttttttgagcagcttaaatatttaatattattaaatgtggaattttttttttttttcagtttcgtcattatagactacgttaatgtcttaagattcagattctaattaaattattgaatttggacaaaaatatataccataagttatttttaaatcgtcatttaataaatttaaaacagagtct

SEQ ID NO: 299662 - DNA, 2076 bp, Cannabis indica
gttttagcttaagtgtggaagttgctttggattacgaagcttataacaggccttggagcacattaaaaatgccacaccagcgattgcagacttctccattccaaaacaggtgcttcaacacccctctttgctgaagctcaagccctcctggaaggcctcaattggtgtgctgcaattgatcttcaaccaagtttgattatgtctaattgctctcaactagtaaccaatgttcgaagcaaatggaaggataaatctgctctttcaatccttgtggagttgatccgtgagtccttatcctatttccctaatgcctccctacagcatatccctagaactgataacagagaagctcaccaaaatgctagggatgcacttcagcgtgataaggacttcaccatgagagtatgatttctctctatctttgtgtaactacagcctgtgtttttcttctcttctcttgttgcagtgcattaaaaaaaattaccaaacaagctacaacaaaacaacagcattactaagctaatacattgaactttatagactcaatcacttttcattctctactacacaggctagttttcgtacatagatcaattctatcttgaacaatttgacaaatcaagttgctagcaaacttgacatatttagtatcaaagtaacaaagactcatgttataccagataaaatacaccgctactgcaatagtcaatacaatcaatttccacacgaaactagtgataggtttagaaaaccactctacccaatttgcattgattaaaggccagtaaaactgaccaaactagttcaatcaaaatctgagagtaaacacactcaaagaaaaggtgattatgaatcttctccttgaaaacaaataggacaacaagaggaaattaggggcataaatttaattagctagtctctagttagaagatactcattgaaggcttgcaataaaataaaacagttatttggaaaaatttgttttctccaattagccttgtagttgttaatcttttcacaatgcaaaagtaaattgtaactttttttaccataaacttcccactaatcccagcctcagtcaccatgcttcttctatagtacttctcaacttagtaagctttttgaagtaccaacttaggtccaccttgggagtgaactcccaaaaatcattctccttgagatcaatggcattgatccacttaacccaaagattatcttgcttcgaagtgagagccaaaatatactttttcataagagctatattccatttaccttccttacaaaagcctacggctccaaatatctgaggcaaacacacatgctcctatgaagaaagataaagtttatttcttgtttctttcacaccccacaagaagttcctgcataatttatgaatctcgataataactttgtgtttaatcatcttattctatataagatggtcctactgcctctgttgtcttaacacaaccaatgaggttaatacaacttagtgttcttcgacaaaaagtcacggtaccttgtcgtagtgggagggttttaaggaactcagcctattatgacttggaagacacttgtgattaaaaaatccattgttagtttaaacaagtaatggatagtcagaataaggaactaagaagcaaagccaagagagctatgataaaagccattcatatagagtaaccaaaaagttttctattacaaggacaagaaaggaaattttaaaaattaagtctattcaatggacataacaaaacttcctgttcctagtattaaaggtttgagattatctaaacctatgacttatggtatacctagtattttacttactctagtgcaagcaacttactttagtaagatgatgatccattttttttttctaatggctacatctatagaagctttttgacttttagacatagattttatttatctaagaaaaagtttcaactattccagaatagataaaggccaaggaaagaattccttaggatcaacagtgagaggtctcatatatgctttgctatgcattagaccagacacctgctgttgagtgggagtaatgagtaagtatca

SEQ ID NO: 299663 - DNA, 2657 bp, Cannabis indica
cgtgcctctgcacgtaactcttaactagtatatatatatatatatatatatatatgaacatagcatgttatatagccttgaaagctaaagttgtgtattactcacaacaacaaatgtccttaaaaagaattcattatatatattctttttggacactagaaaacatcttcatttctttttcctatatacttcaagatggtacattaattcatctattacaccaagaaaaaaatacatttttattgctttcattatgcatgtatttttaattaagggaggataaaaaataaaaaataaaaaggttcaaattgacaatatcattacttaaaattatagggtaagtgtatagtaaaatctttcaaaaaggttgtttgatacactctttattaactctttattaaaatctttcggtatttaagagagctttatatatatatatatatatatatatttataattgtatgctttgtagttatttaaaattacttataattttttaaaaaattataaataatttataatattaaaaataaagttaaaataattacttatatgaaaaaaaataactataagtgtaaaaaaatattttaattttattttcggcattataaatattaaaaattctttataaaatttataaataattttaaataaatacaatatacacggctataaaaaaagaattaaactgaaaagattttatgcatgtccaaacaaatatatactagaacaattttttgggaggtatagtgtagatttttgctaaacttttgatatttatttccgaaattattttatagaagaaataatttttaatttaatacatagaactgcatggcttttaatatgaacctgcaaaagttctttacatctatctatgataaaaataaaaataattataattataaaaaatataggaaaaatcagtacatctccttaaaaaattattttggtacgtactatatgtatattggcatgtaagaagaatttttttaatccaatttattttgacgaatatgtatattagtaatttattaggagcatttacaaattttaaattttttttgaatagattatagaattaaaataaaatttaaataatttcttactacacgtatgagaaaaaaatagtcacacatgtaattaaatatttgaatattatttttggtattataaattattcagaatttttaaaaaatttataagtgattctaaataattacatcatacataattataaaataaaaattgaactaataaactggtttgtatatcgaagcagataaaaatgtatcaaaacatctttttaatgaaattgaacaattaaaatttaaacatgacttctaaaatatttaagaggattttgtgtctaactatatattaattaatttattagccattcatttcgtttataaaagtaattaaaaagcatttataaaaaataagtttgagtataattattatgtattgtctctttccgatcaacctctctcattctctcacccaaaaaaatcttaattaattaatatgattaatgttgaatgagtttcttaaggaaaaaaaagtgaacatttataggtttttgattttctaggattagatgtagatatttgtttttattgattgtagaatagagaaatatgcccaacaatataaatgagacattattgacccttgtctacttgatgggggtgataagtctaaagtcactatcaaccttccactaatttttaatttcttttttattcaaataggattttattacatattttagcacaacttgacttttatttattcttattttagtacagtttttggtacgtgtcaattcaatataatttttagtatgtatcaaatttaacatgatttttgatatactattggaataatttttaattttctttataaagtatgatatattttagcaatgtaatattaataactaaaattaattcactaattcaaaactattcaaaatttgtaaaatagattaatttttactaaaaacctatttacccctctcattctaaaaactgactctctctcttcctctcctatctctctttctctcgaactttgtccaaccaaccgaacccaccatctgagcaccacatggtgaggacgaagacccactccacccaccaccgagtcgacccaccatgaagacgaacaactaccaaggtaagatttccccctatggtattttgaatgtttttcttattgatttagggttaaaatattatttattgatagatttaaggtctgatatgtacattttggattagattagggttagatttgaatctatgatttctgctttagagaatgcattttctaggcaagctcgatgcattctcgatgcagacccgatgcatcgtgatgaaaaaattggatcttggttgaagataaaagctcgatatagaactcgatggggcctaatggccagtcaatttttctgaaaaatattcactggccattgggccccatcgggccctatcgggctctatatcggaccctatcaggccctatatcgagcatttgtcttcaacccagatccaatttttacatcatgatgtatcgggcctacatcagggatgcatcaaacatgtatctgggctacctagaaaatgtattttctaactcaaaaatcacagatt

SEQ ID NO: 299664 - DNA, 2748 bp, Cannabis indica
agtttatatatttttttttttgaaaaacaaagtttatattcattagtttctttttctctaaaaacaaatatatcggtatcaattttgtaataataaaataattaaacaacatatgtttaataaagaacacttttcctgataaaaaaaaataataaactccatatatttaatatttttataaaaaaattttcaaaaaaatatttttataaaataataataaaaaaaataaaatgtccacgtgtgaaatatatattcatggcgcgcgaaagtatcgacgatattctagaagttgcgattatatagcatgaaactatctcagttgaaacttctggaatcttctcctcttccacttctcgatcaatctcgattttcgtttcttataaattactcaccgaacccacttattcttcaccaaaacactctcatccacacacaaagaaaatatctacgtttgatcatggaaagtcccttctttagaggccattggagcaacttcaagccacgtccccgctactcaccttccgccagtgagatttcggcctcagccaagccatcaccgaaggtagtttcgatccctgtccattttgtcggttcggaaaagaaaagatccgattctgcattgaaggtccagaaggtgttccgtggattcttggtaagaaagagcttgaagagaattgctgcaatcaaagccgaagttgatgagatcgagaagagaatgtctcagaaagagacgatggtattgattcggaaagacggaaaggagcggttgaggatgaatgagactctgatgagcttgctgttcaggttggactctgtcaaaggggtggattcaggggttagggattgccgaaagactgtgattagaaaagcaattcggttgcaggagaggctagacgcaatcgtcaccggtggtgacgaacaatttcttgaggacaaagaaactgctgctgaatgtgaatctcttggtgatgatgataaggccgtcgatcatacaccagacttggaacgtgaatctgctgaggttgatccgagtcaagaatcgtctgccgataatacgaattcctccgaagtcgaactagatcgatcgcttgaaaaggaaggcgaagaacctgaaattgaagaagaagattgcaaatcggagctgaagaataatctcgctgaaccggggattaatcagaggacagccgaggaagcaagtggtgaaactctgaagtctgaggacatagctgataatatggaggcagctaaagtaaaggcggaagagaacaaagagagcaatgatacgatgagtgagtctggttcgtcaatcgatgaaaaaagtccaatagaagaagaagaagatacaggaaataagaaggaagagaatgagaataaggagaagaagaataagagcagtaaggagcttttggagaagatgatggaggagaatgagaagatgatgggtttgatggctgatctgtacgagagaaatgaagttcagacgagattgcttagttctctgtctcacagagttgaacaattggagagagcttacatatgcgataagctgaggaagaagaagatgaagcgtgctactgctgctcaatgtaacagatagtcaattcaataactatcttcatttgtttcttaatgtaaattttgattttaataaatgtgtaaggcattgttttttgtgtcaatttacaattttgattttaataaatgtgaagacattgtattattattttttttttactgtgtcaatttacaattctgattttatgttctaattaatacttaataatctcagttagggtgaaataaaaatttgagaactcaactagctatgaaggaactctgtaaaaaacagagttcttgagatggaaggagagaagagatggaataaaaatactgtgaagctcaatcaatatgattggctgttgaatcttttatttatatcggtaatcattacaagaagagttagttacaattcaactaaaacaagctgcaaactaaaacaagctgcaaaaaatagaaaaataacttagtaacaagatatttagttagttagtaatagtaaaaacagaaggccaaactaactctttaaccacctatatactatatacttcaataccaaattacactggtctagactaggtgttagtttgtctgtaaaaaacaaagattagcccgttggttttggggtccacatatcgaacatcaagtttaggggtgttcataaaatagccgatccaatccaatccgcacgatctaatccgcaaagtgcggatatccgcaccgcacttgtgcagattgaattggattggaaaattcaaaatccgcacttgtgcggattggatgttgattgacatgtaaaagtaactgatccaatccaatctgatttagtgagatttctctcacctagaaactcgagaccagacccctatttagaggacacgtatactcagatttcccaaagaaagctgagatgtccctgagggactcctcgaagttttaaacctcgcttaagatagaatcagcgagaggtagcgagcatgaccgaagtctaatctcatccgagacaagagagtagctcgcatatatcgaactatatgcgagtatcctccccgtgtccgtgtataaaccaggagaacgactctctgtaaatgcgagttggtcctaagaaccctgcacccttgataaattaatatagacttgcatgtctaggtcctatcagcccgtcatgcgatgtctgttgggttttatgcc

SEQ ID NO: 299665 - DNA, 2682 bp, Cannabis indica
taggatgttaatcaaacatacttggtagtaaatctagatcctggtaaaatatttccaacacaaaaatcattattcaagattgtaggtcaattagataattctattatgatagatgatgtcaccaaagaaagagataggcttaactaccctagaattctggttgaagtaatgatgaactaggattttcaaaatttactggaatttgaagatgagtttggctcgaacactcatgtggaagttaagtatgaatagaaaccaacatgttctcattgtgctggtatgggcatttggctgctgattgtaaaaagaagtcaaaacccaagcaataatgggttattaaaaaaagacaaaagaaaggcccctgatgtggttcaagttgatgaagagggatttctgaaagttataaaggggaaaaagtaaaggaacaagagaagcctgttgaaacaaagattgagaataaatttagtatgcttgcagattctggcattactaatcctggaattactgatgatgttgcaaatgaacaagaagatcgagagagtagtaacaggtccaaaacaagagagggggagtaccctctcttgtcaatggataagtttctatgttggaacatccgaggagccaacaaccaacaaaaacaaagactaataaatcaatttattagggcacagggtgtgggttttgttggtctccttgagacaagggttaaggttcaaaaacttggagccttgtacaattttttttatggatggtatttctctactactgaagcaaccttcttaaataaaggcctttttgatcattccccatttgtgtaaaccttgtatcctcaatgtacagggggaagaaactatttaaatacttcagtatgtggaaaagtcatcctgagtatgaaacaaagctaagggagatttggtcacagcaggtttatggaactaaaatgtaccacgttgttagcaagcttaaagcccttaaacaagtcttcaagaagatcaataggaaagggttttcaagtttacaatcaacagcagtgcaagctagctctaatcttgatgatattcaggggaaattgcagcttaatcctctgaatcatgatctgatttctacagactagaagctagagccaagttagtcaaagtgtagaaagattacttgtctttcctgcagcaaaaagccaaggcaacttgaattcaaaatggtgacagcaatgcatcattgttcatgcaagcatcaaacagagaataaagaaaaaccagatcttctcaattgaataacaagatggaactagagggaatgagccacatcagattattaaagcctttgtcacatactataagtccttattgaggtcccagatggaaggaacgaaaagggtatcatctaaaatagtcagaaggggccttgtactgtcttaaacacaggctaatattcaggtcctgatggcttttcaagcttctttttccaagataatcggcagcttctgagagaggacctttactatgctgttacctcctttctggaaacaggtaaaatcctcaaagaaataaattccactgtcttaactatagtgcctaaaatcaaatgtcctaacactgttaaggattttaggccaatagcttgttgtaatgttatttataaagttacaactaagctattatgttctagaattaaatccatcttcctgatttggtctcccagaattagggaggcttcatcaaaggtaggcttataggacataacattatgatatgtcaagatctagttaggcactatggtaggaagtctaataaagttagttgcatgatcaagcttgatctacaaaaagcttatgacactactgaatgggacttcctttgaagaaatgcttcatgacttgcagtttcctagtacattcattaacttggtgatgaactgtgttcgtacacctaaattctcactaatgtttaatggatctttacatggattttttgaagcaagaaggggccttaggcaaggggatccaatgtccccattgctttttgttttagggatggaatatctttcaaggataatggggaaaattggagaaaaacaaggatttcaatatcatgatagatgtgttcaaatcaagctcaatcatctagcctttgctgatgatgaactattgtttttgtaaggggattttagaagtgtctactacatgttatagggcctcaaactcttctcccctaatccctccaaatctgctacatatagtagtaacatggccagggatgagttggaaagaatagttgctgcttctagtttctctgtaaaagagatgcctttcacttatctaggagtaccaatttacccaaagaaaatctcaagaaaagagtgtgttattttggctgataaaatgacagcaaggattaaaatatggagcttcgggaacctttcatttgttggcagggtggttctcatcaactcagtgttgatggccatccgtgcctattagagccggatcatcattttacccaagaaagtggttcaaaacattgaggccatttgtaggaactacttgtggaaaggccaatcagtgtatcaagggtgttatagtgagatttctctcacctagaaactcgagaccagactcctctttaaaggacacgtgtattcagatttccaatgaaagctgaatgtccgtgagagacttctcgaagt

SEQ ID NO: 299666 - DNA, 1477 bp, Cannabis indica
tattatacacacaagcttataggatagatacttattatttaccaaaaacagaaaagaagaaggaaaaaaagggaccatgtgaaagagagagagagagctaaataaaaaataattatatataagtagcattggaattaataataataatggagattattggagagttaatcaagtcgttggaagtcattttcaagctcaataataattctaaagtttattaatttttagggcaaaaacaaaatgaagaaaatggaccaaaatccaaattgtacgatcgatttgtgttgaaaccttatttgaacactattaatcactagtgtttaaatagtatcgaataaatgaatagaagaaaaaaaagttatggctctgcatggcctctgcgatgtgggcctttgatcatgatcgaccaaaatagactactagggatctattaatgtacacatatatatgtatatataggctgttattatatatatatatatatattgctgttgtttgaatgtgcatgtaatgaatcaattctgatgcctcaattatgcatgtccaaagttactttttaggtacatgttatatgatattacaaatcttaacaaattcacttgttaaagttagccctaacttccatttgaaaaaaattatccttaaattcacaatgtaaatctttaagttgaatagttagtcgagatatactttagtcgactgcatgcatgtcttaacttactccttaaagctagtggtacatcttttggcacaactttgaggaaaaatagtatcgaacaatattaaataaaggacatcttaaacactcacataaaatgtcatattaaaagggaaatttaattttatatgtatttggctaaaactaataggaaaatttaaatatttatgcatattgtagtttaaaattaataaccaaaacttaacttacttataatattggtagaataggtcaatttttatgtatataccacttatttcaaaattttataatatctctctatttccctcttgttctttctctctctttccctctcactggttctcaatgaaaaatctaccgaaccccactaaaggatctaagactaagaccatcgcaatcatccgaccgactccacaccaatctgaccaatcgagagggctccatttcagttcgaccgagacctctcccatcccttcctcaaccgtaaacggagagaccatcgccactaacgcaaaccacaaacacagaccaggaacggagagaacatgaacgaagacgttctctgtaatcttttggttttctttattattttgttggtctgatagtgtccgatataggcccaatataggttcgataggaggttctaaattttaagtttttgaggttaatgaagaaagtccgatagtggttcgatataggttcgatggtggtctgatgtgttggaaatcttttaccaggatctatatttactaccaagtatgtttgattaacatccta

SEQ ID NO: 299667 - DNA, 3508 bp, Cannabis indica
aactgaaaacacaaccaaacaagctcttagtgatcttattatttacttttgcctcttttctgcataagattaaaaacagtttcttctattaatttataaacattattattaggtaccagtaaagtcttgtacctttaaatatattgtcttagaattggttagcgatacttttcaaaatttattatattaaactatacgagactcgacaattagaataataatattaacatagaaagagttaaacacactagtgtggtttaacatttctctatttttatatatgtaaactgattatggattcagtgcgcatgttgatggtagattcttatacacagaactcgaagcatgactttggaaagtttattattggtatttgagattagtagggtgtattgtgtattatagattagggaacaatcgcaagctactagctagaatgtaatatttgtacttttaacgatttaacctatgtttgtcaaaatatggtaataattgtaaatgtaatttaataattacaaatttaaaatctaccagttctataactaaactagaattatacgattcttacattaaacaaattataattatagttgatatctcacctttcagaagtaacaagactcttgagttctagaaaaaaaaaatatgactacaatatctaatttattaaatttacaatcaaattaattattctttaacactaaaacgaaatatcacaactctaatatacaatcaatatttataacacccgtgtacaaattatatcaggtttaagtgttcatacaatatctaactacaaaataagtcatcttattattattcgagtatttgattcttcacgtgataaagattatcaaataacaacttattcatcttcaaagtagatcactaaatcatcattatcataaaatataggaaatatactatatcaaataacaatataaatacattattattctcaatgatctctcacataatattaattatcaatcatatttcgaattgagcttttgagaattacaattttctatattaaatataattaatattcaaatcttcaaaatcaatgtaatacaattgtaacaatagaatttgtaagggtgaatggattgaatttgatcctaacgttggccaaagttggaaaggtaagcttgagccagtttatggcccaattcaacctgggccttagtggttaggtggagattatcaaatttgagctccaatccctttgcatcaacacacacaacatttgcgaccttcattaatttctccactaatatcttatccaaccctgaatttattgccacctgtaaaaatcaacaacaaaaaaaaaaaaaaaacatttaaaagaattatctcagaattatacaaaacaaaatttgattaatcacctgaataattggaagtgaaggcaaacaaagatcatcacgaatattctgaataagcctctccatgttcccctggtacgccacaacatcctcctccgatgacgtgtcactctctccttggtaccacaacaacgctcgaatctcacctcctcccttcacgctctctttcgctctctttatcatatcttcgtagaggtgttctccacgcgcccattccttaatggccgttccacccacagcgcagggcacaaggcccagtgggcctaattgggccaaatgggctctcactgcgttagcgaacgccattccaggcccaaccccacaggtcttgttggtgtcgatgtctgcgtggagaggctcacgcgcggtttcccaatggagcttggcgcttaggcggaggatgtgacgatcgggttggcattccggcggaacgacgccgtcccagatgaggttttggttaactcctccgcggcctgacatgttgctctgacccgataagatgaagatttgcttatttggtttgttgatttctgaattggccgagcctggaaggaggagaattagaaggaaaaaacaatgggagagagtaatcatattatttatttaaggatacagttagttactaattaaaacactcactgatttctgggttattatgggtgtctgaattagatgtttccgtggccattggtaatgggtgattggaatctttgagttttggggtcgtctctgagctcagatctctggtagtgaagactttccgttttatattcatttaattattttaataagtaaagtaagtaatcgaaatatgctgaatttaaaagaggctttcttatttttaagagcttttcggggttaaacacttttaattatggttttaattatttaaatttaaattttaacggcaaaattcttcaaattgctgaattagtaataaatttaaaatatcatttgtgaaaaataaaatgtacacataaacaatctaataattaattgtgaaaaataaataacactttgaatttttcaatttataaagttaagtacaaataaagtaatagttacaagaattgaattgcaaaattattaatttttgaagtttgaggttaattataattttatttttaataatttcaacctttgtggctgggagtgggaactagatggtagatctgtctaagcttctttgtctagctagttgctaataataaaattaagaaagattataatctatcaaatatatcctaaaaaataatactttggattaatcttatttttgtgagctgtagttgtgtccaatatatgactattaaatgagatggatgtgttgctacaagactcttggagcatgagacattattttcatttatttttttttgtccaaaaaacaattttagatttctttttttttttaaaaaaaagacctatttatttagttaatatttttgaaaaatagtttgtagattttttttttttttttgtttaatcttcaataattcagttcctcacacacaccatggatacatacaccgactcagatttaatgagacctcgacatgacttcaaatttcaacctagaccttaagttagatcctaaccccgacatgaggtaagatcttgaatcctaatctcaaagcctatcttgagactcggactccaatcttaactccagaccttgacctagattcataccccaacttggacattaatcctgaccccaacttgtggtggtgtaccctctctaagatctgtgattagaaaaaaattccatattgaggacacaagttgctctctatgtggtacgagggaagaatccatggagcacttgttcctttcctgtgatgtggcttttcacttatggcgatcttcttcttgggatatatatcccgtttgtgatacaggcatccgagtttgggattgggtcaaattcatttagaatctaaagcacagaggagtccaagttgaggatgtttttttatatgcttcgattattgtggatacaatttggagcaggttcagagccacagccaaaagaagagtggccatggcccctccaaaatattttaaaattctatgttatatatatataaatatttataaaataaaatatgtataaataa

SEQ ID NO: 299668 - DNA, 3027 bp, Cannabis indica
ctactaaccatcgtcgggggtaggggtgggtctcgtcagaagagctgtcataacaaacaacacattagtcaagtacttaaaaaaaaggaagactgatgtaaataaataagaagagaacaatcacttatggagtttgcgaaatgtggttgtgccaatgggggaagaccagacgtctagaagaagtcgtccttgaaggacaccttatttggcaagtctacgataattttcggctcgctagcatgagtgccaagatagaaaaatccccctgcagcattcttcgtcgatggaacgactttaactgagtaaagatactcaatctctactggcgtgggacaaccccaattcataattttgtataagactttcaaactagaaagaatcctacaagaaataggattcagctggaatggggcaaccccgatgtgatttatgtaatccttgaagtagtcccgaagagggaggatggcccctgcacaaatatgctcaaggttctaagcgcccatactagttgaaccactagtactggtcttaccactggttcctgggttactactggcaaagcgtgcagggggtagtactacattcaccctctcgtactgacctaacctggcatgatttcccatgtgcaattccacatgtcttcagcatgtcgcccgtgtagcttgagatagatcgcagcttcgattctattaactcagcttcgaaggtgacgctgggatcttgaggagttttggacatacgtggtttggtaggcttaatctcaaaatctaagtcacccggttcaaaagaaattatgacgttgggtaaaaataaaggctttgcaacaggaataaaggatacgttgggtggttatggccaggcttcttctcgcaagaactaacgtctacctttggatatttcttggaagaagcgcctgtggcgactagaaatatcttcctgttgggttctcaatgtgtgttccctagccctagcatcgtttagctctaatttggaggtgagttttgagggattgtgtttatatgggatggccaattctgtacgaaactcaaactctaaagcttttggatgataaattcttgaatcagagtgggacattgataccctaattcaagcagaatgccctaaccctctacagttccaagtaaggcctctcatggctcctgtggaggagatatgacattctcctccacaggggtatgagagtgggcagacaaactagagcaggattcttcgatgacaaaagtgccgataagcgggttcttcaagacaccctcagtgtgactcaaggaatccgagaggtcttcagaggggtcttcataggcaaccttggtcgcttgatcttcctctttctcgttggtgtcccatgggaagtcgaggaaaacgcgcaggtgtttttggataatcttctgaggtcttgagcacagagaatagaagtctccatacaattttcttttcttgaaaggagtggtttgaacattagtctcagaagtggttttaacaccaatgtcacctcccaaggacttgatctcaaacaaatccatcttcccaaattgctttgatctttcaaaaaaatttcttgggctttaaaaaaactagataaagccatttcttcttgacacagagaatgggcattctacaccccaatgtcatgacccgcaggtcccatttcaccacccaaagcattcagccctacattcaaagagcaaataccacttaactgcccaccaactattgggcccataaaattagtctcattagttaaaaccgccccattggtcaccacatcctcctaacctaagacccctggcccattaactgggtttcaataatcaactggcccattagaaacaaaagtcagcccactagcaacccttacaataaccttactatcctccatttcatggcccactattcttttatcatttaaaaaatcaatttttccccagcacagtcaacaaggatgtcttctaaaataggaaaagaggtaggcgacatttccttcctcgacatacgaacatcaaccccattacccataggggaaatgaccaactcacgacacactgaccccttcctgggtttccaaccagctctttgagcagctctctgaccagccgaaccatgatcactcaccatccacgcacgcctcggacctcgaccagtcttgggaacaggggcatcaacttcccatcaacaggatttgaaatcgtcggaggaggaagagccttagacgcttccagcgtagccaccgtggatcccaatcgaggaataggctgagctccagaaaacacatcttggtaggaagacgccacggaaatccatgggccgtacaggggaaacggaacaccatcgcaactcgccaccgtaaccggggacgacagagaataacctcttctctggtgggcgagacacccaccgttataacaaaaaattctaatcttttcatatttgaactggagccaccgtttgacacccgagtacagatcaaagtaacaccctgaaaccagaggtttagtaaattctaaatcaacttgcactctgagaaacacgttccatgaagctggtttttcctcgtccaagtccatagtcatcgctttaccagcaagtccacccaataggttaccattagcaactgagaagtattcgtgtggtagattgtgtatttgcacccacaccttaatacactcgaagataatcggtctagcaatgctaggagtctaggcctgtagaaagagagagtacccccgaacgcaccaaggaccattatcaaaagcccagtaaaataggttttatggatttttagagcctgtgtagatgtacttttagttttcaatttttaaaattgtatttagaagtaagaataaaaaatagttttttgtcattctaaaaatttaatggtatttggcataaattttttaaaactatttttagattttttcttactaaaaaaataatattttaacactataccatgacatgaacccattcaggtccaagttcggatatagttccgggtctaggatccgagta

SEQ ID NO: 299669 - DNA, 4786 bp, Cannabis indica
tttttttttttttggtctttttctcctctcctattggtatgtgatctgaaaaattttgactctaatgattctttagtttgaataattgttgtattggatcgagtaatttctgagactgagaaaagaaatggatgaagagtgtgtttactatgttttaagtaggtggttttcatacattcttttcttctatcatactcttctgtaacgaatcacaaagatcgaggaaagaattggattaatagtgcattttactaagtttagctgaattttgatttatgtcggtcattttcatgctttttcttttctcctatcatacttttttctgtgacgaataacgtatatttgtggtaagtatagtacattgtatagtatgtatattgaattgtatatatacatacatgtataacaacgaacatgtcatttgagatgggtttctatgtgatttaattcccacaacttggtgatacttttggataacttttggttgatcattgatatctttgtttaaagatcagtttttggatccctagctcgttttttcagtggttcatttttgtgtaagtggtgttaaatgaggagaaagatggacaaatattactggattatgtagcttttgttttgatcaatacccaattaattgtgatgcttaaaaaatatgacataatgggtactagcaaaacgaggatctgtgatgggattattgtttgtgtgcttatgttaaacttgatttgcgtttttcatatttgagttactgtacatttcaggagctagatggcgaaaggaaacacgtctgatggtcggactaggagctccgtacaaatttttatcgtagctggtttgtgttgtttcttttacatattgggtgcatggcagaggagtggttttggtaagggtgatagtattgctcttgaaattacaaaaagtggtgcagaatgcggtgtgattcaaaatttaagttttgatactcatcatggcggtgatgctggaagtattgctgagtccgaatcgcaaactatggttttcaaaccatgtaatcctcgttacacagactacacaccttgccaagatcaaaagcgtgccatgaccttcccgagaaatgatatgatttacagagagagacactgtcctcctgaggaagaaaagttacattgcttgattccagctcctaagggatatgtaactccattcccctggccaaagagtcgtgattttgtaccctatgcaaatgcaccttataagagtttgaccgttgagaaggctattcagaactggattcaatatgaagggaatgtttttcggtttcctggagggggcactcagtttcctcaaggagctgacaaatatattgaccagcttgcctctgtaataccaattaagaatggcacagttaggactgccttggacactggttgtggggtacgtatgtttcacatactttttatctgtgtgatcttcgttataatgatattgacaatggttggtactttctttttttaggttgctagtttgggtgcatatctctggagtagaaacgttattgcaatgtcttttgccccaagagattcacatgaagcacaggtacaattcgctcttgaaaggggtgtaccggctgtaattggtgttctgggtactataaagcttccgtatccatctagagcatttgacatggcacattgttctcggtgcttgattccatggggagcaaatggtgaggattgtatatgctaaaattaaaacaataagacatgttgttatcttagccgtattatattttaaattaaatttgtatcttatttttgcaggtggaatttatctgatggaagttgacagagttcttaggcctggaggttattgggtgctttctggtcctcccatcaactggaaggcgaattacagatcatggcagcgtcccagggaagaacttgagcaggaacagagaaacattgaagaaactgcaaagcttctctgctgggaaaagaagtatgagaagggtgaaattgctgtttggcaaaagagggtgaatgctgaatcgtgcagaagcagacaggctaccctctgcaactctgctgatccagatgatgcctggtatgatttctttcacatgcaacccaagcattattttggtctgagttcaaaatacatacattttacccaatccttaagcagctagcttccaaattctcacttgaaaatttaagtttgatttccgtttcagtaatatgatagtatgtaagttttcttattcgtggtgattattaggtataagacaatggagacatgtgtaactccatacccagaagtaaacagtccggatgaggttgctggtggggaactgaagcctttcccagcaagacttcattctgttccacctagaatttctagtggatctgttcctggtgtttctgttgaggattacgaggaggacaacaaaacatggaggaagcatgtcaatgcttataagaaaatcaacaaactacttgacacaggaaggtaccgcaatataatggatatgaatgctggtttgggaagttttgctgcagcaattcactccccaaaactgtgggttatgaatgtgatgcctaccatagctgagaaaaacacactgagtgtcatatttgaacgagggttgattggcatctatcatgactggtactgtatttctaaaatctccgtcctgtctaaaataatgtagttcccatctatactttttttctgttaatgatagctggtttagatttgaactaaagtttggttacttggaaacaattttctcatcccatgagaataaaataacaatgaaaccgtgtccattgcctctttcccctgtcactaactttagggaaatgaaagggacccaccttttagaggatatatccactcacttcttaacaatttttcatttctggtatgactggtgtaggtgcgaagctttctccacatacccgaggacgtatgacctcatccatgccaatggtgttttcagtctatacaaggacaagtaagtattcttcaatcaatttacacgtttcaagtattgattttgctcaacatgtcaatcatttcagacatgatcaaccttaagttagaaaggtgaaccctaggctggcttcttttgttagtacaggcctgagaaatcacttaacaggccaagtagaattgtgtgcatagcagtgttcattaaagaatctacttatcaaaatctgaaagtgaatatgatggacagatctaatatttgaattttgtgagttgtgacgtaatttagttgttgctggataattatatggtgcctggctcttaagatcgtatcttccttgattatatagagtcaataattttccttttcttcatatatttgcacttttatcttttgcttctctaacttatgtatccacaaattcagatgcaatgcagaggacatccttctggagatggacaggattttgcgaccagaaggtgcagtaattttccgggatgaagttgataccttaattaaggtgaaaaagataattggagggatgagatgggatactaaaatggttgaccatgaagatggacccctagttcctgagaagattttggttgctgtcaagcagtattgggttgcagatggaaactccacctccatccaatgagatgcagatattgaaagccttgtcatggttcaaaggttgtggacaacgaaactctcttcatctcgagtgtgacacactttgattacttccctggagcattttggggtcgacgagtaacgacagccatacgattcatgtacgtgtacgactagtatctatgccttgtttaattatttatttatactagtttctttagagacataactacaaagttaatggccgtaaggtttatggtattagttccattttttatatgggtaaaattttgatcgcacggtcccttaaagtttcaattgttatgtagtgtgctgttttttttattttcatatttgttattatttttttcgcaagagacaacgttcataaaagacaaacaaaatgggatcaacagggggtgtccctccccaacaagagttctcaaaccagagaatttgattctagcttcaccagctaggttgtttacacaactccagagaaaaattacaaatattaaacttcgcaacatcattaacaactgagataaagattctgtaacattccaattagggagcttggaagaataagactgtaacaccctaatttatagagataccacgtgggtgatttaggaaatttaaaatttcatgcttaataaacccaaaaattagtatcctaaactaatactatgtatcatttgtaaaatgagattacagttttagtagagctcgactgttgtcagttgagatgacagacgttacggtagagctcaactagatttgctcccgatttatatttttaattgtatttatatttttaattgttaaaattttttcatcgatgtttactaaaatagtgacattcaatagatatgataattttaatagagctcaactagctcgaccaaacatggtcaaggtagtgttaatactcaattgttgttaaactctttgatagatacattgataaaatttaattaaatttagttgaaaattgaccttgttaattataattttaacatcaatatattttaactattttttaatatcaaccatctatttttatacagtaatgacttgaatagtaatctatgttcagtatgatggagagtggaaggatgaacatggtcatataagtggtcgccaaaaaataaggaagttatatctataattgtcgat

SEQ ID NO: 299670 - DNA, 6655 bp, Cannabis indica
cttttatgctggtttcgtctcttttgctgattttggaaagtgggtttttacaactgaggaaaaagatttgagcttggagtttgggatacatgggtttttgcagatttaaggattttttactagagtttgactgaaatgacttgaggtttgtgttctattccatttctgatactaattgctttttaaggataccaaattagggcgttctgtccaagtttatttgaaaatttgaatgagcaatgtaggtgagattaaatgtgtttttgttgtataatttgtactcagttatgctagctaattgttgttgctttgttcttggttcatttcaaattgataatatttttttagagtttaaacattattgcacatttaggattcaaatatgacaaactctaacccaagtatggatatgggctgattttgaattgcacagttgttttaggtttataaaaaggaaagcatggaagttgagaaaaagcgttcaaaggggggttttcttaacttgtttgattggaatgggaaatctcgtaagaagctttttgcaaataacttggaagagttacctggtaacatttcttttctcattgatttttatgctatgcccatgtttggactagtttctgttatttttttggttgagcattgtgattcatttgtgttctaaaatatcttgtctttttagttgcacaagggtcaacacaagaaaaagaagatgaggagaatttccccaaatcagatgtttacaaggtgggaagcaaagcatctctttttctccttattttcttgaactgattgttttgatatgtttcttatgttgtttgtttgtaataattgttgtattttcaggtagatgtggatgagaatgacgcgagttcgagtaataaaggtagtaatgactggacttctgcttcatgggcaactagtgatgatggtggtgggagtaaagctcctagtgtagttgctagacttatggggttagattcattgccaagctcaaatgttgctgatccctcttctagttctgctcaactttcagaggtgtgcttgcttaaagttaaatcagctcatcatggcaagactaatttatggaatgatttttattccatggagggtggatatgtgcccaagcatgatacattttgtaggaaccccatagaatctaggccgttgaggcagcataaccggcctattgagaggtttcaaactgaagttctacctccgaaatcagctaagtcaattccatttactcatcataagctattgtcacctataaaaaatcctgggttcattccaacaaaaaatgtgacttacattatggaagcagctgcgaagatgattgagtcgagtcccatggcatcttcaaagagcaaagtgaccagcattggggcttcttcagttcccttgagaattcgggatttgaaagagaagatggaagctgcaaataaagcatctgagtctgaaaatcgcaaggagtctggttctttaaggtttaataaagcacagtataggaataaaaccacaaatggttcagaatatgtgctagtaactcgggcttctgtggattctgaaaaacggacttttaacaactccagagataagggaagatcattatcacttgcccaacaagcgaagaccaatgtccagagaagggaggggtcaacttcatgtgacaataagaactctatgaaacagaaggaacacaaggaagtgaagtcaaaccagttacacaagtgccaatctagcttgcatcgatctgcacagaaaagaaattctgcacagagcagtaacaatgcgctcaagcagaacaaccagaaacagaactctgtatccaataaagataagctgaccgaaaaaggttcagcttccaatcattcagccagaagaactaggtcctctactggttcaattgagtcaacaaataagacagtgaataagggtgcagcaaactccaaaactggaccccgaaagatgggttctgcaactgctgcccagagagatacatcatcatccacagttaaaaaactctcccagaagaaaaggtctgtttgtcaggattctaatttagaagattctcttgcagataatttgccaatcagtgaaggggaaaggtcaataaaatgcaatgtcactatggattcatgtaccaatatgagtgcagataacagaaagcaaagcatggatgtaatttcatttacatttaactctcccctgaagaaatcccctggtgattcctggtcatctggtcaagtcatgatggagaagagatttaactctattaatgacaaagatcctgatctctactcgaaaagcttcacattatcttcccctggattgaatgtgataggagctgattccttgagtgtacttttggaacagaagcttcaggaactagcatctaaagttcaatcatatcaatcaaatggtgtcagagaggagagttctgctagttgtgcatctggttctcaagatttcaatttgccaagcaacacatcaagaggaggcaagcaatttcaaagggatgacacatacaactgtaattctccttctgttgatggcccaatgaacaatatgaaccagcagtgccaggtttgtttcctttggttatgtctttctactgcagtttggcttcttagcgtctttgtccttgaatttaaacctttatgcttccaccatttattatgattgcataatgagattttgctcagtctagaattgttagcatagatctatagaactcaaattatcatctactgcatcaggaacaaaccatttgagtccattattgaattagcaaaatgtgatattcaactttcaattccattatgtatttatattatgcaattagagtcatgttattaatattttctgatgagtaatgtaatgttgtaggacacttactattcattttaatttgatgagtacaagctaatgagctatataggatagaaggggaaatttataaaacctataatattagggactaggaaactatagcaattactatgtaggagagacttgtaccttagattgtaacctcgcgggagcaaaccacatggttgaccattttatacccctaagtcttcttgggtaagtgttaaaaataatttacagtttgaaggaaatcaaatccttgtatatatgcactgttggaatatattagctaagaaattaggaattagttgtaattacttagtttcgtaatgcaggatgttctattgaataaaacacataatttcaattcactattttctacatgcacatatgattatgaggtgattgtatgtaagtgttaaaaagtcctcttgggtaagcgttaaaaacaatttgtagtataaaggaaatcaattcaaatcaaatccttttatatatgtacatataagggttaattcgagtgattagattcatgatttgctctaaatggagtttgattctattaattaatgtgtacgattttgcgcatcaatttgttaggattttttggtttcccaaaggttgtagtaggcttagggttcagtaggaagaactcaaatcatactacactatacttgctcaaaatacaataaattttagttttaaacaagccaaaatttatgagttaataacaactaatatacttaaattgtataaagaataagatctttttcagcttcattattacttttcatttatagtagtttcctttaatctattttaaactcaactttccttatttactttgtgccatgcttcttcatttctgctttcctttatttagtgttgctctgcttataatacaattctttagcagtaaaattcaggctttttcttctagtttgagtttgaactatgaatattttctgctggcaagaacttcactagtttcttttgcccttattatttatgagatctttgttatattaattcttttgcattatgcagatgtttgtaaatatttcttgctaaactaatcaagctatgttgaccactttcagggatctgtaaggatggaagagcctagtgtaagcagcaacaaccgtgcaattggaaaacgattggattatcaagatcttagtccggaatcaagttgcgaatactcattcgaaagtggaagctctgcagataacagaagtaatgccaaaggtaccaccatttcttcaatgtgaatcttgtttgctcttaattcaatggaagaaaattctggtagaacaaggaagatatacttttgtgattgttgcaattaatgggatgggataggactaaatattgtatagaatagagagatggtactaacaattttgtcttggtgcaatggtgcataactatgttctttttcaatcctcatatgataagacattttgatcttttaccatccttacaggaaacaagggatgctcggtagctgaagttcaaaccccgtcacatggcgagatagaatcatctgactcggtctttttcagttccacaaggaatgtcagtgtaaatcaagtgaatagaagatttggttttatagactatgatagaccaagcaactgggaactggaatatgtgagagacatagtcagcaatgctgaattagcactagaagattttgcattgggatatgctaacaaggttatctccccaccaactctatttgatgatctcgagaacgaggagaattttacagaatggaatgaagaggagtgttgctcaaagctcggacgaaaggttttgtttgattgtgtgaatgaatctctggaattgagaagtctgcaaatgttaatcggaacatgctctagaaaaggtaggctggctccaaggaaggaatggttagccgaggaaatccacgaagaaatctcggtttggaaagatatggcggaattgatggtggatgaccttgtggacaaggacatgagcacagggattggaagatggcttgattttgacaatgaagcatttgaggaaggtgtagagattgaaaagggagtgttgagttgcttgttagatgagttggttactgatttaatggtcttttaatctacccctgttggtgttcttaaactcaaactccaatgggggcttcatgcatcaagttgaaagtctcaactgattgctcttgtattactttgcattgttatccaagtttcagtacaatattttctcttctaaattgatctaaaatccatagtgacacattggtccccttccctagtctctacttgccaaaatttatgtgaaaaatctatttatatgctaccaaatattataggatgttttacaggtcactcttgattttagttggttttttttatgatattgtatattatagttatttaaagtattttataaagttttgagaaattcgtaataacacgcatataaaataaaagagacacacttgcaacagacagtctgaattttgttttcagtatgttaaattgttttgaatttttcgaaaatttgcattatctcttagataactacaatatatactgtcatagaactagacagtctgaattttgttttcagtatgttaaattgttctgaatttttcgaaaatttacattatctcttagataactacaatatatactgtcatagaacttgagcatgagtaaaaaccacacccgaactcgcttgatgaagctgatcgggttggacctgacttgcccgtaaaaaataagttgtttcacatagttgagttctacgtgtcgtgtttagggggttgatcgggtgcaactcaaactcgacaaaaatgttcagtcctacagtactacatagactttctcaatattataagcctaaattgttgatttcatcatataaatagtaaccccaagtatcccaaaataatttgggcctagactagagatagagaagccatttaggcatgactcatcttgtagctcttcaagaattggattgagattgtgtgtcttattgtggtatggaaaaaaagaaatagtactattcttcttgttgaaggttccaatgaaggtgtgttttttgtttcttgggtagtaggagttgtaggaccatgtaatgtaatgtaatgagagttgtccaccaatcaaaccatctatctctatcttttaaattgaacaaagctgatttattatgattaacattatcttttttctaaagaaccagcttttttcaggctggagacctcatcaaactactgcccttcttctcagggtaataaggcttttaaagattcgatttgtcactcataattcatcaccaccatgtcttataattttatttttattttttattatttatttttatggtatcaacatcaaatccaagatcttggactagtgaagacaagtgtgacatcattaaataacattgctattaggtaaatggtgaaatattctataatacttattaaataaggtgatatcttataaattgccactgatttcttatattaaattatactaatagcaatatcttttttattacctttttgaatattcatgatgtttgtaataggctctaagttattagtattaattattgtaatagatcttataatagtattgcgcatgtcttggtctaagcttactttcactaaaattagtagtttagtttggtagccaaaaaaaagtccaatttatatatagcggatactatatttgaataacttctcgctcccacattttttagagtacttgttacttagtagttg

SEQ ID NO: 299671 - DNA, 1031 bp, Cannabis indica
aattatctatacacaactacgtacaagaattctcgtcaaagatctaaaagccgaggagatcgaatttcttgccaagaaagatgacaactaagaagatctgtttctggctatttttcttatcttatctcctgaagatcagtctttctatacaacctttgattattttcacattaatgatgtccaatatatttataataatttctttgagtttattatgatataatatatgcatatatatatatatatatatatttgcagctagcatatatatattatgcgtgaacaatacataagtcaacatgagaatttgtcctatgtagtttttctaaaatcgaaattattttaatagtaacaactatatgtcctgtgcgtttgtttccctagttaattattccaatttatttatgtttgccaccgtttctttgcaacactctctaataataattaatcaatggtttagttttttttttttttaaattattataatcaatggtttagatgaccactatatcatcactgtataaaatatatagaattaagaggtatctttaactctaaattaattaatcaatatataaaacaaagaaacatatagtcatatgaagaattcatcgatgatcaaccgaaaaatgatcagttttaattagttttaagtaataagtatgtacctgaaaaacaaaaccttgacctattcttaaacctaataatgactacataccgcaacagtattattttattttttatgagatcgttttcaatgtccttttatttttaatttttttgtaaggttgtttcatgttgacatgtagaatattatatacgtgggaatacttaattaaatgaaaggattaggtatgactttttgggacggaaattatataaatacacaaaatagatccaaaaatttatgatttatatctattctatataaagtgtgtctatataacagaattcttggtttatgagaaattcatggtgactttttatttatattaaaaataaaatggtttattaataaaaataaaatagtt

SEQ ID NO: 299672 - DNA, 984 bp, Cannabis indica
tgctaattgcatgtaaaaaagagatatacatatatacctctgcttgaaactgttgatagccctgaacagatgaagaagaaagcattttgattgcaacttcagtgttatcaatgaagccatgataaactgttccaaatccaccttttccaataattctttcaaaattgtttgtaaaattcaggacctcagagtatgtaaattgtcgttttttggactcaattaaaccaaattggatctctggctctgatgttgcttggggttttgttgatgccactgtcataattatggagacaatattaaatagtaaaaaaaaaattgtattggcttttaatatataattcttgaaagcaaattaattctcacttaagttattacaattattattaccttgcatccttctccatttgaaaaatagaatagcagctgctactaaaagcaacaagaccaacccaccaatggatgctacaactggaattataatattgctactattctttcgcttgcatgtagatgaggtacaatcgtcagtgttaccagcactatcagtactatcgatgctacaaaatttataaatgaagtcctagtcagttattttaagttgtaaaaaagaatatatctttgcttgaattaaaaattaatctacaaacaatgccaaagtactaattaaatatacattatatatatatatataattttctcatctttattaaaaataataataataataaattttacaagacatttaccttagtgatagggagccactttttgattttgctataagccctgctggaatgggacctgtaaacttgttctttgccaagtttcttgaagaaaaagtaaataaattaatatatacatagttttaaaaaaaaaaaaactaattaattgtaaataaaaatactttcctacagctttttattaattaattaacaaaaagtcatgatcaacatgagttgttagttccttacaaaaaaaaaaaaa

SEQ ID NO: 299673 - DNA, 971 bp, Cannabis indica
taattatttcaaagtacatttgaatctatagtcaaagcccaatagaagaagacttggaagaagcatacatcattcctagacaaatatgatgatagtagttcgatagttaattcaaagagagtaaatcaaatgtttacacgttctattgagggtaaacatccccctagtggtgtcaagaggaagaatgatgttgttattacgatggaggagagaagagtgaagctgaatatttcacacattctattgagggtttatttgttaattaagacactttgtgggtttaattaatgaatacatttaaattttatttttgtttgataattatttactgagattttcggcaatcgattataagaaagtgaaagttgagaaagtaaattcaaagtaaagaaatggagatgataatttttacgtagttagggcgttaaagagtcttaatctacgagttagttgtattgggctaaatagccttgagtgtattacacaagtgttctttaaatagattataagaaccctagactttggctatagtgtttgaacgacaatcttccaacttcttacatgaaggtataatgttgtgtttgtaggctaggatcgagttatgggtatacccgtgacccactagggtttgcattaaacttaacccactaatggggaaaatatactgaatagtgacttaggctcatggaatgagacccagctcgtggggacaacttgaagttgacaggcagcatgcatgcgcaatttctgtataatattgcataagaatgatggttgttggacaaagggtatgctccccttggtggtacgcgcactctttcagtctgacactgtgcaaaaggccctgatttggtgggattcagtgactgaggattgccacagcgacagccaaagtaggggtgttcgtagtgcaggtggtgcggttttttaacattttttcaaaccaacccgcacatgcagtttttccaatt

SEQ ID NO: 299674 - DNA, 1551 bp, Cannabis indica
ttttagtttttttttttatgaataaacctcatatattaaagaaaacaaaacaaaaatagagttcacatagtagtcacagaggggactacttcccttagcatagtcctcacaaaacaacgattagctctagcaagacatgccaaacggtctgcaacagagttctccacatgaggcaaaaacttaaagaaacaagaacaaacttaaccgataaagataaatagtccttgaaaataggaaaagaaccccaagcaaaagggagctatcatgtagaaaaagccttaactgcaatagcagaatcagactcaaccaagatagacttgcacctattgtcacaagcaaaaagaatatcatttgtgatggccatatagctttaggataaggtctttcttttattcccttgcttgatttcttgacttgacttgtatatatgcttgtggtcacattttgtcttcatgttgtttcccatagttatgacttgcactatacttgttatttcataattcttgtagtggttgacatgtgtatttccctttgatttttcaggtaccatggaagacttggcaacctccatcaagcaagcgtccaaaaggtagagactggccaagaaagccatgcctccccctccaactacagaaacttcctcggtggttgttgctccaactaaggagtctcatcgggtgccaccgttgcaccttcacaagaggtcctacatttgcatgcccatttcccatggctgcatcaacatcgggctcgggcccatcatgctttccgcctccagcagccatcgtagcgtgctagcgaggccatctgtccaattctagcagttggcatggggactcgtgttccaaggagaggcttttgatgcttatgttgcccaaagcgggcaagttctaaaaaacattggtacggggatctcaactttgcacgcttcaaccagcggggccttcgataatgaccttgtcctggtcaatgacatggcacaacgatgccttggctctctcaccatggtaattgaactttaccactttagtttatgtaatgtatattttttacgtggacacttataatgtagctgactattttgctttgtcttttttgtttctatttgatgacttcagcctcttccaaatgaccaatgcttctcataacatctatgcggagaggtgtaaagaccttaagaaacataactcgaaagccacagtgaagattaaggagcttgagggaaagcttacttcttctgagaagcagttagaagaagcgagcaccaagcaaaaggctattgaggaggaggctaaagccaagagtgatgatcatggtaccttgaatgccaagtttattaaacttgaggctgagtcaaaggtcatgtatgataaatatgccatagccattgttaatcttgaatcagagaacaccaactcctcggagacaattaagcggatgaagatagtgttggaatatgttttaccgggatctagatttactaccatatatgttgtttaacatccgaaatatgaatctctaaaacaatgtaaatgaacacatataaagttt

SEQ ID NO: 299675 - DNA, 1581 bp, Cannabis indica
tatatatatatatatacacatacgatatatatatggtgtggtatggccccataataaattaactttatacggtgcattttttttcgtgggagcatgagtgaaaaatagtatcattcttttaacattattatagcattttgttttttaattttttttaaaaataaaaaagaaaacaaaaaatatcctaagaatcacaaaaaaccagaatccgatgctacaaaactttttgcactccatgtttatgtgtctaaatgtacttggtctggttttagccgcggttttaaatagaatatattatttttatatgtatatatatatatatgtaataaactgtgttagtgttctattgggtgagctatatactgctagtattatttacttatttgctggtgctgcccatcatgtgtgttcatttctcatttttatgatataatatatattatattgtgtatacataccagctgatcagactgcgtctgtaaaatgggctgttgctgatcagcctgagccaccagagatcccttggtcgacttcatgtacttctctataagcccttgcatggttctaattaattgtatatatatatgatacaaaataaaaacctaataattatattatgtcaccatatatattacactagcttaactacatattatatatcatattttatattcacaaccgcatatatatatatatatagtgcatgtgcatcttttcaatatataatctatttaatatcatcatgcgcgcactttcactgcctcttttcatcatattcataaataattaaagtttaaaaaaagatcattatatatattatcatgtcatatttaatttgaaaccaccattattaataataatttatatgtatatataggaggcactgttatagctagtaagaatagacacgtgtaaatagaggatgaaagccacgtacgtacccttttgtggcgagatcgtagagcttgccatgggcggagaagatgacaagtccaatctcagcatcacaaagaacagaaagctctttggctttcttaaggagcccagctcggcgcttacagaaagtaacttgtctgtgaactgggttctctattcttctcagctgaacttttccacgagccatatataatttcctttatatataatatatatattgatttttcaagaacaaaaaacaaaaagaaaacaatatatatatatatatatatataattggctgtattaattggtaattgtattaatatgtgaagtttgtaattttggggttgtttgatggatgaaatttaagagctcttaattagcagctagctgacaaacctcccactagtttgaactagcttcgaggatttgccgcagaaatgggtttgtgtgtggttttggtaagtagtaacttctattgaagttggttctttttagtttgaagtcttaagcccttatatacttctatacctagtattcccttttccaatatatatctcatgcccttaataaaaatattaatcaaatagaataacatagctaaattgttcggcatctacctacctttacttttttttttttttttgtttagtactatctacc

SEQ ID NO: 299676 - DNA, 3100 bp, Cannabis indica
ttattgtaggttaattaaagaataatgtctgatcaaatcggttttaattctgagaatgatattaattttgtaaaatattaatacaatgatgtgtgtcactgttttacaaacggtagatctttagtttaaactgtcactgtatatatattgagtataattaatttggattaaatgacattgaggaacctttggtttgtgttaataaatacttgataaccccaaaacgacatcgcatgacagatgaggaggcctttcaaccgaaatgtcgtttctgccctcatccctcctcttccttcccgccaaatttctctgtcgtttttccaaaccaaagcccaaaatcacatccaaaaccttcagaactcaaccaatttcgtttccgctactgtcttacattccaactttctcaggtttggcttgcttactcacactttcactgccaaccatctcttgaattgctatgttaggttccgcaggattgactatgcacgcaacctgttcgacgaaatgtccgaaccaaatgttgtgtcttggacctcgcttatctctggatatgtcaatgtggggcgacctgaaattgctctctctatgtttgcaaagatgcacgagtgtacggttaccccaaatgagttcactttcgccactgcaattaaggcatgttccttcttatccaacctcaaaaccggtcaagaaatacatgcccgtgtccaagttttaggctttcgatttaacctcgttgtttgttcttcgcttgttgatatgtacggtaagtgcaacgatgttgacggtgctagacagattttcgacttgatgggttgtggaaatgtcgtttcttggacttcaatgatcactacttatgcccagaatgcaagaggtgatgaagctctacaactttttagagaattcaataatttgatattgggtcgtccgaatcatttcatgttggctagtatagtcagtgcttgttcaagcttgggaagattagtttctgggaaagttgcacatggtgcaataattcgcggtggccatgattcgagcgaggtggttgcaagtgcacttgtcgacatgtatgccaaatgtggaattcttgattattctgataagatctttaggagaatcacaaacgcttctgtaattccctacacttcgatgattgttggagctgccaagtttggactcgggaaaatgtcccttgaactcttttcagagatgattgaaagaggaataaagcccaacgatgtcacctttgttggagtcttgcacgcctgcagtcatgcaggactagttgatgaaggccttcaacacctgaattctatgtttgacaagcatgggatattgcctagtccgaagcattatacatgtgttgttgatatgcttggtcgaactggccaacttgacaaggcctaccaactagctaaatccatccagttagaccaaaactcaggtgctcttgtgtggggcacacttctttcagctagtcgacttcatggaagggtagacattgcaattgaagccagtaaaaaacttatagagtccaatcagcaagttgcaggtgcatatgttgctttgtcaaacacttatgtaatggctggtgaatgggacaaagctcataatcttaggtccaaaatgaaacaaaatcaggttcgaaaagaacctggctgcagttggattgagatcaaggattcaacatatgtgttctatgcaggagatatatcatcttgcaatcagggcactgaggtggtgaatttgttaagggaattggaaagtagaatgaaagaaagagggtacataggaggcagtattgggttggtgtttgttgatgtggaagaggaagccaaggaggaaatagttggtttgcatagtgagagattggctttgggttttgcgttgctaaatataccaaaaggggtcaccattagaataatgaagaatctgagaatgtgtacggattgccatgaggctttcaagcttattagtaagattgttgagagggattttgttgttagagatgttaatagatttcatcattttaaaaatggtcactgcacttgcagtgatttttggtaatactacgttttacctatgaattttctaaatggaaaatgaaatttaatcttatcactgttttcccatgttaaaacaaagaaaaaaaaaaaaaaaaaagaacaaaacgaccaaaagaatcatacttttatttgcataatttgcttatgaagatagtgggttgttgtaaacagccataaataggatacaggctaaagtaaccatccacacaaaaggattacttttctgaatgtttgaacaataattcctttggaaaagaaaccttccatagaaaataatagaaaagaaaaatagaggactattgtctatcaccaaccaaccaccatgccaatgcaccctcagtaatttaccaaagtaatatataatcttattggttcaaagttgtgttttttctttaactcagtactcagttgctttggcaactaacaaaacataacacaagtttctctagaagcaaacaaaataaaaatgtattttaccaatgtgagcttatctacaatgatctcaactacaacattgacattttaagtaggggtgtgcagaaagtcatctgatccaatcccaaccgaccgatccaatcccaaccgatccaatagaatcggatatccaatcataattggatcggatcggatgcaaattttaaaaatccaattggatcggatcggatgttggatgagacatccgatccaatggataaccgaaccgatccaatccaatatcatccaatgttcatccaatcatatttaatatttataattttatatatataaaaatattttttaaaaaaatatatattaattattaataggtttattaagacttttgcttattaagttagatttgtgttatatttttattatgggatcatgagaattaggttggatttggattaaactattgtttattattggattattaggttttaaattatattttttctatatatttttctttttaattgtaaatcagcctaaactagtggctaaaatggattggattcatccattggtatccatccaatccaatccaataaaaaacc

SEQ ID NO: 299677 - DNA, 3689 bp, Cannabis indica
aggcatcacaggaacaaaaaacaaaactcactctcctcagccagttgctgatactcgagctcgtgatgagtgttggtgatataactccttcacatacctttttattatttttagtgtggaaaaagattccttttggttgctatttatagtatggcaaaagattccttttagagaataaatatcccttttttaaaaaattgtcatatttttgttgaagttttctacagactattgaatcacaattttttttctacctatggctagatatgtaagtggaaaatagcataggattattcttatgtgttattagatgttatgttgacttgttgatttgatgggcaacgagatgactataatatggcttctcagtttaatcttttatgtgaatgtgaagtttgaccataaaatataaaaatggtaggagtatggatgctcttatgtatatgtattaaatcttttgattggcattatcttactcatacttgtaaatgaaaatgtaaaatgaagcttcttaaatctcaaatgctagatttcgccaaattacaattggtggttcagtttgttgtttctgaagcattagtcaaatgctagcaaaatgtcatattaacacccttctttttggtacctttctaaaaaaatacccttcatttggtacttccagcatattaaatttcttattaatatgtgcagtacattttgtgatgtcttttatggaattggttactttagttacttattttggcttgatgcttaccaaaatttcctaactattcttttgaatttatgtttcaggagccaactataaaagaatctgaagaaaggtgaattgcaatttagttcgttttcttcttatgcttagactgaacaaaaaaattcaggaattgtatctaatacaatagggcattttgttttattttgtgtggaattacttttggaggaatttcaattttgttttgtgtacagtgttacctttttttggtggtttggaagtggtgctcgactggtgaagtagcatgtcgtaattaatgagcagcatacatcttgacattgttttaaagtggcaatcttcatttaagtaccgagcaatggcaacagtaataataatttaattaaccaataaatacgtcaaaaccacaaaataaaaagtagcaaatcgtagtatggtaaaaatattttaaatggggtccttgagaggtgtcattaatggaatttatccaggtgttgctatgggacggtctgaaagcatgtggagtgcagtgcatcacgtttgattataattttaggctttgcttttttttttctttctttttttttttgttggtttaacctcttatttgatgttgcttacttgggcagggataatgaagatgactccgtctctaaaatgaaaattgctgaggatgcgctagcagcaaaacagaaggtaaattgttgcgtagttacaggctctttgtgtttcctattcttcgtattactttttgggtaggttgaaatttatggattgaaatttcttcctcattttcctagctaaatttttgacttccaggagaaaccttcatttgagctttcaggaaagctcgccgcagaaactaatagagtcagaggtgagctatgcattatttgctcggattttgatgaggaaagtctttttttcctctttttagtttctatataagtatgggcttcaaattttctctgtaaagtcttattatgtttgtcttacactctgtgtcattgtcatttttacccttgataaagaaaaataaatataggggaaacactgacctatctaattgccattactgtcaggtataacattgttgttcaatgaaccccctgacgcaaggaaacctgatgtaaggtggcggctttatgttttcaagaatggtgaagctctcaatggcaagttttaggcattttaatccttccaaatatctcctagttagtgtttcacttgtgaagcgttcatcccttcaatgggctttctacgtggaatctacgaccactttctttctgtgattgttgtttcctttggttcatcattgcctacaatatgtcttcatgcttgtcatttgcttgctgtatattttaataaggaacattttattctcagaacccttgtacatacaccgtcaaagctgctacctttttgggagagaaagaagggtggcagatgttcctactgaccacccatcctgcagcaagcaacatgctgtgatacaatttcggtatgtttgtagtacacagttttgttgttgatttatgttggaaattattagtgcacagttttgttgttgatgtatgttggaaattattattctcatttttgttactacttgccaggcaagtagagaaggagaaacctgatggtactctaacaaagcaagtaaagtaagatgtttttgacttgtccttgtttccagtaattggaaatgaatatttcgagtgttatatccaacttctgttatgcaggccctatgtaatggatcttggaagcacaaacaaaacttttctcaatgtaagttgctcacttactttatgtctatatttagttgtaatatttttgctcatttgtttgcattgtacggaataaattttgcgttctgcactggttctaatcttctatttttgggtgctaacacaggatgttgccattgaatctgaacgttattatgagcttcacgaaaaagataccattaagtttggcaacagtaggtaagccaggaatttttgcctttacctataatgatcagatgtctccttaagaacaacttgccttttgataattaagcccatttgttctggtgtcatagtttcctcagcaatttcggctgatctgatttggttgctgcactagtttttgttactgacctgcagttatttatacatgtttttatctgttctacatttgcagccgagagtatgtgctattgcatgagaactcagcccaatgagagattggagactaatttgctttttctgaagttcactttaatgtttgtgcatggagacgagtattttacttgagggtgtttttttggttcttagccatccagtgatgtgtgaaaacttatctctaattttgtaagtcattaacttggggagcacttcacctggctataccctaaactagctactagctttatgtcttagcaacttatctctagtgataaatgcaaggtatcatctgttgtttttttttttcaacttactaatttatctatggagacgtttttcctcttattattatttgaaatgttctcacatatccaagtgaacagttgaattgtgttatgtaaattttattttaaaatttatttcaataattttattcttagtatacgatagtggcaaatagtgctactgccaatttcaaatagtgcttcatgttacactataattggaaaaagaaaaaatcaagcgtaataccactattgatatctattgttcaaaaaatatgttattctctcttatagtcgtcgaaaaccttcctatccagtatataccaaccaggcacctcaccaccaacgatcgaccgaccgaccacgcctaatgccagattatgttgaacaaaaataatatataaataatttttttataaaccgtattaaatctaataaaaataataaaacaaaagatttcacaaatacacaaaaataacaaaaaaatattacaaaaatacggtttca

SEQ ID NO: 299678 - DNA, 1298 bp, Cannabis indica
cgatccaatccgcacttttttggattggatcagattggatttgagctattgtgcggattggattggatccaaaatataaaatttgcacttagtgcagatcggatgcactatgagcaaaatagtttgaattgaatatgacccctaggctcggtggtacctgcgttttccgaccactgtggccggtggctggtggctgaacgtctcgcacgagacggcaacagtggtgggtgtgggtatctcttatttcttgggatggtaagagcaggtgacagtgggcttcgtctggctatctccttttagattttagggatggcgttttggcggtggctcttctcaggcgtgaccttaggcttcagagttttatttttcttctttttatttcagatcttggtgtgttctcttgggttactattcaaacatgttggctctagtgcacagtgactcgtgattagctttcaaagtgttgtaaatgtaaaggaagggactcgggttatacccaaagggatgtgcttcctttgttccaacaccttcaccattcagaatcacaatagaatgctgagtgtagacttttctcgttggaagatagcaacactcctctgttttgtgtttgcgtgttttggctcattgtgttgcctcctttgcattaggggaatgacctttgattgttgttttcctatatttttttttattatatatatatatatttttgtttggtttgtttattttagtttttgtagctctttcggtgcaccttaagtccttaatggctttggtgttaagcttttcatggggagtttgtttctttagtatgtgcactcttgtgtgagccttgaacttattgttctattcaaactggtgtggttggccaacaaattgtcatctcctattgagattgtggtttttttgcttaacgtggatgacttttgccttttcaatcttgaatgaaattaccattttaggaaaaaaaaaaaaaatcatcagcattttttaaattttctaaaatgaagcacaaattcagatattcttttagaatctccaaccttccagttagatgataatgattttcttaagttggtgtaacacaaagtctctcacctacgagaatatatatgaatctcccaccttccggtcaaactaacatgaagtatgattatgaatgcagtatattttaaaagtcgtatttaagaggctaaataccatttcgaactctgaactctgtgttttgcaaaaattacagattagactctgtgttttgttaaatgacaaaatggaccctgtattttctaaaatagtaaaaa

SEQ ID NO: 299679 - DNA, 3363 bp, Cannabis indica
caatatatacatttttcctctctaaaacagagcaaattactctgtatctggtcttgttttctcatacagagtttggcagataataactgtaatttaaaattaaatattgggataaggtacaaataacacattttcaacacaattttgatgaactaattactgaattcatagcagaaatataaaaatcacatacactcgttgttgtattttttagatatatgtttagattgttgggagaaatcttgatcttgtttttttgtttgattgattggcctcttattgttgttgtcgttgatgttgggttgggactgttagaatctatgatttttttttttttttcagttttcatggctagtttcagaagcaaaggttatcgcagcgttcatgatgaacttctggaaaaacttctccggttctcttcgatccaattgccgatgtttataaagattgaagtttgtgttttatcgatttatcataaggttcgtgttgcgtgatacgagagtagattcctttttttcttcaatcacacatgtttatttttttttaatgatatatttgttttaaaaaaattacagtataaaagttaaaagttatatgtacagtatggcaatctaaatgtaataaatgaatttttttttgggtaattatctattaacttcccccaaaaaaaaaagcatagggaataaggaagaataaaaaatggtatccaattggaaggtgaaatttaggtaagaaaaatatagaatactacattatggtccaaacaaactctaactagaaatggtaacacccaaaaaagagtgcgcttcctcaattaaattagcctttttttttgcttaactagacttactaaaagtagtttcatgtgatgatgaaatgaactaaaacttacaagacatgtatagaagtgtctaaatgaaatcttattacataagtcgctcttgtatttctaataaaagtatgttaatttcatagatatataaatacatatatatatttatatagtaagggactattaattaagcttcaatcatttgctactaaatgccaggtgaggatcaaatgacaagtatagttaggtgcatccttcaaattatttggtcaaaaaaagaaagactttttgtacttaattaggcaaagaatagaaagttcaattaagtacgtacatttacttaaattgaaaagaataagagaaactttcttcttggagaatatgatgacaaacataatgctacccatagaatggttgatatatctttattaagataataaatctattcttcaattgtcagccagtgtaatatttaacaaaccatctatacatatagtgattgtaatatacaatattatatacatataataattatatttaattatattataaccgcatccatgtgccgacatttatgaaatgcatatagaaataaagttggggtcactacgaggttgtaacatggtaagagttatatattataaatacaatataagaataagaagaaacataacaacatttcatatattttaaaccaattagaaaattgatcacatctataagaataatatattgatatatgtgtataacttaagagccaataccttaaggtgcagcctaatttcttaaatctccttttgtttgtttttcgtttccactaagaaaaaatatccaaagagaaagatcatagaatggaagggtcaacttgttggaatattaaaatctttatattatactagtgaagctatacgtgctccgcacatgcatagcacacatagaatgtagaatattgagattataattattcactttatattaattttaagtgacaaattttcaatgttcgaaagcctatatataagaggagcacatccaagctttttattacatctaatcttcattagaagccttatttatgtttcttcgtcagtaattttatgtttcttctttttatcatcagtaaacttatttatgtttcttcttttcaccataagcctatatatatatatatcaacaaaattttataagaaggagaaagtagaatgagtgttccttacagaacacagcattttcaattcatcactgtctaaacacaaatctttaactgtctgttattcttaactatgatcaaccatctctagcatcattccagcttaattaactcataagagatcaacaaatttattcatagccatatagcaaattttaacaacattgtaatctctacgaattgggtcaactccagagtaaacctttgtttattattagtttttttttcaaaaattaattcaaaattccaatagattcaacagttcaaaacaagtaccagtatcacctaagcaggtagctattaatttctgtttattagatttaatgtcaattattcattctcaaatatatacatccattcatactaaaacagataaaaaagaagaaaaaaaactatcaaatcataactaaattaaaattacactaaaggaacacaaaagtatattgatctcagaagaagacccacttgactatgttaatatgattctagataacccttcaacttcgtttattagatttaactgcataatcgttttgagacataaaatctctttaatactacttgttcactttcccttttctcttctcctgctataacaacaccagaaattttttctcatcaacacctgtcattggatagttgacacgtgagagaaaaataaacttgtcaacattttgtatatccttttcagaaaagaaaacatttatgtgcataaatatatggtcaaataactattctattttactataaaggatatggataataaataagggttttttggtaaattaactatgaaaggccgaaactaaattattctcctttttataaaggttatagatatatatatatttatataacttatatctataacctatataaaagtgtcaatatttttggactttctcaccttgattactcatatacccttttagaatatataatactttataatacaaacaaattagatgcaaatgataatattttaaaaaatgtgggcttttagatattgaattacacgtatacctttttagaatatacattacaccacaataacctaaataaaagcgttaatattttgggctttttgatattaattacacatatattacttcataatacaaataaattacatgcaaatgataatatttagggttttatttttgttattttttttcttattacacatatactcttttaaattagtatagcttgtaaatatattcttatcctcacattttttctctatcattttcaaaaatgattatatagtaaatttacaaagtattatttagtataaccaatgattaaaatcaaatggaga

SEQ ID NO: 299680 - DNA, 1513 bp, Cannabis indica
aaaaatattctcagtggttgagccaaaatacagacaaaataatagacctgcgaacttcgacaatcaattaaaattaccaaagacaagttctgcggcttaccatcaccggcaacatcgtttgtggcatttgcaacctgtttcaccaagctagcaccaatattcttgatcttatccttaaactcaatactcttagcgactgtaacaccatctttggtcactttaggagcaccaaaactttgctcaattaccacattacgacccttttacaaccaatcaattcaacatgaataagaataaacataaaagaacatgtgaaaagaagataactaaacatgtgaaaagaagataagtaagcaaaaatagcacagagcagatcaaaaaccttaggacccatggtcactttaactgcttcagcaagatcttcaacacccttaagcatcaaagctcgagcttcaacaccaaatctaatctctttagctgcatagtttctggtccaagtcaacctactgccaacctaatcaatcaaaaattcacaaaacacaaaataatgatcaacaaaaagctccagcattttcaactgtaagtccataaaacccattaacaaaatactcgtctctctctctctctctctcacctgctggcttgcatttcttgcgatcctgcaaaaacaaaaagaaaccatttttaactcagatatatataatccatgaatctatggcaaaatcacagactttttattacaatttcagatatttttaaggagctaaagatcgaaacaaaagcaaattcttttacagttacagtcgttgtgaattgtttacgttggtacattttctcgataaccaaacggaagaatgtgtagaaatgaaaagcaaatgagatcaaaagcgtaagagaaacctacctagctttgttggcgaggtttgcagcgtagcggtacatgttggagaattgtagggagactaagtgagatgaagagaggtgaatagtactgtaatggagaatgggagaagagaaatgggtttttggtttttattttctagaggaagaagaagactctagaaccagccccttctagggtttagggttttatgaataatctcaaaattaacttatttttctttttttctttctaaaatattagtattgtattttactttatttttgttaaaaagaaaaagtacaattattctatttttttaaataaattaattttattaatagcaatctattaagataccatcaagattaaaattagaaaaataagccgcttaattcttaaatcgtttgacaaaataattaaatataaaattataaaaaatattgtcgtatcgaaccttaaaaacacatatattaagttttatctacttatcagaagacacaataatataaaattgttgttaggggtgtgcagaaagtcatccaatctaattccaaccgaccgatccaatcccaatcgatccaatagaatcggaaatctaatcataattggatcggatcggatgcaaatttt

SEQ ID NO: 299681 - DNA, 2118 bp, Cannabis indica
taaaataagttgaactgcctaaacgatacatgtagctaaaacatgcctcattcagatttcagggttcacccactaataaaaactggaaagcaatacaattcaaataatataacattttaaaaagccatgattgagagtatgatttccacatttcttcacaagcaatatcaatgaatacacattaatctgagaataaaaagatcacatccacaacataatttctcaacttgtttcttactacaatctctaactaaagattctcaaaataaaattacagcttatttaagcactttttctttctcctactaaaaaccaaaaaccaaaaatcaatattacaccataacaaaatctgatttgttaaaaaccacaaaacattaagcatactaaattcatatagcagaaattgaatcacaccaacatatatatttggtataatagtgctatcctaattataaaatgaacataaaggatcaattttgatgccaaaaaagaaaaacgaactgaataaaataagcgaattctctattaaacacagaaaaaaactcttcaaagccttgaaacctataaattatcatcactacttttttattgattgccataaatacagtccgatgatgatacaaaacaacacatatatatcatttcagataggaaagaaatagtatagatttcaaagaaattacctgagtcggcgtatgaggtagtcgccgtgaaccgatctgagaggagaacgagaacgagaagtgtcgagtggtgaacgggagaagatttgggagcgagacgaagatggaggagaacactgagattaaggttttattgggttgggcctttatttgggctgaagcctttattttgggttgggcctttatttttacaactcaacactatttcttacaacttaattgcaaaaataccctctgagacttttaatgtggacttatctcaaaaaaaaaaagaaatcgtttaatgtgaactgtagagagtgtttgtagaaaaatttgatggctgtgtttggaattggaagttggattttggtgcagacaaaaaaagatggggaaaaagaagtggaaaataaattaggaaaaattaagtgtagggttttgtgcttgtagaaattatcgagtaattagaaatgacaaaaaaaatccaaaattttgtgaacaatgcggagttgaatttgttgattctcgaatacgaagatatcaaatgagttacatcaaattggcatgcatcttataatacttcaaatgctaacgaaattattttagtaaaatttatgaaaaaaaaatttgtattaaatacttaattcaacaaattttttttattttaaacttgaaaaaagatttaattttttgttctctgcactttttttttctatattttccgtatttttttttttatcaccaaaatttaacatccaaatatagccaatgtgaagagttctttttggattttcaaatatatgtgaaaaaatgtgttaatttttatatttatggacataaaatttacatataaaaatggtcatttgggtagaaataaaattaaaaaagatgaaaaacgtaaaatattggaaaatatgagtgatgatgatagatcttttgataaattttatggtgattatctataaagatggttgatggtggatgagagagatatagtagaaaaagagaaattacacaaagaagagaaggaagttgagttgataaatagagtaattttccttatgataatgacaaaatatgagatattttttatataagtcacttgaagcataaaaacttacattttccaaacataatagcattttatttatgcacaattatagttaaaaagattctaccgacacaaaataaatattaaaagccggaatattaaccaaagtagtttaatgtaaagtagatatatgctttgtcttaataattatgataaggaacttttatgaatatatttattgaaaaaataatataaaatattagtaatttaactatggttagccataatatttttgagtagttattaagtgaaagtcttgtaaatgtggtgatatttaattatattaataacatattgtaatagactttctttctgcatttgtttaatagactttcttttgcggcc

SEQ ID NO: 299682 - DNA, 1203 bp, Cannabis indica
cattggatggatccaatccaatccaaataaaaaaccagttaaagcatccaatggatgaaaccgatctaatccaatacatccattggatcggatcggatgactcaattcaattggattggatcggatgataaaattcaatatccaataaataattagattggattggatgggtccaaatccattggatgtgatacaatgaacacccctgaatatatttgtaagtaacatcaaaatttttattactgttaaacaatgtcaccatttggagagatgctctaatttcgtaaacctaaacaacaattaccctctctctcgtctgcaagcccatacaacaatcacgagccgactggccacctcctccttccccatcgctcgcattctctcaaagctctgacggaacctagaggtctcacaccgctagcgatctctccccccattgttctcatttttttatattttttcttttgttcaaattttcagatctttcgccgctagtaatggctcccactggtggtctatttcttcatcgtcttgtcggctttgattggggtttctggttcagcttcgattgggatttttggggtttccagacaatttctttctcatcttgtcgacctaaagtggtggttgaagttaggttttcttcagtgggggtggtttcggtgttgatgatgatgatgattcttctggtattttgtgcttcgatctctattattttcaaaattattttatttttctgtttcatgttttgattttgttgaacagggtttcgacgaaaaagaaattgtgaaggatataatttacaattcaaagagccctagttttctttattcccacattcatcctcaattttagagaaatcattttgtccctggatctagctgttgcaaatttgggtgattttgactagtttttgcaactcgttctacttagtggttcttcaagttgttgaagaaatttacccaatttttgtttttttagagttatttgcggcataacctcctaaagtgggcaggtttttgcaactaacccccaattctaaaatttttgtggtaagacctcctaaatccaagttctgttagcacttagccccttccgtccatttttggctgttaactgccatggtggaatgtccacgtgtacactgcacaattttattggtccacgtaataaatatttaaaattaaaataaaatttttaaaa

SEQ ID NO: 299683 - DNA, 8688 bp, Cannabis indica
aatcaagcatacagcattaaacaaccagaagttcagccccttattctatcagtatgaaccatccaacttccaaggcactactacaactaaaacaatcccagatactaaagaaagcagtggtaatatgaaaaacaaacacgatagatttatctgatggaccaaactttcttagtaagcagctgagcatgcaataaagttagtatgttaattccaaaatcaaaccaacaattagactattataggtgtgaagaaaaatagttatcaaaatagtacaatcagcagaaacatcagctgaaaaaatttctgatgagcttaatataccatgtcgcttcagcataagataacccttgccacttgactagatattctggtactacatctccggaactgtctttactaacgcggtctgcaattatcctttctacctgagagataattgaaccaattatagagaactaaataaaaggggaaacaccaaggaaatgaatactttggtttacaaaccaaaacaagaaattgaaagcaaacctgactattttgcttgatgaggtccaagtccatctccttgctcacatcattaacctcaatcttgaacatacaattaaagaaaaaaagggcatcatagtcaacataaattgtaatagctcttcaaatcatgtgagattaagcaaaaaggaataacaatagttaataaaaagtgcttcacttttagaaccctttttaaactgaggttcccaaaaaatagtattaaggcttatgtctatcaggttttgcacaaaacgtatgtgcctcaatggtctgaggcttacgttttagattcagttcatgtatacaatttcaaataaaattgggcttatatgtgttgttgggcctttaataattttgggcctacaactaaatgaaataaaattaaaaccgtaactttaaattaaaacctatataattttttttttgaaagaaaaaacctatataatttaaaagacttaatttaaggtttaaagactatgacttaggtctaaaagactaccctaggataataaatttaatgtttgtctaatttaaaacttctattttgtttaacatctaacatctaattgtttttttatgtagttattatttatgtttaatttgaaacctacacatcaatctaatcagaaacctacgccacaatccaattcaaaagatacatcttcatcaacatctgttgatgaaaacgtctcagttcccataaattattaggatatgaaataaaacatttgaacagaatcaagtccattaaaaagttactgatctctttaaatatcaatttaaactggcatccaatttcaacatcttacagaatcaaagtaagtctatccagtgagaaaaaccaaaaaccctcgggttacagaagactgaatttgtctcaataaaaactcagaacaatattgtggaggaatattaatagctagaaaataaccaatctactaggcagttggccagatttctaaaaacaaaatcacaccccaatccccccatatatagcttaaattggcatccaattttcaacatcttaaagaatcaaattaaatctatcccgtgagcaaaaccaaaacccctcaggttacagcaaactccatgacggtgaaagctgaatttctctcaataaaaactccaaacagcattgtggtggaatattaatagctagaaaataaccaatctactaggcagctggccagatttttaaaatcaaaatcacaccccaatcccaccatgtatagattatacaaaaagtagataacaatacacaccattagaagcaccactgaaagacaaacaaacaaatcaacagagcatatttcccaaatgatagatacctttatatgaatatgaaatataaaagtcactgtttaaaggataaagaataaataataaattatactaacatatatgatgtgtggggtgggggtgggggtgggggtggcaaaggagagccccgccacccaacaagttgggtagccctcaaatagcaattaaacccagtttatctaaatgtaagtgattttgttatcctttttcacaataaatagccagcttatatttattaaagaattggaaattcagaaaactgctttcataattgacatccattaggagaatgggaattgccacaggtccaacaaaaacatacatctttattgcttctgaacattctgcctttatgaaacaaagtctgtcattcagaaaagaaaaaggaaaaaagggaaaaagaaaaaagtattacctcctcccgtgtgactgtcttcctgaacctaacatcctcagttacctttttagtgtaattcaaaaccttcttaaaaccactaagctgcaaaacaacataaaccagaaatacataaagtaacttcaatatctgggggaagggggagaaagagccaaacatcaatgctacatcaagaatgaaaagttacaactgacaagatagtgcaagaaggcttaaacaagaactacacccagaagcagcacaagaaatgtacaacatacgttttgaagctcagaaaatgatttccactgacagtgcaaatgggattggcctttccattttatcaagaactccacctcattccaatttggctcagaatcaaacaagtagctgagtagaacaggatcagttgaccgtttactcctaagagcttcttcagccacgccctttggttgatgccacagcaccttctcaatacaatcactatcttcctcttcaggttcctcctgaaaaggtaaacccaataatgtaagtacacaatatgattgtagtcatccaatggcagaagaaaaattcaacacaaacagcccaaaagacaaaagtataatttcatacaaactagcctggtttgatgaagaaaatcatgcagcaactaataaaatttgcaaaagtaaaatcagttgattaagggatttaattaatctccagatcaaacaacttcatcagaacaatatgtctacatcaaattctagcaggctaagcttttgaaactttagggaactaccactttttctatttttttcatagaaaaggtagggaagtgatacactatgcataagcatgtgaccaaatatgtgacatttataagaatttggcacgcatctcacgtcttcttctctattctgtcatataactgtctttccttctcttttgaagtttcacatttcttctggttcccgttatgatcatttcttgttcttaagacaaggaaaaatctgtactaccctaaggtctcatctcacccatatcccctcgtctttatttaaaaagaaacagattgtatattaataaaatgctgataagtctgttaaacgaaataaaaaataaaataaaaagatgataaggtgccaattatatctttataggataagcaagtcatacaccagcgaaaaagggtatccactaaatcttatcaatcaagattatgtagcatcagaaacacaaacccaaaatctccacctgtttctattaattagtccctttaatatcttttaacccaatacatgcaattacctctatcaaatttcagtaacagggtttacaaattattcagaaggggtttgcgcatttgaatagattttttcattaaaaatgaaacttgcatcaatgagttacatccagtaaaaaaaaaaaagaattacaaatttggcaatgcaaagtacttttccaaataataacccaccaaaggcccaattcatagcatattttataaagtaaggggaaaaaacgtgtgtattatcaaaatcataagccttgtagttaacaagtgaagaaccaagaggtacaagcaaaagaaacaataatgttactagtacaaaactagactgtaccttttggagatttttcttcttgctttcatcagcgtcctcactttcatcactttcaacgtatgacaccttccgcacagacctagtagaagtgcgtacctcattgtttcgtctggttgaatttatggacaaagtagatcgaccgctagtttttcgctgatgtgaacctctcctcaagcttttaaaacccacatcactatcactttcagagtcctcccccaaagactcgtcatcttcaaatgatgatttacctcttcgctgatgagcatacccttggtatgatttacgttctctggtagatttaacaatatgtacacttttaccacgttgcttactttttgatttccttgcaaaataggaatcatcttcatctgacatatccagctcattatcactgtcatcttcttcttcttcagattcttcacctccccaatttttatcctggtatcactaaaaatacatcattaacatgcagattaacaaattttcacagtagcacaaccaaataatagatcagtaaatcttatctctcaatgaaattatgaagaggaaggaacaaagcaaccaattacaataccatatctaaacatacaaatgggaggaactcacaaaaacaaaacaataaaaacaagacctataacaaataaagcctaggacttccatcaaaacaaaacaactaaatttacatgggagcctcacttgtggcgaaggaaaaccccacgtaacacattaacaagacctataacaaataaagcctacgacgtccatcaaaaaaactaacaagtaacaactaacaacaaagttcctaagccaatttgaagtatcttatcgcaatatacatctccactctctgttgagatctacaaaggagaggccaacaaaacctttggtcttataaacccaagttgcaacccagaatttgacattctcccacaacacatcctctacattattttctgtaatttcaaagatcctctctttcctttctaaccatacagcccaaaaaatggctaaaattgctgcagacaacagcctaaaagtccagtgtttgcctttattttcgctactctaattaagtcataaaagttttatccttttgcgagaaaataaaacatcaaagcttgcattattaatcagcagaaattatacaaggcaatgtgtgacaatcaccctaacaaaacaaggaaaaagcaattacataataaaagtaatatcaaagattacagtataccacaaagtcaaggttgactcatcaatgattcatcagagccttccactagaaaatatactggagcaagactaatacaaaaatatgaaaccaaaactacattgagattaattcattaaaaaaaaaaatcaaactgcagataaagaagttattacccaacaagccagctaagatacctgctatactacaactagatgaatggcttcacgaaggctgaataatggctcagagtaaaaggaaatgaaagccttcctttagaaagtttacagtgtaatgatcaatccagtaataagaatacattaatacaaaaaatttaatgttcatttattgcgtgagaaagcgcttctcaacttagggtaaaaggtggttcagatattgaattcaaagaataaatcaattgttatgaaattgttgtgaggaattccaaacgaaccaaatattctgtggcacaaagttatcatgagtaaactagatagttttgagtataattgggttgttggtttggcacttaaggctatgtaagattgagataatagttgatttgggattcgaggcgagctgttaaggctacatatcatagcccacagacaaaccgagaatcctaatcattatctttttttcaattggactgttcttcgtaaaaacaaagttgataaagtgtgaattgtaatttgttcattgcacatttacactaactttatggccaaagttcatgtttgacactttgactggttgctctaacaagatgccatgtatttttaatgacctcatgtacgttcaatttatttgtaattttttcatctttatttttttttcatctttattaatataacagtttcatttcttgccatataatttgagaaccctcaatacccattcaaaaaataatgaatctcaagcataatttgttgtttgtgtagtactatccaacatagaagtagagtaatcccctctaatgaggttttgatatcatgaaaacgaatgccaaggatttgacagcttcatccaaagagtacaaaagtaggaaaagaatcacattaataaaataatatggtatattgcagtagtcgcaaaccttgttcaatgtgcgttcgttggtaatgccataatcaggttcaaaatctgcatcatcaggatcatcttctgccatcacacaggataaattcagtcttaaatcttcatgagtggaacaataatataattagagttcataagttccatgccaaatgtcctcacaagcacccaaggactagagtgagcagcactaatgcagcaatatcctaaaattacaaaggagaataaagtgaattaccatcttcatcctcttcataatcagcatcgtcattattgttgtcatcgtcatagccaaaatcttcactgccattcaatattctagaagatcttgcagtattcttattccctgcagctggctttaattgttgcttagaattagaccccatagaatgaggaaaccctctataatgcatcaaatcattctgctctttcccatcttgttcgtaatattcatcagacagcatctcatctgtagggacatctgaagggccttgatgacccttggttgtgtcttttggcccatcatcatcctctgaatctaatctctgctccctgtcatcagacgaattatattccaatccatctgcatttttaccgtcagaatcttgcccagaatcagaaccattctgcgagtgcataggctggcaatccttccaaaaggttgaaccccattttccagccacagcacttctcctcccagatggttgcgagtttgttaaacttattacaccatcattaacagttgcctcattttgtgacctaatagcatcatccagttcaccttcactttgatctggtgcatccatgtttatatcaaattccttttcacttgatgtgacatctacatcctcattacctgctgaactgcgaattctgcttacactcgtcccctgatttttttcttccaggtcacaaggggaaactgtttcactggaaaaatttctaaaaaatgccatctctcacatggaagttataactaaattatttacttaatttctcatgccataaacatttaaagcatcaacaagaaaggcgtaattgattgacccgtactagtcctgccgtctatcagaaagtctcaccagaagatctggataacaacaaagaaaatgctggtaagtacagcgacataccatttccagaaaattaacaaaaagaacaatatacacccacaaaacacctagaagaagtgtagaactaacgccaaaacatgcattaaaagacacaattatccgaaaatgtcttataaaaataagtaaatgaagcatgcccattatccatcaaagtatatccagtatccatccacctcctcctctttcttcaaatattccagaaccttactatgacttgtaaaaatttgccgtattcttcttcacacacattttctcaacagcaaaagcgtctaagttagccttgagcgaaattccattccagcttaatatgaaaccagtaaaacaacaaaattcaaattcattactaacctttgactgtaaaacactcagggaagtatgaccacctaaatcacttacagcggaaccagctacggcaaccaaattctaagacgatagcatcaaaaaatggtgaacgttaatcgaaacacgaatcaatgccaagaaatccaatcacacgtacaaatcaatccaaacaagcaatagatcataataagaatttactaaaatcgaaacgcaaagatggaaagctaaaaccctccatgtacttcaacaaacaaaccctagaatggaaaacgaacgacaaatccgataccacaaagccctaactcccaaggaaaacacacagaaattagcgaatcggaggaccaaagcagcaggtagcgagaaacaacgagaggagggaagaaactacgaaaaagagatgctcacctagaaggatagtaagagccaaactaattgggtcaataccaaatgaacataataaaagtgtgaagcctgacaatcatgcgcttcacgcgaataatctccggtgaaacccaccgccggcgaaagttttacggagtggttgtttggggtgggacaaaaaaattggcggcggcggctgctaagatgcgctgagtgagcgaagtttaagagaccgatttgggcgaaaagaaatcgatgatgtgattatggattgaacgacgacgacggtggtggtgaaaaaaaaaaataaatagaaagaggaattttttctagagagggtgcagatatcaggaaattagaagagatatttggttttatttactttattttattttatttttaatatatttttggaaaatgactcttctcatcgcttctttggagaaaagtgcttatggagatttcatttttctcaaggatgttacgtggcccaattgtgtagattggcatggggcaacaatctaaacaattttaaaagtcaaaaacttcaataaaactaaataaatttcatcaaatcacaacatttttattttagatgatcttggtagcgcttggttgtgagaaataaaaatataagaataagaatgggaatagaatagaattaaatttaaaatgcataaa

SEQ ID NO: 299684 - DNA, 2792 bp, Cannabis indica
ctatcttaaaaattcctacagttaaatatctctattaataattgttagtttgtggtatcgttgtcttggcaaacttttctaatcacaacacttgttttgtgcctggctttattttgtgaatgtttagactttgtcatgtgcttatttatataccttctcaaacttgttttgtgttattgttggcattaaactaaagggaaatctgttgcccattagtagttttaatctaatattcaagattttgaaaagttttttttttaatggttagttgtgttgatctcgcttttagtcaacgacgataaattctaattaaagcaataagaataattaaataacaaaaaataaatagtataaagaaaagaaaacactaaatttatagaggtttggtcccttataattagtaatagtgtacttttttttttgttgtatttgtgagaagagtgagcaagaaggctctgatctctctcaaaaactcttataatgatttttgagtggttcactcttagattgaggtttcactcttgagtgttgtttctctgaattaattcgtgtccctaaatagtgagattaaactactatttatagggactaaatacatgaggaataatttctcttaatctataacaaataaaataggaaacttacatgtttccataattacaataaaagattagaaaatttaagctaattgcctttattctttggagatacgaattagtcccacaaatatagggattgtttctgtgacatgcaagcaaataaataatgatgtccatctctgaaattgctaactcgcaccaccttatcggtgcatgcaagttacttgcgtgatcaggctggtcggatgtccaccagtgaccttgctcgaacatcctaccattcatgtatgactttgagcttcatattaatctacacagcctgctagaagtaaaatcatcagcccaggttataaaatatgatacatgtgtcacttagtcagatgctacgtcgtagcgtaaaaattaggataaaattttctcgcaaagtctatgcaggaccttcttggtcgcacgtggactttattcggctaggaaactgtccagatgggtgacgcgtgtcttgtcaatgttgatccaacgcgacttgatcgaaggtctctttggtgattgggacattaaatacctcttgaaaattgtacctcgagtcacgcattgacagttgagtgacactgcatgcatggcgtctgtacttttgcaatgagtaccaacgttcatttttgggaggaaaacccaaatatttgaaattttaaatgaattaattgcctctttaagatacctataaaaggggattaataccttcaaggaattattttagccattttcatctttagagaacgagagcagaaatttcttcgtgttttactcttaaatcttcgaagagaatttgttgggaagtctattgttgatatcctctgagcaaatctagaaggcttcgaatagtgagtaagttgttttttccttaactttatgcaatatttattgaacatacacttattttttggatttcttgttgcaaaattatatgttattgaattgttcttagaatagaagacattagggctggtaattttgactaacattcgtttagaccttctgattctctaattgtgtatcatttttgacccaaaatcattcattttcacccattcgtgggattctaaagatttctaaatatcttttgaggttttaaacttctgggtttaagaacttcattttagaatgaaatcccttctttttgtctttaattgacctggtcatcgtggtcgacatattaaacctgtttttcaactttccatctgtccaactctcatcttcttgtctctcatctttttgtagatgaaccatggtgattttcggggaggcaaagaccatatcaaccaagatctaccctaacttttgtacgaagattaccctcagctctgtgcaaattcatattcatctcgtgacaatctttcaaactctagctttgaggactgggaagtgagtagtgaacatacagactcttcaaagcccgaggtgcagcatcaccagtaccccaaccaaatacatggagaagggtatgggcattttatctgggaattaaagaaaggtttgaactgttatcttcctacatcctgtacgtacaaggtccagtctggggttactgagacattacctgaagcctgactaactctgtctgctaagggagatgttgtagctgactttgttgtgactattgcaaaacataccaatgaatcaaagcctccgcccaaatgtagaatgatggagcaaacaaagtagaccatgaggaaggcttcataaactgacccacactatgtgcggctgtttgctattgcaggaatggagaaagctagacctctgaccgaggaaggataaatttttgagggggacattgaggtccaagaagtggaggaccggggcgaggcctgtcctgccacccctcccgaggctaagggagaaggaggagaggaagaaaaggaagtttaggtacttccttttagtgatttcaatgaggacggagaatccgtctctgaggacgatgaagtcctggtggctggtcaggattatgttgaagaggaatacactgaggcctgacctataaacaatcatggtctgaaaggtgctctgggggtctcaccaccatctgtcttgacttttaagagattgtcatgttagtttttatggcccatatcagagttataaacgtggaagcagaatttgataaaaataatttttatctaatatgaaccataa

SEQ ID NO: 299685 - DNA, 3194 bp, Cannabis indica
tttcacttgttttttgcttaataaatcagaaaaactaccaaatccaccctaaataaattacattacaaacaggcattacattaccagtaattactttttaaacaaatgtataaaccagtatttattacttggatcaatttcaaattacagaagaaaacttgcttctattcattactagagccctttctaaaattaatctgcccaaacccaaaatagggaaacatgtacatttttctctttttacaaaattagaaatttatatttaagtcaacattccagcaatgttatatattttttttaaatgcagcaatattatatttaatgcagtattatttcctaattaattgtgtacatggttgcacctttattttttcttatatatgtaacgtaaatggtgaataatttataaaaggaaatatataaataaataaattatttgacggtctacaaaaatgagtaatatccacatgtgagtcgatgcatgttggaaccgtgaaatgacgtccatttgttaagaaactgacagccacaacagattttttctttaaataattatttttaatttagaaattgtttttgggtaatattacgaaaagtcgaaaatacccaaggtgagtaaatacaaaacagaaatagatgggcaggtcagttgcgtaatatcacaaaaattcctatggcgaaaacggttttcgagactccatcaaatctcaactttcccatatatttattaatttctagtagggctatttctctctttctatctctctgaaacagtcaattaatacactctctctctcttcttcttgctccaaagcttttggctttcagctccgagctttcatggcgtccatggcagccgttggagcacccagatttccttcttcttcaacttctttatctcattcttcatcgaatggttccaatctcagtcccagaaccagtcctcgaacgctctctttcgctttttctcatctctccggcgataagatttcatcaattgccactcccagccgcacaagagctgcttcttcctccaatagagcgcccaggatcgtttctcccaaggccgtttcggattctcagaattcgcagacatgtctagatcccgatgccagtcgagtgagtcttttttattggtttatcgttctcgctttgcattgtctcgtttggtatttaggttatgcaaggaataattactctgtttttgcaatgtcatttgaaatatgattgagtttgtcgtttgtggtgttcttgcagagtgttttaggcattattctaggtggcggagctgggactcgtctctacccgttgacgaagaagcgtgcgaagcccgcggtacctcttggagcgaactacaggttgattgatattcctgtgagcaattgcctgaacagcaacgtttcgaagatctacgttctcacccaattcaattccgcttcactcaatcgtcatctctctcgcgcttacgcgagtaacatgggaggttacaaaaacgaaggctttgttgaagttcttgcggctcagcagagcccggagaaccccaactggttccaggttagtgggttggtttatgctggacgtggggtcggcttgttcttaccgttttgattgtgtatttaactgttgaatttactattgcagggaacggctgatgcggtgaggcagtacttgtggctctttgaggaacataatgtcttggagtttttggttcttgctggagaccatttgtatagaatggactatgagaagtttattcaggcacacagagagactgatgcagatatcactgtggctgcgctgccaatggatgaagaacgtgccactgcttttggtctgatgaagatcgatgatgaaggacggattgttgagtttgctgagaaacccaaaggggagcaactcaaagctatgaaggtaagttgtctgcgaattcacttttagatttgtaatggtttgattttggtattatgtttacacgtgctacgggctagctttttgttgtttatttgagcagcgcgaattagtaactttgttaccttggcaggttgatactaccattttgggtcttgatgatgagagagccaaggagatgccttacattgctagtatgggtatatacgtggtgagcaaagatgtgatgataaaccttttaagggatcaatttcccggagccaatgattttggtagtgaagttattccaggtgcaacatccatgggtttgagggtgagttctcgattagtcaattccaattgtagttgttattgcattagttttggtaggaccccctaactgtaaaaggttacatttgtctctgaggcatgaatcataattgtgaccaaatctttccgagctctgttagagctttgtaatgaatttgaagggccacagtgcgactctatttgctggaacttcctttatgtttcagataattgtgtttcttaatcattcctctatgagaaaaaattttgtggactaattgtctttcaactatataggtacaagcgtacctgtatgatggctactgggaagacattggtacaattgaagctttctataatgcgaacttgggtataaccaaaaaacctgttccagacttcaggtataattcttgggctacagcaagcccatccaaagttctgtttcactacacctattaatccactgtcttgttaccatcttatttttcttgttttgtctttcagtttctatgatcggtcatctccaatctacacccaaccccggtatttacctccatccaaaatgcttgatgctgatgtcacggacagtgttattggcgagggttgtgtgataaaggcaagctctcgacttttgtgggctatgtaacttgaaacttgactttggtgtattatcatatcgttgtggtccaggacaaaatgggataacctataggaattattcttataatattcccctcccctgtttcattgtgcagaactgtaaaattcatcattctgttgttgggctccgatcttgcatatcagaaggtgcaatcattgaagatactttattgatgggagcagactactatgaggtaaaacccagtaaaatctactgatatctttaaaggcaatgtatatatatatataatttttctattaaagtaaaagctgttggtgggtagctttgttaagaataatcttgtgctgttatccgatgccgataattattgtttgtg

SEQ ID NO: 299686 - DNA, 1050 bp, Cannabis indica
gatagttagctagatatttacattagacaaaaatgcccttaatttctagatacttctaagcatgtttgttgggcttttggggcctaattcacagcccattcttgttgtgcacgtgtaggagagtcctgtgggacctacattacaatccttggctgaccatggccttttgctggccaggctagctggccatgttgttgtttcttggccgaggcagctcttgagagtgagctagactatcacttgatccccgtttgagtgcggggtcttcgttggctcaaatgctgacttagccttccttttggatgagctgtactaccacgtggcgcatgttctatccacataagcatgccatgtcatgcggacaaaaattgggataacacatatcatgcctttattagtttctttggagcctttagaatgtaggggtagatgtatttcttctcgcctctattatagtggatacaatttggcaagtctaaaatgaaaaagtatgtaacaatttttctcaaaactctcattattatatcacttttgttttccattattatgcagaattttctcactcccttctatttaaatcacctgttgctgctattttgggctagttgcccccgctgctagactggttcaagcttttaactgtgatgtagcggtggggcaacaagtgcatgatggctagcatagtagctacaaactacaatggaattattgttggggtagagactcgtaaactccaatatgttgaccctctcataggagaaactcaagcttgtcttctagtgttagaagttacttatgggaagaattggttgttcattatcgctaaaagtgactctgaagctgttgttaaagctttaagaggagaatcttttatataggaaatagataataccatatgggtaaatggcggcaaaacccccaaaattttcattttagtttcacttaaccccaaaacccaaatttgggcaataaaaccccaatactcatgttctgttagcaatttaatatttccttctattttaggtgttaagtgccatgttggactggaca

SEQ ID NO: 299687 - DNA, 1693 bp, Cannabis indica
gttagtgatgactccaagtgcttatgattttccctaaccttgatcaagtctacaaaagattggtagaagcaattagctccagatcgattgatagctggaaagctttactttcgaccttttgttaatagtttattgatgtgtgagaaaaggatatggaagttggttctcttaccaatgtcaagcaacatcatatgaaagcttgaaggcttttattcagaggatgatggaggcagctgccaagactaaggtttgtgacgacatgaagttgatggccctccaatctggattaggtattacctctttgctatgtggagaaatgcagagaaagagagctaaaactttgagtgaatttatggcaaaggcccaaggcttcatcaaccttgaggatgcttacatacaagcttttagagtccctacagctccaactctttccatgacaactcctaactttacaccccaagtttcagctccagcattgaccctcccaagagcccagttttctctgacattttacaggcctactacttctgggatcgctcctacacatacctattttttggggtacggggagacacaaacttgatgtagtgtggctcctggacaagctaaaactaaggtctcagattctaatgtcagccattctcagaacaaaagagggggtaagagccacaatcacaacgattcttcaaaaaagccaaggaaagagtatgatccaaaatacattgattatacaagtttaataaacactcaagaaaatgtctacaatccattataggaaacctccacgaaatgtcacatggagcaagaaacatatgtcatcaaaataaagaatgtgagtttctcagggagaagggtcgcaccataaatgagtgtgattatttgaaagacgagatttaaatgtgggttcgagtaggacatctgggacaatgggttaaaatcctgatcatctatcgtggacagtggtaatccatggacacatgatcattcccaaacaacagaacgctataaaatccttcgtagggggtaggatgttctcaagctccaagaacgtcattacctgcactccctactccgccaacctcagttgggatggcattacttacaccgcgaccgagaacctcatatcctctcgaacttgctccacctctagtggacggacacgtagcaacaatctcagttggaccccgtccatccagaagtattcgaaacacacaaaatagatatttaagggaggtagaagaaggggaagtgtgcgcactgatgtaatatcctgctcagtgccccaaaatgatgaatttgcccatcacctttaccgaggatgataccaaaaacgtctgcttcccccataatgatcctttagtgattgatgtgtagatcgccaaaaaatgagtttccagggttctcatggacaacagaagctcagttaaaatcttgttcaaatttgcattctagacaatcgggcttacaaaagcagacttaaccccttgcctcattcaattggaaggcttcaacggggatgccctaatgctgatgggtaaaattcagttgcctatcactctcaaaggggagaataatgcatgtgctttcaagcactcaacctttgtcgttatggattacctaactacatacaatgccatactaacgcgaccaaccctagtggactttggggcagtaactgttggaaattatttta

SEQ ID NO: 299688 - DNA, 4367 bp, Cannabis indica
tcctatacaatcattttgaacaataattttgttttaattttctgttttttcttcccttttatattctaaatacttttcaatagaaacttcatacctaaagtttagtctttttacatcataaaattatagtggatgatatttttcttatataaaaattttcacatatttattaaatatttgatattaatttatttattttttattttgttgatgttcttttagtgggacaaagaaaaaaaagcacgaattaaggttttttttttatgatattaaaatttattatttaatttttacttaataaattttttcaatgaaaaaaattctttaactcaatgtagttactttattattattattattattattattattattattattattattattattattattattattattatctttttcagttacccttaaaagaaattactttcaatatctttctatattcttcataaaattgtttatataaaaattcattttataattaattgtttgctcttattccttaatgagattatttcataattatcaaaattatattatgaacttaacccttaatacaacaaaatacagtttcatataacttaatggtgaggtgttgagatatcaacttctaagaattcttagtgctactgaggcatccacgctagtttttccagtgtttattggagatattcctgatggaggaaggtggtcagaaagatagaggaatgagttctgagatttcagagagcaatcctgcgggcgatacaagggaaatggaaatgactgagtccatcctagaggaagagatgacggttgcaacccctcgtagggagattaacgaagaagcagatgaagatgtggatgatgaagaggtggatgctgagatggaagcagttcgacaacagttcctggattccatgtccatggatctcgaagcggactttgagcttagtgctgatatagtcaagaaaggggtgttagcaaaaatctttggaagaaggagcctgtcaaagagcaaagttaaggaaatattaggaggaatatggcgtctaaaaggaaattggaaaatgaagactctaaatgccagtgatggtgtctggggttttttctttgatagtgatgaagataaaagttttatcctcaagcagagaccgtggctggtaaacggcttactgctaaacataagggactggccggagaatggtgtatggcaagaggttaatatggcggaagcaagatattgggtagaagctcatggacttcccaccccgtatcttacgtgggagaacaatgatgttgtcgcgagaaagattggtatctacatagacttcgaccgtgcctctagaaccacaatagcaaggagaggtttcctcaagttcttggttgatttaagaatcgatcaaaagttagtggcgggattctatctgaacatttcgagggatagaaaggaatggatacaattcaaataccataaactcccggccatttgcttcaactgtggaatgataggccacttattcaaatgtgaaaatcccactgaatatgctttccctcctattggtaaagcagttcctttgtatggtgcgtggataaaggccggggtccccattcggagctgtttcgattcagctctaccgcagctacggagaggaaggatggagttcaatcggctggcgagagctccggtgagttcaaagtttgacaagggcaagaaagtaatttcacccattgataatgacccttctatgggttcagatcatggtacaacccatcaggttaacgttgggggaatgggaagcaaaaagacagcagcaaacccagaagggaatgctctgaagttcaagaaggttgttggaaaccaaagcttagatggttgctcttatttgagaaatgctagtacgatgcatggagaggttaagggaatcagacctcgggcccaccccatgaatagaattaacaatgacaaaagagatgaaggagtgatcatgagctttatggctgacattgggcccacccgagaccaaatggtagaattaccacatgaagaggtatgtaaatctaggaaacctcattcttttcctgagcccaatatagtcgaatggcccattaacaaaggccttgttgaggtggtaaatgaggcaatgaatccttccaaggaaatgaatgctacggcccaacagtacataacttgtaatgatattactttggctactaatgggcctatcttattgggtcaaaagaagagaaaggctactgattggattatccctatagcccaaaacccagatcctgagaaaaaagcactggttttgcctgctttggaagtcgactgctactcggctggaagtaaagggggagtggaaactggctcatcgtcaaaacagaggcagggaaagagagtttgtgcaagtaaaggaaggaaaaaagctactgggagaaagcaaatccagttgggaagcccagtgaaatttgacttaaacaatgagagaaatcgcaatgagggagagcgtgaattggaggaagatcgtttggtggaggttgctattgaggaaattcagaacttcaaaatgggcgaggaggcggcccttatcaacgcccccacactcgccatgaggcttctttcgtggaattgtcggggtttactcagggccccggcatcccaagctttgtatgcttggattcaaaggtacaaacctgagtgtgtcttcctcatggaaacgaaatgtgatgaggaaggaatcaaaaagttgtgtaattctatgggttttgggaagtatagtgtaagtccagcagtgggtattgcgggaggttatgctttgttgtggcatgaggatttaaatttatctattaagagggtggaagatggagtgttttttgcatctgtgtgggatcctggaaagcactttgaatggatccttataactgtatatggaacgccgtatgagaaccaaaggagactgttttgggagaatatggccagcaaagttttggaattgaaaaagccgtggttaatggcgggagatcttaatgttctagcaaatcctgaggagaaagtgggcgggcgaaggttaatggataaagacacgaggtatttacgcaattttctaagggataccgggggagtagatcttgggtacaagggttgtagctttacctggcaaaataaccgttttaatgggatgctgactcgagaaaggcttgaccgtgctattgcttcgcacgactggttattggagtttcaatttgctgaagtgattaatcacccgattactgtatcggaccatggcttcattgtggtagatacagaaaagggtggaaggagaaagttcaagccattccgttattttgatgcttggagtagagagaggtcttgcaacgaagttattaaagaagcttgggtgtctgatcttggagcaagaaacgatagtctcacgcagcggtgccaacgaacaagaaaagccctccaatcttggaagattagcaccttcggtaattgcgatcgtaaaatcaaagatattgaagtccgcttagcatggatacaaaatcaaaacatctcgcacaatctaaatgtcgaagaagataccctgagaagagaattgcgagagctgtggtataggaaagagagtatgtggaaacaaagatcgaaggaaaattggctgaggttgggtgatcgtaactcgaagttctttcatacttcgacaatcatccgacaaaggaggaacaagatacaagagatccgggataagcatggcaattgggttaatgatgaaaagagagtgactggggtgttttttctttttttcaaggaacttttctcctcttccaaccctcaaatagatgagcattttgaagagctttttgaaccgaaagtcactatggaggagaacatgagtctaaggagagtccctgatggtatggaaattgagaatgcaattgctaatttgcatcctctaaagtcccctggacccgatgggctcccagggtgtttttataggcgacattggaaaattgttggggattcagtaatcaagatggttcaactttttttctcgcaaggggtgatggaacattctttgaattttacccatatttgtttgatccccaaagtggagaaaccggagacagttgagaagtttcggccaataagtttatgcaactttggttataaaatcatttccaaaatcctagctactagattaagggctgtcatggataaacttgtgtctccggtgcaagccgccttcattccgggaagatggatagcggagtcatcggtacttacgcaagagctggtccaaaccattcggaaaaagaaaggaaagggaggcttgatggcgattaagctagatatgcacaaagcatatgataga

SEQ ID NO: 299689 - DNA, 1956 bp, Cannabis indica
aaatttaaaatagatatttgttattagtaatagtctcacattgctaatgcgtgaaaaaataatattatatataagatgcgtgtgctatttttttcattgtcaattagttttgagatagaactttatacatcactatttaaatctcattttcagtactgtaaattattcataattgtttaaaaacagacaaaaactctactataattgttataggatgaatttctcatctaaataatgagtacaatctcgtatttgactgacatgtggacccattttttgataggaaaaagatgatgtattaagaaggctaacttctgcagggtaacctcgcacaaggtctagtcacacactatgtcacaaatagtgaaaaaggataaaagtgagacataaaaagaagttagccgcaacatatatcgaatatatgcgatgacttggtgttttaccccacgccctatgtaaagatcgcatctctacagtgattggtctggatgactagtgtgcccgacaactcatccgaaacccgcgagttctatgttgtttgtacataaatgcacaatacgcgatcgatcagtcacagacgtaactatttgctatagtaacttatcaatgtttctacaattaagtttataatgaattaaaatgtaattttaattctacattactaaacttaagaattaaatgagatttaattgaaaattttaaattattattcaaatatatacatggatatggaattgcattctgatcatgtatgattaatgatttattaaggaagcattagtataaacataaacattcaattagaatagtctaattggattaactcacatttaaacattcattagttgaatctatttagtaaaatagattgtaactaactatttaaatcaatataagatatgatttaaataaattaaaagtattttaatagatgtgtttggactacaacaagattgagaataattaatagaaagtgttcatataattaaatctcaataaatatgacaattaaaaggaggataattttgaggagtcgaaattaaatttaatagtcataaccattaattaaattcataagttataaaatattttagtgagagtatattactcattaaaataagattatttaagaaaactagattgtttttcataacaacaattagtgtttctaaattaaatttttaatgaaactaaattgttttcaatgaatgagatttattaaaatacaatctataccaataaagatttgaatgtcgaactaatttaaattagtggttattttaacatatggaacatgaaagcctaatgagaaagaaattaatgggaacgtgaacactttcaaattttgaactttggagtcaaaatataattattcaataatcatcaattaatggtctcattaattattcaatacattaagatgatattaaatatgaattttaataagtgataaaactttaaccttattaaaatgatattgattgcaataatcaataaaggtatatgagaaagtttagaaaaaagaataggaagacttagtcattgacttcataaaatgaatatttgagttattatatttagatttaaattttgatgtgattgaattcaaataatataataaagtagtaataattagatatcatatattcttagagaatatagtgattgatatctacaatgaataattgctaataaatagtattgctaaatatgaacttaataatacatatatagaaattggggatattattaaagagttaaataaacaattcaaaatgatattcaaagtatgaaatacaagttttaaatatcattattgtttaattgtcgaaatttagggatacttgtacaatgagattaaataagtaataaatttcaaatcataaattaagaacagtcttaattaaaatgatcaaagacaatgaggggtgttcatccgatccaatccgcactttt

SEQ ID NO: 299690 - DNA, 5022 bp, Cannabis indica
tcagcgacttcaattcatctggggttccacagcgactgctaggtgcaaaaaaatttgtaacatggtacctgcataacgattaaaaataaatggatatatcttaaacgacagaagatacttcaaacaaatttcataaaaaaaattatcaaacacatgcaaagtacaaatacatctcagctcatgatgaagttgatcatagattcatacccaaagctggcataataagagtgctcttgaatggccatgagctgaacagcattgtatccaagttttttaatgcggggaagcacatcatctctaaagtttgcatatgtgttaatcattggctcctgcattgcagataatatgaaaagcattaataaaaaggagcaatgctaatttttcagccagcaatagcaatacgacataatgctggtaacagtagatcataaaacacgaaaaaatatagcattagtaaaagggaggaatgccaaattttcatccaacaatagcaagatggtgtaatgctggtgcagttgatactatctacaaatcatcttcttaaatgttgtcaacaagtaactacttttgatgtgatcaaataatgtacattcatccacaaatcatatagtgttttcctaagcaagaaagaggtagtgatagttgtctctctctactttccttccagaaataaaaggcccttgaacttattttctccagttcttgaaccattttcatttatttattttgggggaagaggagaggggaggggtgcacaaactaaggccactaaaatatcaacagccctcaacagatactgactaacaagagaaacatatgagctcatatctcatatatcctatgattaacaacgcacggtccatcaaacacttcttgctttacctaagaatagtttcacaatataacatgaacattccaccataatttatgagttacaaggaagcaatgcacaccgtactactcattccaacatgtgcctcgtaaatacgaagtgattttggtctctttggctgagaatgctggaagacgtacttttcctgtaaacataggagcaagagaataattagccatagtaagggacagaaatagtgaaaaaggctatggccttgcatttttggcctagtttaacttccagaagatgcaattaataaaaaaataaatatataaaaggaaattctgttaagagagtgttatttgatttatgaagaaacatcctgaaaaatgatttaatattcaatatttgatacaagagaatcaaatgttagacttttattaacacatgggttgatgaatagttccttgccattttagccaatataattagggatctatagttaatggatttagcatctgtatgaagtcaagttgaagcagaagtgtggacttttttggttaactaaaacctaattcaacttttgtagctaggtgggtactctccccaacactataaacacatattatctcacaattgtagcttttgttgatctattaatctggttcaattttagaaatctagggaagaagacctagtaggttagtactgcactaccaattcctattctttctccattaactctatggaagatatgttttctatatcatttaattactcatagtattctaaattgtatgcgatattgtatcccgatgttataaaatttccaaaatcaaaaccatgacaataattatgaaaggaatatttgaaaagccatcaaagctgatattttatgtatatacatattcacatataaaagttcattattttatcctcatttgagtgactaaaatcatttgtctttctttcagattccaaagaatccttagggttagcattttaagctgagaaaatgtatttacaaaacaattggcaaaaatataccttctctggtggatcatagtatatgccattataaggaatttcacctggagcctgtactgaaaacctgatccaagcaggaattgaatctttaattccagaaggagtatccatgcggatctgtgagtacatgatcaagatgaagtcactttcaactgaaaacaccaatgatatttgcatcccagattaatgtgatgacaacaatattcaaatgcaacggtgaaataatcttgtagcaaaattgtttaaatagaattcaagaaccaatatatgaaaaaaaatcaccatatcattccctatgaaagaaagtccttactattcgaaactcgtatgataaaattaaagctactttggagtcgatttatattgagtgcttacaaaagtttgatcaaagaaactcttttattactttttgcccaagcatatcaatagggggtcaggaacatggaacatgactatgatggactatatttgtcaaatcagagttggatttggaaaggaaacagtagtgacctccatagtggactattttaacccatttgtaagcctaggctttatagtctcaatgtctaattaaactcctttatcccttgtgtgtaaaagtaggcatttctttcttctctgttcaggttctctaataaagtgccgcatcatttttttatatatttcaaagcacaatctcctaataaaatgtacccaatatactttttcatctttttttttcgcaaagtatactttccaatttagtcattcattacaggatgcaagtcttacagctaaactaatccaatcctacgcactaagtaagtcttagtactaaaataatctaatttatccaattgtaaacaacggtctagagcaatcctgcttaccaaatgtaccctatttcaactaaaactacagctttacttttgaaacatggcttatgtagcttattgtcatgggaattacattggtattagataatctttatcaaatatttatccacaggaaatctcagtacattgcgcttttaatacatatggtcaaatactattggcagtttcatcacttattacaatatttttttgtatcttatacatgaaaaagaaaattgattatgagtatttaaacactaaaataccactgaaacaattacatttataatgcatccaggaaaaacctacctttactcgagaaccatgaggaattgcaggtgaaccatctgcattgtttggcaaaaagatttcccagacaccaaattcattctgttggcatatgaagtgtgagtatcattaactatttatattttgactaatagagaaatgattgactgggaaacttcacgctgattaaatattattccttacaaagatttcatagaaattattaagactcagaacttacccgcatcataacatccgcatttggattccaattgttgaagtctccaatcagagatgctgactgaaaaaacaggaagcaatcactacttttaaaagaaaaatagggcaatctccaatggaagtgattgaaggaatgtgaatgaaactcgagcacaatggatattcctattatcagtgagagcataacagggcacgcattatctaaagagcacacaaatcctaatgaaaaatgtaaataatctagtcctcatatgatcattgtcatagttcctagtatgaaagattaaggataatggaagtattaatatacaaaacacgcataacaaaccttagctcccggtgcccactcccgatatgttatacctgttgcactgcaaaacaattgagataactatcaggaatatacttagccatattcttatttttttcactcaattatctacctactaatttatatctaccaaagcacgataaattattaatcaaactaaaaaataaaactatgcaaaatattctgagaaagtgatacctgcgttgaaaaccaaacttttcaaatccacgagaaaacacctccaaacctccttcgtacttgtcaatgtcctcacgtagttttttgtattgcccataactgtacagtaaagtttaaatattcacctgtacgtatatacaagaaaaaggaaaagagaaaatgctgcatggcccactcaaaggcaacaaagctttactgaatttgcacagattagggaaactaaactaaacaagaaaaaaaaaagtcaaatgactgtattatgattcttcttcttttttattttttgttggctgactgcctatttaacatcaatgatttttttgctgtatctatacaaacaaatatttatggcagcaaaggcgttccctgttctatgcagtcaatatagtagttaaattgataaagaggttcacaaaattttaggtaaattacaaatgtaaaaccatctattcgcctaacattaaagtacaacataaagcctagtaaaccagaggaaaatttcaggacaactctcagtaagttttaagtcatatttgtaataaaaaaaaacaaaaacaaaacgaaacaaaacaaaataaaagtctcaccgatattcaaggtgttgccggtaaccatttaacattggatctatttcatatattttttgccccgggcccggtggtggaatggactttacattgaagggaccagctgcttcctcgctaagagctttataatcagttccattgttaacatccgcatcatgttccattgttatatcatctacatcaagaacctatacaaaaatcatatcaggtggcaataaagatgccaacaataagtatcatttattaaatcttacttgaaaagtgtaaaatgatcttaatgtttatcaacttcaaaaccatagtgaaattaaatgacctaaccttttgattcattgtccaagttttccgatatcacaattatccatattcttaatttctttttaaaaatacactaaactagagactgataaaatatttacagcaaaaggaccattgtaaaacaacattatgtatgtatatttattttaggagtaatttgcaacataaatacataagtttaactctcggttgcaaataaatacctaactttaatttttggtagtaatagtacctaaattatatttttggaactgtacttaacccttaaatgtcaagtcattatccacgtgtcattttcttattggtatatttaaattattgtttttt

SEQ ID NO: 299691 - DNA, 1707 bp, Cannabis indica
tctaaattgtgttgttgaccaggctgataaagtcagaggttcccaagtctccaaccatgatacattcgcaatgacttccttttgaacactagtggggtggatcttggtagtatcgagaacttatttacttagtcgaataaaagacaggctttacaccttataaaagaaagatttgacaaagttatcaggattcggattggattattttgtttccaaaagctggggttaatccttatcaatcaaagattctgatcatgctctcgtcttcttggattgttctttgacactaaaaaatttcataaacccttaagattcttggacacttagactcgagacccgaattttatggaggtggtccaaaaatattggctccttgtggttaatggatctaagagtttccaactggtgtctaaacttgctaatactagaaaaaacgctacatggaacaggacacaatttggattttataaagataagatggttatgctggatacttttctccttgagattcaacaacgaccaccctctctagagaatgctcaattggaagcagacatccttcttgaactgaatgaggttttttctcagcatgactttatatgtcatcagaaatctcataagacctcgtcgcgagatggggacaggaataccaaattcttccatgcctctactatgatttgtggaaaaaaaattattaaatctgtcacaaagatggtgttaattagattttacggtgccagagtattgggaactattccttggacaagtttaagagcatcgatcaatcgaatcaaattccccccattgagctcactgaattaatttcccctatgatttcagcccaggagaatgaggatatgataagaattccatctagagatgagatcaagaaggtggtttggtcaatgggccaactaaaggcttctggccttggtggcatgccaggtcacttctactgtgcttattggcatattagctggcaatgatttggttgatacaatcattgagttcttcaggttgggggaattttcaaaggaccttaattgtactttcattgttattattctcaaaagggtggggctgttaaatgtgatgaattctagttgatttctttgagcaacttttcttacaagataatctcaaaaatccttgcaaaccggattcaatcggtgctctcaaaaattatatcctatttcattctgctttcgtcctaggaaggtggattgtcaaaaatggtatacttgcccatgagttgattgattcctttagaaagaaaaaaaggacaactggctttgttggtctcaagtagacatgtcaaaggcctatgacctccttgagtggaattttattgatcaaaccctccaggcattcagatttggggacaaatttcagcaactcatctccagattcatctcaacagtgtctttctctatttttctgaatggcagtctacttaaactaggggtgaaaatcggtcggttatggtcagtttttataattttataacctaccagtcggttacggtttttattttacgaaaaccataaccgaccgtttagaaattataaccgtaacaaaccgaccgtacggtttttgacagtttttcagtttggcggttttggaaggtttttggcaattttggaaagtttttggcagtttattgcggtttttggcgattttggcagttttttggtttaactatttttt

SEQ ID NO: 299692 - DNA, 3961 bp, Cannabis indica
tagtttttaagtttttttttttagtaaagtttagtttacaaatataattttcacattaaaatggggttttcattataaattagtttcattgtattttttataaaatttctttgtaaaatttaatagctcttttatttttaaatcgtataatcaattacaaaagtttaacatacaccttaacttttactaattgataaagttaaaggaacatttttaacaatactactattacaagggccacaatcatataaatgacaaagtttaggagccaaaatagttttattctttaacaaaatcttaatttttactatctgataaaatttaagggatttttgacaacgctaatattacagggggcacaatcatataagtgatagagttcaggaagaaaaataattttttattcattataataataagactccattgtctatccactaaattgcaaaggaaaatgcacgtacaattttgcgtagccttgaaggccaatggtaagcgctctgtcataaaacttttgcacgaacctacgacgtataaatctgtcaccaatctgcaaaagatagaaatataactaatgagcatatatcttcacatgaagttctaagtaatgaacaataaaaaagctaagttagtccaagtaagaaatattaggataaatagtcatgacatatatttgtattaactcaatatgatcttaacttctagtatgcaaagttctggagtatgaaaggaagaataatatttattttagtatgatcttcatttttagtatcacaataagatctatagatgttagaatattaatggtaaattagttagaagataggatcaattgtaattatttcgtttcatattttctcttatactttcctattttagtttttcttaagttgtataaatataagacatttacatgaataatatacacaattctattcaccgttctttatatggtatcagagcaatacttaaaattgtgattcgaaattctacaataagattcataaaaaaaaattagagttcgagtgtagggtccctttttcagaaaccccaattggagtgtgagtttattctcactgcccacatagacggattgcccagtcgccgatttgcaaaaccccaaagtccggcagtcaaattcaccgcaagtgggccccatgtacccaacttgtctactactctctcaaagtcgaatttaatagaccttgctaagaacatcactaatgacttccagatgacacatacccacttaaaaagctcagctaaataactaattgtgctttcttctctctcctacttttgagttttttcatgcacgttatgggggattatcgtggcccttccagccatggtaggcaccaaacccccattggctttgggaagaaaaggggtcataaccccactagtttggcctacaaaattatccagtttcttttgggaagcaggattccatagatactgaagttttagaactactcataaagctttcatgcttatcttatcgaatgatggaggctccatcagaatatgcgaaagaactaggttgtcgggtttcgagatagcgaagccattggatgctgcaacatggacaatcaaaactatggaggaattggaaaaaaaaaaaggaagttagaggggaacttcaagaggactttttgcaacagttcaaacaactttttggagagtttcaaaaataggagaagggtgttcatcaagttattggttcttaaaaacaatagtatatggtcatcataccagagaaaagaaatgtcaggggatggaatgagttcgcaaaaagtttaaatggtgttttgagaagggatacgagtcagaatatcaagagaaggcgaccaaattcagaaataaaaggccagtagaatcaaagtcttgggtcagtattgtaaaagattcgatgaagccaatcccgaaattgaaatacaaggagaaaaccactgttacagctgctacttgcagtcgaggggatatagaatggaaagacctataccctgcaattaatcccagttttaaacaaaagaatccttatccaaaagagagattctttcaacaaaaacttaggagtacatgcgttccaaagctcaacccaggaattggaggatggcattattcctcactcaaaacagccacacctcttgagcaccatctttcataacctctccagagaattagaaaggaagttggtggttagtcagctctttaatgacaagagaggtggttataccacagaacttcttaattatcattctccccgtaaagcgaggtgggagtgaaatatggagtgttttcaaagaatgtggcatctcgtgagatagattttctttgtgaggggacaaaaacactgaaacctttatgagtagaagaataaccaataaacacagttttagtggctcgaggatcaagtttcgtgcgagttttcgagtgaatattgttgacctcaaaaaacgatcaactgacagttgggtcgtatagatctgatgttggccacgtgtcaaacaaatagattgaaaaaacaataaacacagagatttgttatagaggttcggcccccttgtggtagcgagtaatgacctactccccttttagttgtatttataccaaggaaaatactatccagatcactataggtgagatctgctatagcacccttaagattagaaaatatgaatcagtaggcagatctcaagtgttgacagcctagggggttggccagcctagggtgtcggccagcctagagtaggcgtgtgagagagatgaagagcccaaatgggtgtgtacaagagagagagagagagagagagagagagagagagactcagagctatatggaggctaagtaacttagaggcaacctacagaaattaggttttaagctagaggttaaggcctttatataggaggcctaaaccctaggtttacaattcaaatcccttgaaaataggatagttagctaggtatttacaaaagaccaaaatgcccttaattctagatattcttcagccagtctattgggcttttagggcccaattcgcagcccatgcttgtatccacgtgtagagttgtgcatggagtcctaccaggtcaatcttagtcgtccataggcctacaagggaagtctggccggccatgatccttccaggtcaatcctggccgaccatggtcctgccaggacctaacaggtcactgtagctccaccaagaggaggtcagcctttgagtgtggagaccagccttttgcaagttgaaaagacagctctgtacattgtttccttgaagaggtcaggttcccttggttgaacgaaagctcccttggtccggaagtcacttcttggctagccagcttgtgcacagaccctggccggcctataggcttaccctggccagcctataggcttctcttggccagccaaggatgttggtacagctccttgagggctcgcttcactcccttcggttgctgcttaacggttttgctatatcttgcatgaaggctctattctgctactggcagggcagtactccacctgtactctgtctttggcttacgtggacatgccacgtcaagtggacaaaatttgggataacatatatgaacaaaggcagtcccaccaaatgttttagcaggaagattgttgaaagagaaatgaggatatgaagtactgagaatatgatatggtgttttaaagctaagtgggtgacttggaagacggttaatgagataagcggcaataagaacagcatctccccacgagtatttaagagcatgcatagtgaacatcagggcccgtgccacttctaggaggtgacgattcttgcattcagcaataccattttgttggggagtatcaacaaatgaactctggtgaataatacctttttgagacaggtagggtcctaagatagaattgaaatatttaatgccagaatctttgaagggactactaaat

SEQ ID NO: 299693 - DNA, 3076 bp, Cannabis indica
ttattaattttttttttctagaaacataaagctacagactaatttcattaacaatcatcaatataaatattcatatgaataaatcagaacaattaaaaatcagaacaaataaatattcaagtatttcaataaattcataaacaaataagtcagaacaattcaaaatctcaaatcaagaaaattaaaagtttaaatttataatctttacaaatatgaaaaacttaaatagatctatctaccattgttgttgtcgttgcttaattactgaattcttaaacaaaaaccactagaacttatataacactaatatttatgtggctcgccacgtaactctcatctagtatatataaagttatatataaatctcttaatatttaaaaatccttaaattatttaacttttatatattaattattgaaacttagaattattgtgttaattctttcatatttattttaacaaatttaataatattagtatgtgcatatttttttattagttaaatattaaaaattttgtaaacaaatcttaattaaaaaattttgtaaagcttattatgttttctaaaattatataataatttttgtaaaaaatattaatatttttatagtgctaattcaaaaatatatgtatatatgtttactaatctcaccgtaccacgtaccacagtacggtgagtcctcaatattaatttttatatgttttttatttgtagtatatagattttgtgaaagaatgggtactattctcaaataatttttatatttgaaaggtagtttttttcaaaagaaaaacactaacacctaaaagacatacatactcaatgatgtactacacattagatgatcagttacacctttatgcacactcatttagacacatatccaaattttaatcagtatttttagagtaggaggaatactagaataacttacccattttttttcatatatgtagtgtgcgttaaatgcaattagctgcatgttaaaaaatgaagtgttgttcaaagtggatactgttctatctttatgattctgataaagttaacaaatttattacaggtatattctgtcaaaaatacaacaaaatttaatgcacagcaaaaaactgttagataggcatttataataaaaaaaaaatgttaatggatacaactattttatatttatgattctgttaaaattaacagatttattataggtatattctatcaaaacgcaacaaaagtaaaatgcacaacaaaaaattgttagataagcatttacatatgtatgtaagatatatatattcacagagtccaaaatagcacaaaaagaacttagaaacaagttactactgattcctctaaatttacaatacacattaaaaagcaaatcgaaccaatgaatttcccattaagctatactaaattataaaccactaagtacaaaccctacattaaaaatacacatgtctatatttatatatatattgagagagagagagagagagagagatagttacttagtggcagaggcggactcttcttcaagccaatttcttatgtgcattagcatttcgtctgaagatggaggtggactgctttacatcagacctgagaagaagaacgacggcgctaacactagctacgatgaggataaagttggtcaaagccattgaatccaattcctagcttctcaattataacaatacaaacaaccttaatctcagtatgaggattttacagagttttttagagatgaagattgtaatttgttgacaacattaatctcccaaaaacctctatgtacaaatcaagaagatgccatacaaactaactacaaggatggcaaccagccctttcaagaaactttcagaacaagatttatggtcttaaagtcattaatgaaaattagtagtaaccatacgcaggggggctaagttcaaaaacgttctccacctcacttgggattcctaagcactatgataaccaagtctctgcgtaaaaacattttgctgatgaatctgtcttggtttactgacaacacttaaatcaacttctcatatatgggcctacaacaagggacccaatacacgaacacacttatatttttctttataaacacattatggtataaaccataaaattacaatgtctatatttataaaagaaaataataacataaaacgattttggttcactaatatccattacctaatagtacaaaagatttaagaatgtacaaaactaatcaacaaagcaaaacaatcctagaatccactaagcaacacacaatcaaacaaatctataatctactactactgagtggcatgcaatcaaacaagcctataatctacaacaattgaggagcacacaatcaataacaacaagaatacatagttcaggttcaaaatttaacacttcataaatctatacataatagattacatactctgatatataaaattataatccctaattttttttttttgtatgagccaacactaccagatcataatataattatacataatgataaagaataacaatccctaaaatgtatatttaataattgatcttgcatataaatccaaaagatatatattcggctgcatagattcataatcatgcccactaaagaaaaatggctaaatagagatattataccagggtaatccagttcatgacaaataaataacatacacacacacaaaaaaaaaatgaatcagataaaataatataaatacacaaagaaagatggagagattgattgtacatgttggagcttgaagctttgctaccgcctgtccttcgtcgagcactcgagattggggtcttggatggaagccgtcgagaaagagagaggttgggactgggacggaaggagtcgtccttaaggctggggttgaggtgagagagtgggagtcgtcggtgcggcggggttggagatgagggagcgatggagccgtcgtgaaaaataattatgttgttttgttggtgtaatgaagtgaaaactacatgaaaatgaaatatgggatttcataccaaagttagaaaaatatggtatttttaggtttgccactcttttatggcatt

SEQ ID NO: 299694 - DNA, 3101 bp, Cannabis indica
aaactagtagggtgttacaatggcggtcagttttggtttttttttaaaaaaaaatggttaaaccaaaaattgccaaaatcaccaaagacagccataaaccgtctaaaactaccaaaaactatccaaagatgccaaacttaaaaaccactaaaaactgccaaaaaacatacagtcagttcttatacggttattattttgtaaaaggccggttacattttttgtaaaataaaaaccaaactgacagatcggttataaatttgtaataactgaccatagctgaccaattttcacccctaccaaaaatatgcctgtctcatttttttttggacaaattgtcacccccaatgtgatctccacaaaaaccttcatgaatttcttgcattatcgcatgtgcttcagttttagccatgcacctaagataagacatagttagtcccctcaaatatagcttctcattaatcataatgtatcggggcccttgatattgcaacttcctagacatggccctatcctggggtagctctccgaacgtcaaaaacttaatcaaggaatccatccaagtttgtccttgattaactacttgaacttctatcttggaaaagatactaggttccataaggtaggaaatggggactagccccagtttttccatttctttgtcggataccaacttagccaggcagtctgcttgggcgttattttctcttggtatttgttcaagcatatattttttgaattttggagtagttcctggatagacgagacataagaagccatgcgctctcagcgagcttaatactcccctttcacttggttcactaccaattaggaatcattaaatacctcaatatgcgagcccttaccactgtagatagtcttagcctgattagcagggctttatattccgcctcattgttagacgcattgaacttgaactgtaatgcactttagagcttcaagccctctaggaatatcaatatgatatcggtcccttatttgttctcgtttgtagcaccatccacatacactttccaagttgatatggcttccttgactacattggaatcctagttgccttcattacattctataatgaaatctggcagaggttgccctttgattaaaatgcgtaggacatactaaatataaaattggcttaactccatagcccatttgaggagttgaacggaagattcaagtttttgaagtacttttcaaagagggtgattagtgtacaccttcattacatgagcctaaaaatatggccttagcttctaggaggcaataagtaggcagtaagccaacttttccatcttccggtagcgtatctccgcccccaccatcctcttgttaatgtaataaaccgggtgttgaactttgtcttcctcccgcactagaacggcactgattccatgttttgaaactggcaagtataggtataggttttcaccctccactggcttagataaaattggatctctaaacatgtgttcctttaagcttatgaacacagtctcacatttttctgtacactcaaattttgaatatttctttagaatgttgaagaacaaggcgcatttgtaatttaacctagaataaagtgactcagagcttccacttttttttatgaggctttgtacatccttgtgtcttctcagggatggcatatccaacaaggcttatatcttttcaagattggcttctacccctctttggttgacaatgaagcccaaattttttctagattttaccttgaaaagtgcacttcttcaggtttagcttcatcttgtacttttgcacaaccgcaaaacattccctgaggtcacctgcgtgatccttagcggtcttgtatttgacaaatacatcgtctacgtagacctccatgttacgacccagcaagttttaaaacattcagtttactaacctctggtacgtggctttggcattcttcaatctgaatggcatgaccaagtaaacgtatactcctttgtcaatgtagaagctagtgtgttcttggtccgcgatgtgcattttgatttggttatatctagagtaggcatccatgatggatagcaactcatggttggatgttacgtcaactatctagtctattcttggtaaagggaaacagacttttgggtatactttattcgaatcggtgaagtctatgcaaattttccaggtcccgttgggctttaagacaaggaccaggtttgccaaccattttaggtaatatacattcaggaagaagatgttggctaacatattttgcacttctttctttaaagcttcgacctttatgggatctaagggtcgtcttttgtgctgcattgtgagcacatttagattcaagttaaaaacgttacagatctcatttgagtcaatacctgtcatatctttgtggtaccatgcaaagatgtctgaggactcctgcagggtgttcaaaatttcctcctttacctcacggtcaagattccttcctctacgaatgagcttgggcgggtcctagtcacaaatttgaatttctttcgtttcctccatgggctccaacaccctctctgcccctataagcggatacaacttgtcttcctcgaattggtggtttatgtcccttctttgatcgactgccaggatcgggtgctttgaggctacatatgtaacattttttggcctcagcttggtttccttgaatagttactaatcctgcagactgagttcggaaagtgagacataggtgtcaaatcgatgttatgtccccaaactccactgagctggtcctcccaagatagctttgtaggcagttgggtagtcaatgataacaaaagtacaatactttaaggtactttgtggagtatcaggacacaaggtgattggtagccgatttttctcatgggaactaatagtctcggaagtcagggacatgtttggtgatgttgaagggacaatgcttcttcaaatacttttcaagttggtaaaacccaatcttgctagtattggtctgcatcagttgaggcttcacatcgtaataatacaacacctcctccagtcctagaagctctatatcttagatcttacacatcacattgttggaaattatttta

SEQ ID NO: 299695 - DNA, 4403 bp, Cannabis indica
atattgatattcaattataaaatgacacagtactaagcacaacccttaatagcaatgctattattattattattattattatcattattattatacgtcctataattaaatgtgagtaattaagttccaaaggtaagatcttgtgggaccacttggcatatcgcatatgctctaaagtaaaattgtgatttatttccttaatactttgatacataaagacaaaccttatcttataataacaataataagatattattaatataatcataaaaagttaaaagtttttttttaaaaaaacaaacatataaattacaaacatactaaaatacattgctcaatattaaattagctttcctactttattattcaaaatgtatcactacaaatttcattttgtattttattttaagttttttattatattatacattagtttcttcaaaatacatcacagaaatattattttctttaacaattttaatatattttatatatttaaaatattttatacttgaaatatatactttacttaacattttagaatattttatatatttaaaatatattaatattaatattatatacattaaaacctaaaataattaataaaatttatttaaagtagtgaatattatatattttaaataagctttaaaatgaagtacgtagtttagaacatataataatgtagcattgttttactttgattcttattcaaatattttaaattatatttgaaagtttgattttggtgggaaaataaaaagtaagaaaaatgtagagaaaaaaagtagagttttttgcggttaaattttcttaactattgtttcacttgtacttaaccctcaaagttctaatcttagtggtaaaactttttaaactattaaactgttaataaatttaaagtgttatctattttctacagttaactgttaccatggactgcttatgtatacacttttatatacatgatacgtttatgttaatacatctaatattattattatttttttttttttgaaacaatctaatattattatttcaaaaattattttaaaatcaaataaaattataaaataaaaaataaaatattaaaaaattataaatattataaatttaattttttttaatttttgaataataatattatacgtactgcctaactggtttactcttaaaactgactttgagtatgacaccgaaaatagtattagacactagtaattcttttaacaattattataatatgttattattgatttgggattagttggttgtcacgtgaaattactcgtgcatgaaacattgcacgtgcgccgtagccaaagaatattaattggcatattcttttgctgttaattaatataaattaaaattttaatattaataaaaaaaatctaatgaaccccacatcgacctgtccacccacattccaatatttcttcatataactttattatatatattattattattatttcatttgtttatattaatttggcttataacaaaacaggtcatatttcctgtttaagagactagattcgactcattctccttagatcttcaccacacatttgttcacagctttccaatccaacggtaaatcatgaataaaggacattaatttcttttctcaattatttttttttaaaaaaaaatacgtaacaacagtgacgtttttatttctttctttttttccacatgatcaaaagcttataaagttagattatgatctcaaaacctttgtaggggaccactttgtatgtggaaatagaaaaagaaatgatccaacggtggggatttaatcttggactctaacgtggccgaatatagtgactcatggagatatcagaagaccaaaagcttaataataagagaagagaatcggttctttttgttcttgatattttgactttggtctgtatttattttccaaatatgaaaataaataaataatattttctaataagaaaataaataaataaatttacaaaaccaggtgcgcagtctctagtcgacactcaagtctaccactattattatttatttatttattttcaaattaaacacaagttactttaaattttatttgtatagaggtgatataaattgttttggaattatttttcaacataataaatcattcataattaaaaaaaaaatagtgtgatgatgtcttatataatgtatatcaatatgaaaaattaaataatttataatttgtcttaagtactaaaatgaaaaggctcctaacaataagataaaaagataaattatacaaattacacatacgctttattccgctacatggagtgtgctatatggaaggaggctttgagtcaaggcgagtgcctacgaggattgcaacacagtgcagtttgcgacgtaaggttggttggggttggagccgcttccctaatgagcctaataaaatagcgcaaaaccaatcaatgttatccctcatatagaaaggtcaatcgcacgagtgaatgttgcgattttgtacgagagtgtgaaagtgtcaatgcacagttccttaatatacaccataggcagacttatgtaggggtaggggtcatgaattgaccccctcaattttttgtgtgcgtttatgttacatcacaattttgtatcaatacaacatgcccttaaattgacacaatttaagcattttaatcctgattattttttatgacagagttcattatagtaaaactcatgaaaattttcaaaaaattattgtgaatagtttatactgccaaatttagattgtatttttccaatcatacaaaacaacatcaaactgcaattgatgctattgagacttaatagcgtttgtttcaattcgatggcctaccataggtgtcgatctagaatgagtacacgaaaatggtggtaggattatgccagaactaacgggaaatccctccctctttactgtcgtttcttgatcgacaataatattcaatattctctgtttgtaaccaacgctagctattaagacctgagacccaaatttgtgtcaatggtatattaattgtaggtcttaagaaccgatagtaaaaatataaatgttagtttataatcaaacgcctatatccattttttcaaatagtttatatgaaaataatatttattgaattaaatcattgaatataaactctggaagattttttttgggtggaagtgaccaaggagtttataataaatattagagtattgctatagattatctagcactattataagatgatgccctattattaattaatatttcttttataatttttgttaaagcaaaataaataagacttaatgttataaattacactaataataatattatatactattaagaatgttaagtatacgataccctctaacatttatatgaacattatattgaatttgtctgaatcttatatagagggaaaatataataaaagttgagaatgagaattaaattatgaaaatgacatatagttgtctcttatatgtatatctttttctttttctcaagttataatgtacatgtggtcgaaaaattattataattttattgagatatggtatgttataagtaaatattttacaataaaaaatgaatcttaatttttggatgagatgtaacaattatttgtattttaagattttggttgtaattttttttattgagtaaattcttgataattttaaattttttctaagcatcatacaattaaagaatactatccatgaaggaaaaataatcgagattatgaaaactatataataaacgtaagattatgagaactatatctagtaaaagtaagagattacaggtgaacatgattattttaattttatgatatatactatttcaaataatcataattaatcagcatgtgtctatatgtttatatgttaatgtaatatgagatatatgacatgtattgtaatatataaatatatataatattgtaatttataattatacattaatagtgtgttggaaggtactatatataattacttaataacttgtttaattattgaattccacataatttaattcaataattattataaaatattgttaatcaattataaagtatgacatttaaatgtgttagatattactcatgttttataatatgtacatgcataaatccacacacatatataaaggaaaatttgattttttatgcatgatttaagggttaattggttagaaaaacttaaattataggtaattgttagaatatgcccactttacctaaatcccaaaattacccctctcaaaatctcacacccattctctctcctttcctctattctctctgttcaaccgtcccaacccagccctcccaaccccaaccgaaccccaaacgacggccacacactggcccacgacgctcccc

SEQ ID NO: 299696 - DNA, 4294 bp, Cannabis indica
aataataataatttattttatatttatgcaccttgtatattgttgcttatgatagtttgattttcagtgtttgaaatttcagggtttttttttgacatgtgtgcgtggaagaaatttgttatatcttctacagttatttagtactaaggtttcttgactttgctgtcacactaactgctataaggtctggtgtcaatgccttcatgtttaattggccacaactttttgttagttttctccttatatgagtaatgctttctttctaatatggtattgttgtggaaatagaggcttaaatgtatggccataaccagagaggctcgcagtttctactagaattgttgcttgtttttgtcaagaattttttttttctgcataattttcctgtacgattacatgctgttctgtacttgatttggtaggggtttgatgcttacaagggctgtttgcttcctcaccttctggatttagatatatatatttttcttgatggttttctctcttgaatcaggttggacaccactatttcaggatcaacaaaacaggaaagcaatgagggcagtcgtttatttaagataatggctaaatctttttcaaaaaggtggcaaaatggagaaattagcaatttccagtatctcatgcatctcaatacttgggcgggacgtggatatagtgatcttacccagtatccagtttttccatgggttcttgcagattatgagagtgaaaatctggatttgactgatccaaaaacatttcgtaagcttaacaaacctatgggctgtcaaacacctgagggggaagatgaatttaagaaaaggtactctccagcagtacagtatttttccttgattttttttcaggtccttgaaatgtctgctatagtcttaaattacagtgataaaatgtgaatctagctatattttatattcttgttttttttttgttctcttttccaggtatgagagctgggatgaccctgaggtccctaaatttcattatggttcccattattccagtgctggaattgttctcttctatcttctacgcctaccgccttttagtgcggagaatcagaagctacaaggagggcagtttgaccatgccgatcgtctttttaatagtgttagagacacttggttaagtgcagctggcaagggaaatacatcagatgtgaaggaattgattccagaatttttctatatgccagagttccttgaaaatcgttttaatcttgattttggagagaaacaatcaggagaaaaggttagttttaatgatacttatgaggactatcatttcttcctcaatggtgctccttatgcacttgtttatttatggggtcagcatgcatttattttttcatggaacaattgaacattctggagtttttctagtgttaggattttttttttatctattttagaatgaatcttctaatgaacaattgacagacaattccagtttcgtccgtggggttcattcaattctgtctgtcactactaattcaacaatctttatgttcacgaagaactttttgtttttcaactaagaacagttttaaatttgctgatctgtctgtcattttctcaggttggtgatgttgtcttacctccatgggcaaaaggcagtgttagagagttcatcaggaagcatagggaggctctggaatctgattttgtttcagaaaacttgcatcattggatagatctcatatttggatataagcagagagggaaggtaggtgcaacacttttctcatttatttttttacagtcaactctctttaagggatgcagtatcactcaaccttcctttcactgctattgtggtttaatctggtccataatattggaattgttttcttttaaaataatatttatattggaactgtttttagagtctcgttttacttcaaaacaacttatgatgtcttctattgctccgtaatttttccgtatctaattttgcaatttatttgggtactgaataggcggcagaggaagctgtgaatgttttttaccattatacatatgaagggagtgtggacatagactcagttacagatcctgcaatgaaagcctctattctagctcaaataaatcattttggacagacgcctaagcaattgtttctcaaagctcatgtaaaaaggcgagtggacaagaaatttcctcctcatccactcaagtactctagccaaattgttcctcatgagatacgtagaagttcatcttccattagtcagattgttactatcaatgagaaagttcttgtcgcaggaatgaatagttttctcaaaccaaggacatatacaaaatatgttgtatggggttttccagatcgtagtttgagatttatgagctatgatcaagaccgactcctttcaacacatgaaaatcttcatgggggcaaccagattcagtgtgctggtgtgagtcatgatggtaggattctggtcactggagctgatgatggtttagtttctgtttggataatcagtaagtatggtcctcgtgctgtaaggcgattgcatttggagaaggctcttagtgcacacacatccaaaatcacgtgtcttcatgtcagccagccttacatgatgattgtgagtggatcagatgactgtaccgttattatatgggatctcagctccttggcttttgttaggcagctgcccgagttcccatctccagtttctgcaatttatgtgaatgacttgactggggagattgtaactgctgctggaactctacttgctatttggagcatcaatggagactgccttgcagctgttaatacatcccagctcccatcagattcaattctctcagtgactagcagttcattttctgattggttggatacaaactggtatgtgacaggtcaccagagtggtgcagttaaggtgtggcaaatggttcactgctccatcaatgagcattcccctagcaaatcaacaagcggtggaactgggggcttaagtcttggtggaaaggcgtcagagtacagattggtcctccacaaggtgctgaagtctcacaaacaccctgttactgctcttcacctcccaaatgacctaaaacagttgctgagtggggatgctggtgggcatttgctgtcatggacactgccagatgagagtttgagatcttcatttaaccgtgggtgaggacgagaagctctattgagtgacaacaagttaatcatttggagagccggccataaaatcttgattaaaaccaccaggttctttgagtccatggatacaggagttgctagattcataaagacatggaaaaggaaaaactgggcaacagggctttccttggatttgaaacatgacaagaagattcggttgtttcttatatatgtgaggcctgccacaaatataaccgtggaacaagcttctgaatgagaaggtgcattagtaggctgtgcttttatcttttgcattgatacgaagatgtcagtcgtttttgtgcaagacatcaagcctacaggttttttttcggggtagatgtaaataggtgggtattggtaatcgtgtatgtatagcagaaagtgtggaacatgggttgatgggctgaaaattgttcattggtagtgttttgtttttttggttgaaattctttttgcatagttcaaactgggccgatattgcccatttcttgttgtgaaatgtatacatgtctgtttatgagggtatcagggagtccctggtttttcttacagaagtctcctctgattcttttccagccttaattaatatacgtaggactgaaatctcgactcttcagaacttgcgaaatagatgtgtattttcttttattatatccataatccaatcccattatatgcatatctcctttgcagtctcttattaaaaaggttaattataatttttaccctctgaactttgacatgtaccaaatcatgccccctgaacttttaaagccattgaaaatgtcctctgaactattgagattgttggatttaaagacttttgtctaattttattcaattttactatttcaatgattgtttatgtactaaatcattgtaacacccgtatttttaatttactaaattcaaaagatgattttaatatattataactttataaacatataggtcgggattccgagtatcaaaatatgatttaaaagtatcttactagcatatacatatatatatatatataaatttacaaattcgtgaaccggcaactcaaaacacggactcaaaataagtgaaagaccgaaaccctctaggttgcactgccgcgatatgt

SEQ ID NO: 299697 - DNA, 503 bp, Cannabis indica
gtagcgtgccttagcattagggcgttacaggtattatggtcattctttgttttggagtttaggtggttttacctagttgtgacagcatgccatttactatttaatttaagttaatcatattattaatttaccaagttaatcaaaataagaaaaaagacaaattagaacaaaaattcaagtctctctccctccccattcgaaccctagagaagctaaaggggaatctggattttgagcttgatttttgtgatttcagcaaagattttgtgaagctcaagttgtggaaagaaccctagaatctggattttgatagttttctttggtttcaagtatgcaagtgttgaatttcaattctgtccgaacccaagaagttagggatgttttctaaagtgattttaggttggtttaagtttattatagctagaatcaggggctggttttgctgttgagcaagtttgagtttaagaactcaaactgttggaagttattttaccaggatctta

SEQ ID NO: 299698 - DNA, 6739 bp, Cannabis indica
tattgttttctattttttgttttcaaaaagtaaattaaaaaaatgagaatagaaaatagtttttgaaactttaaaatacaagtcacgtttggttagtgctttttaaaaacaatattgaccaaaaatgaatttatttttaaaacagaaaacaaaattttgttattttcaaaatacttttttgtaactttattttctgaaaactgttttaaaaaaataaagccaaacaagctaaattattttcaaaaaacaattttatatttttaaaaacaaaaaaacaattttttaattatgataccaaacatgcactaattattttaaaaataactttcaagtttttttaaataaaaaaaggatgaaaagtaaaactacttaaaaattagtaggaaaaacaaagccatatttaatgtaatttcccctaattagttaaagcttccacgccgcttccatccacccaaatcagatgaaagaaagttgcacaaatgaggcagctagaaggaaaatttaatttagcaaacgctgaaaactaaactcattgagacaataaggcaaatgcagtcgaatttgagcaaggaggctaagttcaccacaatgtattttccaggaaagttaacctgctgtgctatcatacttgtcttaaaggacacatatataataaaatagctaatatgggtagaacattacaggtcacaacgaaagatgatcgctagtagatgaaatcagagcgaggttattagacgttgattctccaacttgatgatccaaccctctttttcccaccccggatatatgtacacgcatttcacatttaccaaccagttcgaaaatgcagacgtctcctattttgacatcgtttccacgaacaaaagccatccaacctccacagaatgtgtgcacaagtcgcccttgcgagtctgggacagaattaacagtccaacactctccattcaaattacgaagtaaaatctcagttttataattagggaggtgcgctatagaaaactggtacgggattttctgcataaaatgaaacaaaacataaagtttcatatcttctgcacaggggttcactaaccaacaaataaatcaaatttagttcagatctaaaaaacaatctccaataaattttacgagaagtataacccagatacaagactcaccaaggtataagaaccgctaatgttgaatttcttcatgatcttcacgaagttggggaaacaagaagagaaggatcgagctgctcgttcttcgtcaagtgctaacagcaatcttggaccacttctaggttgtgatcctagttcatcttcgacacctcttgacctgtgaacaactgtacacttttacagtttaaaactcttttcaagtccaaaatattaaggagtataaacatttcaattatacaagtgccacagccttttaacgatggtaagagccaacaagaatcactattataagaacaccataacttaacatgctgttctgcgaaattggttgtgcatcattactactttctcctttccttattctaacaacaattaccccatttccacctttcaacgaccagtaaacaagagccataataaaatagtgtaaaacatacaagaacactgcaaagtacaaaactagtgtacttagtggcattattttcaagtattacaattggaacactcacccaactttttattggttgctttggactgagagcaaagtgcaactttagttaaagcttttgacgcactgctgcgtttctttgtatcattagcatagggagcctccgtaagcttctttgaaacttttttatcagatatatctaccagttttaaggttttagaataagccttagaagagtttcccctcagtttctttgacacacctttgatactcttatgtgatgtcacagcatgccctgtgttcggcctactagaagtaactttaccactttggcagtcaacgtcttcatctccaactccaagaatgtgcacacgaaattcacactcacccataagttcaaaaatgcagacatctccaatcttgatggcattgtaacggacaaaagccatccatcctccacaaagagtatgacttgtatgaactctagtagatggtacggaattaactgtccagcattgtccgttcagattttgaagtacaatctttactttgcaatttggaaggtgtgccattgaaaattgatagggtatgttctacaaaaagtaagaaacacacatgtacaataaaccaagaactcaaacaaatatactaaaagacaaataaaacaaaacgaaaacccaccagagtaaatgaaccgctgacattgaagcttttcattattctcacaaaataagggtagcaagaagtaaatgactgaaccacttcatgtgctgaggacatttgcacacagcctccaccatttacattaaatctgtctccattgctacataaactctgcaaggcctttgctttaaataaaactatatccaaatctgcaataaagaattatcactttaaaatctgttagaaaataaaataattaataataaacataaacacttgttattcaagaaattctttttcacattgataaaagatctttaagctaacagaattttataatacaaatagtttatgctataaacagggtgattatgtgcacagatgtaactacataaagtttagattgccacaactccaaaatgataatagctcttatctagtctacattctaacaggactttatatatgattcgtctctgctgtgagggaaaaaaaagagcttctataaattttatattgaaaaaccaagagaacattcagccaccttaccaggcctttcatcacaattttctgactgggaggtaatcgcataactctttgacaattgttgagtttcttttgaataatctatatgttcacatggtcttgtcaccccatcacaatggcatccattctgacgacataaatccaatactgcttcctgggttctgtgaatccgatctggataaagttcaggagaaccctctctcattttctttagaacaccttcaacaattctatctgaagacgagataccatcctcccttactcttttcttccccaaatcttgatcatggaaattttgactgcatttggaatgaaatgccacctctttctcacatgcactttgatcaaaaatttgcacagtgaaatgcaactccctgtcataccggaagattaaaaagtcaccacattccacgtaattatctctcacaaatgtcggccatccatgatggaggaataaatcaccattgttctgaatcaaattaaccagccatgtcttgccgctaggaccctctaatgcaacagaaccagaagatcttccttccaagtgtttcatgaatttcgtaggaattttctgcgatagattgcaatgtgtcaccctccaacaatgcaacaggtattccaccaaaatactgacaagacatagtaacgtttcctttcacgaaagcgaaattcaaagaaaagaaaacccagcaacattgagcatagatgaagtcttgaacaatctaattctaccaaaaaatattcagcttccttacattaggcagtaggcacaggcagtgcattagttagagggtagtacattacttccaacttagatttctgggaaaaggaattcaaaatgtaggtgctaaactactagttttgggttttagttatgaaatgaagaaccttatttggggtttggaaccgctaataactcaatttcatatacctgatttactctcaaagcatgcaaatgagaaaatggacacaataaatagccaaaatcaaacatttacccaatcaaaatcctccctttttccttgaaaataaaaattcctaacgaaaaacaaaactctaactctctcctaccaaatctttctaaccattataatcttcatactgtaatacccagaaatttcccctaaccctaatttcttcaaacgcacaagaaaaaaaaaatcaaaaacaaaagcagaagaagaaatacaacaataattaaagaaaaaaactctattattatggtgaaaagattgattaccagttgttctgcgcttaagtgagaagagtaaaacgcatagaagtgaggccttttaccactgggcagcactatcatagattctgtttccatggaaaccaacagtttgacctttctcactcaaaagaactgatttttcagatcaaattttctaggcaaccaaacgacccttggacattttcctggcaattacatgaagaaaaaataatgaaaataatgagatgatcaaaactcaaaactcaaaactcaaaaccaaactgttttgtttttggttgaggcattacaccaccaccagtactacaaggcgcgtgctcacacgttcctgtaagcaacctttggggagactgagagtctgaaacagaaccgaacgtattcacacgcgatttcattcgcgtgaacgtttatatgaaaatggctcccccaattttattttacttaatgaaagtaaagcctatctagatatatgcagcaagtacacatttagaagagtaattacataaacaagagattagtagttgaacaaaaataatttaactaattttaatttatacgaaacttaggtgcatgtaacatactagatcactcaattaaccatttgataattaaatactaataaatgcattaatgataaaaacgattttaaaatacatctcgaaacgctggcatgcattatctgtctttaatgcatgtcgcacgttttagtgtgaaaaattagaacataagagagagtatttgagaaatgatgctagaaaatcataacatgcctttgaattcatttcactgtatataaactttagttgatagtacaattcaaaaatcaagaatacaactaagcctaactaccaatcaactaactaattagtttgttggtcatcatactccctcaaacaaatgggtagaaaccactttaagtttagttttcaaatagtgaaatcgatttttaggcaaagatttagtaagtgcatcagcaatttgatcaactgaatgaacataacgaacaaagagttcattgttgaggatttgatcttgaacaaagtattaatcaatctcgatatacttgtagcatgcattaaaaaccagattagtagccaaggcaactgcaccctgattatcgacccaaataatgggaacaacagctaaagtaacctaaagttcaatgaagaaagattgcaaccacttaagctcggtatccgtgttggctaacacatagaattcagactcaatagaggatcgagcaactacttgttgcttcttagtagaccaagaaatcagatttggtcataggaacactacatagccctatgcggaccttcgagcattaggacaacttgcccgatcaacatttgaataagcttcaagagacattccagaagctagtttaaggagcaaaccttcaaaaatattgcctttcaagtaacttagcaatcgtttacaagcttcctagtgcacattagtaggagcatgaaagaattgagaaagcttgttaatgatgatgcaacatcaggcctggtccaagttaaatattgcatagcacccaatgtacctctgtaaagagtttttttctcaaatggtgtgccttcaatgagagcaagcttgagagagctgctactaggactagaacacaccttagcaccctccaaatgaactataactaggagttttgtgatgcatttactttgagataagtacatatccttaggagttctatgaatctcaactccaagaaaatagtaaacctatcccatataattaagagaaaaggatgaattcagatcactaattaatttctgaacaagacttgaactaggccctataatcaaaatgccatttagatagacaagtaggatgactaaattagagttagaaccatagacaaacaaaaaagtgtctgcatcaaaagccttgaatccccaactaagcaatgtaagttttagcttgtcattccaggcacaaggtgcttgctttaagccataaatggcattgtgaattttgcaaacataagtagggtgatatggatcttcaaaaccctatggttatgtataatgtctcttgaaaagtgtggttaagaaagacattagacatatccaaatgcctcacttcccagttagatgacacatctaaagcaagaatcgacctcaccgtaataatttttaccacatgattgaatgtgtcctcataataaatctctagttgttgaatatatcctttagcaactaatctaaatttgtatttatctaaagaaaaatttgcttttaacttaattcgaaagatccacttgttgccaataagagtcatataagacgcataaagaactaaagtccaggtgcattgagttcttaatgcatgaaactctttggatattgaggcattccaaattggattcttaagtgcaactttgactcatttaggatcactaggcaataaagactcatgcaatttatgcttggtagctatataagtcgttggcttgtaaatacattgctgggaactagttaccatagagtaagttctttgaggctcaattgcaggaacattatctgatgaagagggctcaaaaacagattccacagctgcaacaggaagagaataagatattgacatctcaggaagtggatatggcaaaggagtgttggaattttatgttggaagttattttaccaggaacttagatctgctcacaagtat

SEQ ID NO: 299699 - DNA, 4546 bp, Cannabis indica
ttgcatttgataatagtagattttgattttcctgatgttacaaagagggcatatataagacagaatttgtgtatctttttgtgccagctaagttagtccagcagataaaattatagcataacagatttcctgattatgagtttgcctgattacttgccattagatctggtagaaaacagataaggagatttatgcttgctctcataaacttcagtgaagcttatatattttgttctatcttattttttttaaaaaaaatgttgcttttacaattaatatcagccaaggagacttgctttcttctatgctgaatgcttaattatgtttgtagtgtaccatctctgagttgctttctgaaggaaatgatgaaattcttttcctttattactttgagtgaaaactacaattctaatgttagcgcattgtttgatgctgtaatcatgtccagattcacagttggagagaatgggaggaggaggcacacttggagcggcatgattcgttaactggtaagcttaatatgttgttgggaagaccaagtaaaagtcaggttactctcattgtgatacttattctgtatttatcgagtgttccatgtcaaacttatggatccttacatctgcttggatgctagcattttttataagccttttcagtgtgcttactcaagcaaacctgtttcccttttatgaagatttcaaatggtaactgactatattccattccagagatgacaaggcagttgacaatgcggagacaagtaacctttgtaaaagcccagtcatcaaatccagtggtaaaaaatagttttctcgtttgggtggtaagtagagccatgttttatttgttcatgtggatcttccattcacttttatgtttctagagtaggtcaaacttcttagtttgtactgaagttgcagactttgtcatgcagacatgcttcttccgccaatttggacgttcagttgttcgtgcggattacttgactttgcgcaatggtttcataatggtatgcatcatcgttgcttcagagaactaccactttcacttcttcaaagtatcatttgattttgagctggtcctcaatgcatatttattaatttctgtcaaccatgcatcttaatatgtggcttttttgtcaaataatttgaagttaagaaatgcattaattatacacgcttaggatattaaagtggaaaatttaacgagtttcctagcagatcttaatagtgccatttctgttgcgagatccagagtgttataagttttcactgaactgttctacattcttttataaataattttctatttcattgagttgttatcaattaatgtgttctttagattgtcattcacatctgcatactactttttgaatactacttgattgtgtgtttcttgcagaatcacaacctcacgccaaaatatgattttcacagctatatgattcgatccatggaagaagagttccaaaggatagtgggtgtgaggtaatcaacagtcttctttataacaagttgtttctggtagacattgcaaccaaaatattcactcaatagttatctaatattcactattctgcaaaagatgtcataggaggttacagtctctacactcttctacaggttctcctcggctctttgtagattaaatggttgattaaaaattatatgaccttcatctaattgtgcttgtgaaggtctactaccttttctttgaaaaagaaactagacacgtatattaatatataaaacaacaaagttagagtttacaataaaaagctcctatctctagcttaatcagcaaacagtaaaccctttaactgtagtactgtttgtgaagtctatactataaaagagaaactgttgtgaagaaacttcatttcactctctaaggtgaataataataaccaaaaaaaaaaccaatcacaatgattgaaaattgacgagggttccatgatggttggtgggattaagatactgtcttgaagctgccttatgttaatcctgttttaaagtgcttaatctcaagaaaaaaaaaaaacaaatatagtcatcaccagttcaattcgaacattttactgttttttagtgttattatttaccttttttgttaactaatgtgggaaagctgtaacaagaaattaacagctgatacctgtttgtttaaatcttacagtggtcttctatggggatttgttgttgcttttatgctgtttaatataaaaggtatgacagtgttaaaatgaaatcatataggtagttgttcttgtattaaaataactgtttcgatacaaacttagttgcttcaaattaagttttccattctgttgattgttttaactgtagacaatttgctgacattagattgttctttggctgaaagttttatttccccttttgtgtaccttataacaggttccaacctatatttctggattgcaatcattccaatatcggtaagttttgaatctcaatttcctttttcaataaggtgtagcaccatacatttcaatatgctgcagcaatgataacctttgaatattgtcacgtgcagctagttcttctaattggcacaaagctgcagcatatcattgcaaccctggcactagagaatgctggtttaagacttcatggagaaaggatgaggccaagggacgatcttttctggtttaagaagccagagcttctgttaacactgatccattttgttctattccaggtcagctatgatctctatgagactatgattgcacccattggagtttctgatcatcaatttgctgttacagcttgtacaagctaaccagtcttattagccaaagtgtaattatttttgttttatttataatttctttttgttctcttttgcagaacgcgtttgaactggcttcgttcttttggttttgggtacttattttccattcctactgccaatattacagaaaacagtcatgttatgcttaaaatttgtgaaacctgtgtaatttaactagtttttatcttcttcactaatttgattgcagtggcaatttggttatgattcttgcttcattcggaatcatttgcttgtgtatttaagactgattttggggtatgcagacaattcatcatgtcactgtaatctacttgataggttaaatggtcatttgtgttaatcttctggatttcacttgtaggtttgctgggcagtttctctgcagttacagtaccttgccactgtatgcattggtaactcaggtatgattatttttgcatatggttatagtgaagaaggttctttcttctttggacgactaaatactcttagcaaaggaaaaaaaaatgtatacatctaaagtaccgctagtgaaagatctggatacagaaatgactttcttgtgtgttttgtttgtgagaaaatttgttttagttgctgctttggttctcagctactgaaattttaactgcttaccaatttttgttttctcccagatgggaacaaattataaggcagcccttataccaaacagaataagggagacaattcacgggtggaaaaaggcagctaggaggaaaagaaggctcggaatgttcaatgatgattctactatacacacggatgcaagcacagtaatctcggttgaggaatatgatgataatcattatcatgatcacccggaatctgtaactacacataatggaatagaaatgcagccagcttctattattccagtctctgaggtaagtgcgaatgaaacttcaagtaggttaggttcgcctcttcttcgaccaagtatttcagtacctgcatctgctgcactggatgttgagggaaataaaccttcaagatctgtttcaatgccaatgagaagagaatgaatcatccacaaattgacagcgatgatgacgacaaagaaacataagaaatttactatgttggtgaatttagtagcatatcaactatattaagttttaggaaaggaagatgtatctaagagtgattttaagtgtgagaaatttataattgtcacctttccttgtgctttctaatattagcatgaaggatacaatcatacaagtgaatagaatactctctaggcatgtaagttcagcatacttgttagcattactgtaatgaatatttctgaaatagaatggctgaattttgaaacgttaaatatgactgatatttgtttaaagctttagtttccttgtacacaaaacagtaaagagctttactaattaatctctaatactataaagtagtattttcaaagaatgatgagttcattttgtcatccttaagaagtttgttggtcatttttccaaactaactgatgtgattgtaatgttaatgattatctgtagtctggaattcgtacttattgcattttatatatccagaagtttgtcttgtatatcgacctctatctatttattgtaacaaggtatgtatgtttctgtgcaatgcttcaaagatcaaggaaattgtgtttttttattgatataaaagaaacgttaacttttacttcaaaaaatatattgtgtaaaagctctaaaagata

SEQ ID NO: 299700 - DNA, 4839 bp, Cannabis indica
tttctatgttctgcacctgcattttcgtcatcagatccgaaattcaaagatgaacttcctattgcactatgtaaaggtaaacaccaatgtacttttcctatttcttcttttgtttcttataatcatatctccttttcttctagctctctattgcttctctcgattttatcactattcttaaaattgtctgtgaagcaatatctcgtcttggttggatttaataaaaaaatcgttttgagttactttttatattttgtgctttttatgttgagattcaaaatcaatttaatatgttttttcgtattttgagaagtgataatgccaaagtatacacatcttcttaattttaatcttacatgactttaaattgcatgtttcatgaaacttcttgtgttgatactgcacctcttctcaatgtatttttcctatttcttataatcatatctcctcttcttcttgctcttctattgcttctctcgattctatcactattcttaaaattgttcgtgaagcaatgtctcgtcttggttggcttgctgcaatgattgaagagatgaatgctttaattgcaaatgatacttgggtcttagttaatttacctttaagaaaacgagtcatagggtgcaaatgggtgtctacagttaaattcaatcaagatggaaaaattgctcgcttaaagactcgtcttgttgccaaggatttatactcaaacttatggagttgactattgtgatactttttctcttgttgttaaactcacatctattcgactattcatttctatgacagctactcatcattggcctttgcatcagcttgacattaaaaatacttttctttatgaagatcttgagaataagtgtatatagagcaacctcctaggtttgttgctcagggggagttagggcgagtttgtggtcttcacaaatctttatatggattgaaagaaagcccttggtaagtcagatcattctgtgttctataaaaagataaactgttgatatcgctttgttagtgatgtatgttgatgatatcgttattactagaaatgatactgaaggtatctcattccttaagtcttttattcaaacccagtttcacacgaaagatttagaggagctcaagtatttcttggatattgaagttactcagagtaaataaggtatttttctgcctcaaatgaagtacgtacttgatttattaactgagatagaaaaattgagagcaaaactttgtaatgctccaatgaatcgaattgtgcatcttacacgtgatgggaaactatttgaagatcctgaaaaatattgtaaattgcttggaaagttaaattatctaactgtaactcgtccagatattgcatttccaattagagttatcaatcagtttatgtcttctccaacaattcatcattgggcagcactagaacaaagtttatgttacttgaaaggagcaccaggacgaggtataatttacaaaaatcaaggacatacctagattgagtatttctcttatgcagactgggcaagctccaagctagatagacgatccacttcaggatattgtatctttgttggggcaatttgatctcttagaagaataaaaaacaaaatgttgtgtctagatctaatgctaaatcagaatatagctatggcacagtctgtgtgcaaggtaatatggagttatcaacttttgcctgaattcaagtttaagacttctattgcctaaaatctcattttccactagcgaactaagcacattgagattgattgtcactttgtgagaaaatccaacaaaggtctaatctccgcaaaatatgtgaagatcggagaaaaattataagatatttttacaaaagttttaaattgagtgcaggttaattatctttgtaacaagctgggcaagattaacatctatactctagcttgaggggaagtgttagaatattaattgtaaatattagggtaaattgtatttagtagtttctcatttagtctcttagctttgtatataaatatatactattctatagaatacaacacacaattctattcactattctctacaataactatataaattaataatacaaagtataaaacaatgcttgaaacaagacaaaagatactcacacaattacctgtactgacgtgtgttgttcatagcgtctcacaaatgaataacaagattacttattgagatgctttcaggaaagaactcaaggtgctaaatatcgattcatatacctttataccattcagatagacggtatctttcaagaactgcagaataagttcaaggaatgaaaaaagaacaaagcggcaaacaaatagaaaagtagatagggaatttgtcaaacctcattatgatcatgtagcaagatgggagtattcatcattggtgagaatccaacaactggaattcccaactgtctaaggtatcgggcatctgtagttgaagccaatatttcaggctttgaaagtttccctccaactgctgcaatagattcttcaaaaacagaccaccatggattggaatcattagtcaatgtcaataatgggtgaccgaggtagtctctaagaggccctttctcaagaatctacaagcatataaagttcatcagcacttcctcacttaatctaccgcttctagcaatgaaaataatgtaataccttcaagtcaagcctgaaagagacttgctacaacataaatatcaaaatcatgatgcccatatacttgttcagcaaacttacaagacacaaaccacctatccgtgttctgggatatattttttgtatattgaaaacagtataaatagaatctagtagaaatggctcgactaatgtatgttgcctcactcgctacaaagtagtccgaattagaaagtcaaaagtgggtgagtaatacaaattctaacactaacacccttgcacagataactcaagaaccaaaagataatagacacaattgcaagatcaaaaatagcacccgaaaagaaacaaagtttgtattgataagattataaacacaaatgaagcaaagaacaaataagaatcaaaaacaaaaacttcataagatatccattaatggtaatgcaaatcagtagacacactaagacatttattcaccttgtaggtcatgttcctcacagctggcgcccattcctccgcaattcttttctttaaaagatctggatctgccgttggaggcaatctgaggtcaaacccagcttctgcctccgaaggttgcatattcatcacaaatccctgaacaaaaaatccaagatacaaatttcaataaccaacaacattattatacgagttaaatttagtaaaacacccctgttttaaacttcttatcatactatattgtgttgaccttattcaacagtcaacaccacagtctaattctaatcatttctttctcgctgaagcaataagatagctttgactttttacataacctatgagcctaaaacactgttaaaactttgaagtgggaatttctctcaaaaaaaaaaagggaaaacttcaaagtggggatttccctcagaaaaaaaattcaaagtggggtttaagacatgacctattccttttgtagcagaattacctcaacaaaaactttcatttgtacaaaattttgctaaatctttttaactttctcaagttatataactatattataagcctttaaatggacatatatacatataaatatatgattatggaactcacagtcggagaaggaatcccagatttcaaataaacaggattaaccgaaataacttccgagttggcagctcgaccggatttgaccacatcgaactggctctccctgaaccggcttataatatccacgctcttcatcaaattttccatggcgctgttgtcgtacatcctcgacccgtgccctggcgttcccttagccttgatcaccaactcccatggcgacctatccgcgtagaaaaccctaaactcctcacccggattggcctggccttcgtccatggcaaaacccaaattcaaatccttgaattcctgcgagacagcgaacttggccattccctcaaaccctccgacctcctcgttggggacgtacgacaagtgtagggttcgagtgggttggaaattcttggcctttagattgcgaatggcctcgaggtactgcatcccgatgcacttatcgtcctgggctccacgggcgaagattcttccgtcctgggtcttgacagcggagaatggtgggtgggtccacttggagggctcggcggggacggagtcgaggtgagagttgaagaggatggaaggaagagaagggtcggagccgagccatgtgaggaggaggataggattgttgagggagaagtggaaggtccgggattgcaggccgagggaattggcctgggaaaggaggtaggaaacggcggaggagtaatctggggatggatgggctgtgttgattcgcaggtagtttcggaagcgggaaatggggtcgtcttcttcttcttcttcttctacatgggaatgttgttgttgggtctgggtctgggtcaataagaaggtaaaaagaataataagtaggatagagagggagagaagagaggtgtgagttttagccatcgcaaataaagttgagagttaaaagtgatggactttagtttagttgtttgttttaacgagaaactagatgtgttgtagatgatgttctttcatggattcggtcaacattacctggctgactcatcactcgctagtcaagagtaggaatatcagtcgccacaaacccggcccggcccggcccggcccgactttttcttttggcctagcgggtcaagcccggccc

SEQ ID NO: 299701 - DNA, 4970 bp, Cannabis indica
acattttgttcacaagcctctgataggtttcccttacatttttcagcctgaagggcatgactttgtaacattataggcctaggtccgtcatgaagcttgtgtgcccttgatctggttgatgcaacatgatttggtgtatcctgagtaagcatccatgatttggtgtatcctgagtaagcaaccagttggtcgatccttagaagcagaaagcagtcctttggacatgctttgttcaggttggtaaaatttatgcacactctccacttgttgtttggcttaggcacccacacaggattggatacccaaagttgatagagtatttcagtgataaagtcatgggcactcagcctttcgacttcatctcttagtgtttgggtgcactctttgtccaacaacctccttttttattacacaggtcagaagtttggatcaatgtttaggacatgggtcatcacagaggggtctaatccgaccatgtctccatatgaccatgtgaagaggtcaaagttttcccttagaaattttatcagtactaattttatttctagagctaaacctttcccaatatttagtcttcttgctggaaaactgggatcaacctccacttcttccagttcttctatgaaaattgtttgcaggatccccaaagcgaggatctatgtctacctccccactttgggctgaccttccttgccttttgcttggctcttcattagagctcttggagggcatcttctctttcttggcattagacaaggccaagttgtaacggtgatgggcaaactgttggtctcccctcaaacatcctaccccatgccttgttgggaactttcggcaaaagttgtaggtggatgttacagcctttaggtcgtactaggctggacgagatatacggcattgaagactgaatgcacattgattactacaaattgtgccatcagcgttcatgttgttggattctctccaaccgtcaagggcagccagatgtaccccacgggtataatgccttggccaaagaagtcatatattacttatgtgcaaggttccaattaggtttgttggagccccatcttttcatatgttgatctgtaaagaatgttggaggtggctctgtagtcctccatacaccttgcaaccgccatgttctcaatttgtgcagtaatgaccatggggtcattgtggaagaagttaactgaaagagacctattctcttctacaaagccttggacgtgtagaagagaaggagagagagaattaggatttcaaacttagacattaagagcattagggtactttaaacttagggaaattaggtttagattgatgctctttatatttgagagcttataaaagaataataacctaatatcgctaaaaaatagaaaatatagcatatttgttacataattatataataaacaattaataagttaattaaaacccaagaatatgtaaatagatgatatttatctcttattttcatgggtagttgaagcccgattcccagcttgcgtcctggataataattcaagctggtaggtcaagttcttgttaggatgtaagatggctggccaagtgcctactaggatataagctggctgaccaaatgcctggcagggtcaagggtgaacatcaattgcctgcaagctttggcaagtcttggccagcctttgcatctgttggctagtcttagtaggtgttggccagcctttgtacaactttccttgcaaaggtcaggctttcttggttgaacaggctctattttgtctgatagttaccctttggccggccaggttgtgctcaaatcttggccaatcatacaagcttctcctggctgtcgacctatgtactctccttggttggccaaatatggttgtgcagctacttgacggcttgctcaactgctttcgcttgttacttgattgtttttccatgccttgtaaggggactttgttctactattgacaaggttgtactccaagtgttcttagtcttgacttatgtggacatgcgacgtgagttagcaaaatttgggataacagtacctgttgggaaagatgaatccatctccatccatgggaggtggtggtggtgctacatctgctgatggctccagtgtttgatctgtaactgacctaccctacaatatactcaatatagattagagctgctctatgatgaggttctggccacccttcagctctagatggctagcctgatatgcctcctttagctcagcatgagaagcgtaaagacccttctgcttagcctcgatcttgtccaacctccccatcaattctctgtactcagcaccaccaaggcttgaagatgatctagtgggctgaggctctaatgtagtgccctgagtctttggctcgacaataggagcatttttgacatgttttgctcctttttttgcttggcttttgaaaaacatcttggtcttgggtgtcatcctcaacctgtgcggcatccacacaaacctcaatcgggatctccacaccatcataattgatggtcctactatactcctcctcatctgggcaaggaaatagccccttcgtcacttgaagttgttgtttaagatttaaaaaagataaaataaaaatgagttggcatttattcaaaacatttctcttgaataattactctaaatataaaagaaattatcatacccgtctccaaaataatgtactaagatccttcttttctatctcactcttgctcgtccagctaattaagcatcattaaaaattgaatcccataatttgtgccatacatcttcccaacctctaaaatggcctcgtacgcccaatattgtacgacaggtgtgaagcaatacgatgtgtatttgcactcgtgctaaacatctaaactcaacatcttctcatagttcacctttggtttcaacatgttattttgaagggagtacaaaggcctggcaaatgagtatttcccctaaggaactagaagaagaattagagatctttgacatatctaagtatggcaggcgtaatcaaagtgttagcctcacgacccagtaacactatctcaacaaacatgcagaagcctaacttgtatatgcctttcgaattctggcagtttgagaacctctcatggagtgcttctatcttcacactatcagactagttgaaatatttgttgatcaactgatgtgacctcgacttggcagcctatgcagccttctcctctttggttggtcctgagatgaagttcacgcctgtaaagtgccaactcaatgactcgaaatctaatctcctttgaatcaatttaagaatgcatttcctctgctttctcaacatcaaccttcatcttgtgcactattacttggtgaaatagcactgatgaaaatgtgagaggtactacataccaaaaattattgaaactgcttgcctttgttgtgtcattcaattcgtattcctcaaaccgcttcttgattttcaaaaaagcactgctacctttatatgtcacatggtcggtgaaatagttggacgttgaaactataagtcgtggagctgtctaaaacaagatataaaataaagactacgataagcacaccatcgaaaaattatcgattcaccatagataaactatcgataaattaaaattctttataaaattaaagacacgcaaaattatcgataaaccatagataaaatattgatatcctattgacaaactcaaaattccttgagaaatcaaagcacaccaataattatcgataaaatgttgataatgtgtcaataacattgacaaactaaaaattcttttgaaaatcaaaacacacgaaaaattctcaacaaaaaatgtcaataacatatcgacaaactcaaaattcttttgaaaaccataacccacaaaaaattatggacaaactcaaaattctttttttaaaaaaagtacaagaaaaattatcgaaaaagtgtcgataatatgtcaataacatgtcgacaattttaaaattctttcaaaaacataacacaaaaaaaatatcgataacgtattgagaaactcaaaactacacataataatcaagacaaaacattttctatcgataaataatcaataacatacctataacatatcgataaacatgcataatgaaaatttaacttatgcaaacttacaatcttaagaaatacaattgatatcctatagataaattatcgaaaaatcataaaacttctaaagaattaaataaccttggatgtagtagcagtccgataagatataatcgatgtcctatcgagatcccatcgataatctatcgatagcactgtaaaaatatcatttcaccataaacaagctaggaaatccacaagatccacaaaaatttaactattctcacaagaataatgacaaattcacgtccaaatcacaagatattaagaaatcatagctaatagagagaaagatagagacaaagaaaaattaaataaaaagatatgttaggtaattagaaaaaaaaagtagtattattctatacatattacagaaagaattaagttttgacaaggttttttttaaccatgagaaatgaaatttgcttttttaaaaatattaaagatatatattatttaaataacgtggagaaaaatataaaaatattaatgtaaatataataaataaaataaattgttagtgagttattttaaaacatatattagagtggctggtgtgagtgacaagagatcaaaaggccacataaaaagaaggatagaaaagcgcaggaaatcagaggctgtgactaagacatgacactgcacattcagagagtgaaaaaaaagagtatttatacgatattaatacggatgtgtatgaatatgtaaaacagaaaaaagtccaataaataaatatacagatcatcttaatcaggtgcaattgttgaaacataagttatcaagatgagttagttgtgtccttggttggttaggaaggttgttatgaca

SEQ ID NO: 299702 - DNA, 5730 bp, Cannabis indica
aaaaaaatgacaatatttattgtcacgtgcgtaaatatggcgggaaaggtgatcgcgtgtaaccaataatttattatcactttaaattttcttcatcgtccccgccctttttagggtttcagattctcagttccatttccattttttttctgattttggaagagaaaactaatcttaatgggcaataaagttacagatgaactcgtatccaccgtccgatcaatcgtgggctccgattactccgacatggacgtaatcagagccctccacatggccaacaacgacctcacggcggccatcaacataatcttcgacaccccaaattttaaatccaaaggaattttaggggttcagaggaatcctcaaattcccaatcaaaattcgagatcagaaactcgacccgttagtgttagcagtgtgaattcgaaggaaaatggtggtggcgggaacaagaatttttctttgagaggaaatttggggattcagaggaatcctcaagtttccattcaatattcgagatcagttactcgacctgttactgctagttgtgtgaaatcgaaggaaaatggtggtggcggggaaaagaatttttctttgaggactgacggcaatggtgccaactttcccactaagttcgacggcgaggaaccggaagcccaatatgaatgctctcctgagagttctcttgaggaaaaatggtggcttgtgggttgtggcgaagtggcagggttgtctacatgcaaaggaagtagaatcaagcctggtgatgaagtggatttcacatttccgttgaagggttttgctagttcgccttcgccgggcaaggctttaggtaggggtcggaatgcagcagccgcttgttcagagattgtgaggttttcaaccaaaaattcaggagaggtaatggggaaataaaaagatggttttcttaatgttttggctttattatatgaatttgggttgatttagtttcttatctattattgtagattggtagaatacctaatgaatgggctcggtgtctctttccacttgtgagggataagaaggttagagttctgggtttttgtaaacacacacctgaagtgttatgtattatggacaccattcatttgtcaataaggtattctctttaatccaaagtttacttagttaaatgggcttgatatggtgtgttttatataaatgttgttgaccagttgacttatctatgttttgtgttcgattagtgtctacatcgatagttccatgttccataagcaacatgatacttcacttaaggcagctagcagttctgccgacgaatcagtggttcatcctctcccgacattatttcatttgctgggtctagctccatttaagaaggtgatggttctttgacatgtttgtcattattaaaaatcggcttgcttttatatgagaattagttatattacaatgcattagcattgtttctttatgaggtgctaaggatggtttcaacttttttacgactcttaaataggcagaatttacccctgatgacttatactcaaggaagcgaccattagacttgaaggtacaaacataatcgtttgaatttctctaataatattaaagtggaagatgagtagtagtattacctaaacagggatgttctggatttcaggcctcaactttacttacgcggaagcttaagaatccttctgcaaatgaaaatgaaggagaagatgaggaacctatttcagatgctgatttggagaatattgttggtgttggaaacagttcggagttagaggtattggcattttgcaagaatattttacattagtggaattttctccacccacggcttctaaatttccaaatggattgctggtttgtaggaaatggaacccgctgatacacttcagtgtgaacttcggccttaccaaaaacaggctctttattggatgacccagttagaaaggctagaaaagggacgatgtacggatggagaaggaacaactcttcatccttgttgggaagcatatcatcttgcagacaagtgagttagttttcttatatattatatgtttatatgcatatacaagtatatttaaatccttacaaatttgatatatagcatggtgtttatgaatacaggagaggacaagttgtttatttgaatgcattttcgggtgatgctactacacaatttccaagcactctacaaatggctagaggaggagtatgttttgaaagaaaactcagaaataaagtctaattgcatttacttttatcactttcgtatgtactgatttaaaatgcattttgaagattctggcagatgctatgggattgggaaagaccattatgaccataagtctcctccttgctcattcagaaagatcatttgttagccaaccttctggtgaaggtagtgaagttgggaatagttcaagctcgccaaacctcccaaagagaacagcaaaacttcccggggttgataagctgacaatgcaaaagagcacacttatgaatggtgggagtttgattatatgtcctatgactctgttagggcagtggaaggtacttttttcattctggtgccattttttcaatatcagttatctattttctatatcctaacatatacgtttttacaggcagagatagaaactcatgtaaaacccggatctttatctgtttatgttcattatggacaaagtagaccaaaggatgcgacattcttaactcaaagtgatgtagtgatcacaacatatggagtattagcttcagaattttccgcagaggtaattctgttatttagatgtttttcttgtcacattatatgatacctttcttaaacagaaggtgaatgactgcaatttttttttttggtagaatactgaggaaagtgggggcctttactcagttcggtggtttagagtggttcttgatgaggcacatacaataaaatcttccaagagccagatttctatggctactgctgctttagttgcagattgtcggtggtgtcttactggcacccctattcaggtgagttgtgggaaatgatgaacatagtttttttcttttaaatttggaaaactgttttattagcttatagtaaagtctgggtttggttaaatatgaattggtgtagatacagttttctttttaacattttttgcatccactgcgctggtctagctattatttagtatactcgtgccatcttttgccctgtacttgaagtttgtgtttctgtacataacaaagaagttttaatattgacataaatgcgggtgttatgcattatttatcagaaaccaaattgtgatcaatctggtgcttctttgttttccattttgattattattgtcacagaacaaactagaggatctttacagtcttcttcggtttttgagggtggaaccatggggtaactgggcatggtaagttatgtgttcttaagatcttggtaatcaagcccaattactagacataacaattttttttttgacacgttcttatataatataggtggaataaactcattcagaaaccattcgaagagggagatgaaagggggttgaaattggttcaatctatcctaaagagaatcatgctacggagaacaaagtttagcacagatcgcaatggcaagtaagttgatgaagatcatggtatgcaaatttattattctattgtagcccatgttactaaggactttttgcttgttgcagactgattttagtcctaccaccagctgatattcaggtgatttactgtgaactcacagaagctgaaaaagatttctatgaggccctttttaaaagatccaaggtatatctctctataagaatgcaattatcaaaatatgatgtgcccttggatttattatcatttttggatattaggcatattgtccaatgcttgacaacttaagttttttgatgtaataggtgaagtttgatcagtttgttgagcaaggacgggtacttcataattacgcttccatattggagttacttttacgtcttcgtcaatgttgtgatcatccctttcttgtgatgaggttctattcttttctctcttttatactggtttcagattttgtagttatgatgtaattggtttgatatcttgcttttatcttttatctatttatccagtcgaggtgatacacaagaattttctgatttgcgtaaactggctaaacggtttcttaaaggaagtaataagaattctgaagaaggagaagacaaagatctaccttccaaggcttttgtacaagaggttttagaagagttgcgtaagggggaagagggagagtgcccaatttgtctcgaagcatttgaagatgcagttttgacaccttgtgctcatcgcctatgtcgtgaatgtttgttggcaagttggcgaaatgctacttctgggctatgtcctgtttgtaggtatcttcaagagatgttcttctttcaaatatggattttgatgtcaaattacccaaatttatttatgtaattattatactgtccttatattggaaaatgtaatattttacaagttccacagtttaacctattgcatttgctcctttcataggaagattgttagcaaacaagatcttattaccgccccaactgaaaatcgattcaaggttgatatcgataaaaactgggtggaatcaacaaaagttgctgttttgttacgtgagcttgaggctcttcgcttgtcaggctctaagagcattgtgtttagccaatggactgctttcctggatttgttacagattcctctatctcggtgagaatttttagtcttttagtttttataaagtaaatatttcttgtatcactcccaagaagtatcgttcaagttctatcattttcctttgcaggagtaacattccatttcttcgactagatgggactctgaatcaacagcaacgtgaaaaagttctaaagcagttctcggaagatagcagcatcctggtttgttatgtttatctctgtatattcggtagttgataactcagctatttggatgtactctttaatagctttgattactgcctgctacctcaggtgttgctgatgtcactaaaggccgggggagtcggaatcaatctaacagcagcttctagtgcctttgtcttggtatgtgtacatattaattaacacccaatttggatatggcttctcttactccatttacaattgctgaaagcatagctgatatgccattacttatgcattctttgctatttccaattttatgtgcatgttcataggatccatggtggaatcctgctgtggaggagcaagcagtcatgcgaattcatcgaatcggccaaacaaagaaggtgacaattaaaaggtttattgtgaaggtatatttacttctcttactaaaaaacgagttttaaatattttgctgctgtattttttgcccctaagtgaataaactaaacaaagatttatttctttagatttagttaataaacaaatattatttttacttaattggatctaatccttgagaggtgttaattgcatggatatggaaatgtcattgttataaattttggatccaacccttcaactgatgcatttttttcatattctcttatggcagggtacagtagaggaaagaatggaagcagtacaagcccgtaaacagagaatgatttctggtgccttaaccgatcaagaagttcgtagtgctcgattagaggaattgaagatgctgttctcttagagt

SEQ ID NO: 299703 - DNA, 5067 bp, Cannabis indica
aaaaaaagaagaagaagaaatgactgtgcccattcccccatccaagtgtacattaaaaactcactttatgtggtgaattggttagaggcctagtagctagtttgtaagaaatgtaattaattaaactaattgctatacctccagcagggtctgagacctgagtggccctgagttctaaattcaaaataaattttgggcttcagcttgtgcttgtgtgcttgaccaacaccgtttataattattatatacctaataggtgcagtggcttaactcctacacttgttgtatagtttcgatacgtagcaacataatcatacttatttatatgatctacgagtgagtgtagacactagtttctgcaatctaggcctagctgagtcgttaaaccagggtaagtggtccaattatcgtatccatggactcaattgattgtggtcctcctcatattgtagattttttaaatcacatctcatagttgtttaattattatataattacaatttgtagtacggactgaacagtgtcagttgacccatggcctttcgaaaagtcgatttcttaatgcacaatgatgatgaactcttttcttcatatggtttgaaaatttgtacatataaaataaaataaaaagttgttttcatcgaaatgaaacaaagtaattagtatgtaaaaatttcatgatcacggctagataactattagttaaaaaaaaatcccatctcactcgtatgaacatgctacgggcatttaggcaaataataaaaaaaaaatacaaggaaaacaatgggtaaaggagcacattaaccgaacttgtgtacagtgattaaggcaaaaccattctggttcagcggcttcaataactaatctgaattggtacacatttactgtcaagttctaccatcaacgtcaaaaccagccccggtccaacctggagcaggtggccctttacctttgggcacagccccaagtcctcttcctttaccttgaaactggtttttcttccttcctcttccttctccctcagcggaaatgtgttgattgatcccatccacagcttgagtgtttccagaatttccttcattagtgatgttttttctgcccccaccccctgcttcggttgaattagtagctgaggaagcgtctgttgcaatgatagtcggaggaggccctgttgagaccccatcctagaaatagttccatatgcaaacaatgatcatcatttttctaaaagccaaaatatacttaacatggactctgagtggcaataagtaattaccaaagtaatcataataacatcttcttgcacagaactaacagccgttacacaaaatgcaaatattgttttcatattttgataaacccatgtcagttttttatccgtggaactagaagaaaaatattccctttttgtcttccaacattttctggtggcctgatccatggagtggtgcacttgaccaaatttctcaaacatgagtttacattatttaaggttgactatgttaatttattactcaagtcatgcagtaagggtcaaagtttatcataagatttggtgtttaataagtcactttatacctagcaattctaaagttttaagcctcaaaaaatgttgttggaaaaaagaatgaaattaagtttaagataatccaaagaacactactcaagaccacttagagccaccgaaattttaatgagactgaagaccattcagaaccccaaaatttcaatggggttgaacccactgatgagcgagaaacagttacagcagttatcttgtatcctcaaactgcaacatatagatcataaagtgaaatccaggtatggtactggcagatgggtccatcaaagctattaactatgctacgaatgtagaatggagaacttacatgagaaactgcagctgatgatgctctaccaggattcaatgcttctaatcttctctttaactcttccagcctagcaaactgagtttggctactttcttgaacctaatttagaagtagttcaaaagcaatttgttatgacagcaagcatatatacctatccaaaaagtataaataaagaatcagccacatttgaaccagatattataccagctggtttaagtcttcacaaagcttttgcttagcttcttcctcgtccttcaccaccttcgatgctgcttcccacgtctaaagtaaataaaacaagttcaaaaaaggaaccaagacacatttaacaaatatattgcagaatgatagacttgtcatgttataaaaatggataaaagacaatatcatatctcaaatatatgcaacggagatgtgcaaagcaccacagtaaactcatttctaagaagaacataccttccgtgcttcctcttccttcactttggccaaacgaattttctcagtggatatctctattttctttcttaaatgttcaagtgctaaaaatgacagcataatggaaaaaggtgggaaaaaaatcactgaaccatagaaataaacaagaacaccaaagaaaggaaatcatattgatggtgtaccaacctgctttctttggcccagctgtaagtttcaattccatattaagactcgcaagctctcgttcaacatcgcgaattttagagtaattttcatcaatgtatctagaagatattataatctcaaattgtaagccgtggaatttaccgactatcattagatatgaactaatccgtaatcgaaaacatcaaagggaaatgatattttaggaaatgtgaaggaaccaaatttgaattattctagttggtaattaaacaaataaaaatcatgtgaacaattcaccaaaatttgtttccgaattgtgtaagtaaacacataaattaaatagacactagacaggaaaggggaaatacttctcttctgttctatccaccatctattagtattaggatcaataaactttgcctacgattgaactaaaacttaatgctattagtattattcaaaacaaccccatttccatctcaaatacatccttaatgacatcacttaatcctttcaaataatatctaaaaaagaaaaaacaacgattgaaatgcaactaaaactgagttttctttttaccctcaaaagtgctatttttgatcatacatgaagatttactgagttccaactaattattattttttccaagtgatttttcgcattagtaaagcaatttttgtacaattcaaagcattaatccaatcatcaattcacagcattaatccaatcttcaattcagtaatccagaggacgaaacagtaatagatctggtgaaaatgtgaaaaagtgagaaaagaaaaaacttacttcctcaattgaagttgctctgcctcaattatctgccacaaaaaaaaaaccaagaaattcaataaaatgaagctgaggaaagtggagataaatggagcgaaaaagagaccttctcagtgtaggcaatgacaggggcttcacgagagaggccgtcgggtccgatctcaggaagcagtgagggatttggtgatggggccgaacccattctcgttcgatagggagaaaacttgacttcaatttgaatcagatttcttttcaaatattttctaaatttaatttcaataaagtttagtatagttcttcaatcttgctttgcattcattttgagagcaaacatgtgctcgcacgagaaacaaaacgtgtttagaggttaaaaatagttctctaaatcatgtccaatatctttcaaagttgaattttggttaagaaagtaaaagactggaaaaatataaaaaaataatagaatataataaataataaataataaatttttatatttgatatggaaagaaaaattatattgtaaaacacttgactcaactaaatttttcatatgcagttttaataacagtgaaatttctcaaaaaaaaaactaaatttttcatatcaaatttgaaaattggttttttttttctacacacttttttctttccttactaaaatttaactttcaaatttaacctaaaaaattaaaataattttcaattcaatgaccttgtgaaatttcatttttatcctttttatggtataaattcaaaaaaaaaaattatattgaaaaacaatataaagtgttttagtcatggaaagacctacaccaagactagggagtacaattgaccaccataaaaaaatgatcaaccttcattttttttcttttattatttcttgaaagaacattttttataattttgtctttataattttattttcatttatgtgttagaatttattttattatgatctatatttgctaacatgtatcttaattataaatctataatttaacaatctaagtatgaacaatcttaaaacgataaataaatacatataaagtttaaaaaactttacaaaaatggcagcggaataaatatcttatttcgttccgttatctaacacttgaacctttctgttgtagagtattattaagaattgaacttggatattttctcctttgatggtgttcatcatagtcttccacaaaggtctgagtatcaattgtgtgggctaatactcataatacctttgaacaatttagaaaatgagtttcgctagtgaattttgaaatagtttaaagaagagaagagaaaaggctatctgacatagtgtttgcccaaattttaacgacaatgacgtgtcaagagtagcaacacgtggcacaaaaatactgagactaaattaatgaaaaatatgtaaattcatgatcgttaatcatgaagggtggtctgaccattagaatgaaagtcaaacaatcaccctttcccctagcttaagtaaggtgggcatctccgagaaggaaaaacaatggactaacaccttcgtaagcagaatgaacaatcaacacgcacccacatgccaagttagtctagggggtatatactactaccccttacctcccaaagggttggtctaagggtataccctcaccccctacaccttcatggtacgagtcacgacttttatcgtagaacaatgacattcgcaaggctatgtggggacatcgacattgtaccatagttactgacaacga

SEQ ID NO: 299704 - DNA, 3339 bp, Cannabis indica
taatttatttgggtttggttgcatcttttttgctatcacgttttcttctttctggctttatattcctatattctttgcaacaacaatagcagcagctacattatataataatacatattgctatattaaaatcagaaaaatattataaattaaacttggaataataagaagctagacatgttcaaaacaacaaagaaagaatttgcaccacaaagatcaacatcatgaatagtaaaacaatatgatgatagttttcaatgtctgctaatttttttttttatttttgtcaatcaattatataccatattgtattaggaaatattcataaatatataggctatcaaggtggaatttatgtttgcttgtatgcccttttatcactaatgaactttgacactgacaatataggaaagaaatctgtacatgaagtacttcaaataatttgataccaagttgttaatggttttgttttgttttcttttcttaagcattaagaagagtgtagtgaaggaaccttatgccttatcaaacttatggtgtccaactaatggctactgccacaaagaaaaaaaaagctaccaccttgagaaaaaaatacaaaataaagtgaccctttaggctcaaaaattttgatagggaacgctagtggtgtagggattaggtatgtgaaggtcacaaaactattatgaaaatacaagtttaactcttccaaggattgcttttttgtcttttgagatctctttttgaagtcacttaaggtgatgggtggtgtacttttctcttccactgagggctaatggggctatgtatgacatttaactttacttggtatgtattttcaggtttatatttacatgtatataaatatataggtaggcattgtatgcctgcatagaggggggtcccaaatggatgatgggaattgggatgggataccccccatttcttttggcaatctaatctaaccaaccaaacactgaatagtgaatgaatacaacaagtagtactaccccaacaccaatgtcaaaatcaaacctttaagattctcttcttgcccccctatggaataaaatgcacaccattgcagtaatactagcttcagaatctttattataactctcactcactctgctccatttgactggaatttaaagttttcaatggctaatagtttatgaatttatatgttggtaatacatgttgatattctacaatgaaatatcaaatcaaaaaaccatagtagtgtaataataataataagaatagtcaaggtacacagaatggaatgaagaattattacaaagtaacaacaaaacaactttgaatatcatctgatgagtaaaacaaaagaagaaggaaaaaacaatagcttctgtggcatgaaaaacctgtataacaaatgaccattgccagagtcatctaagcctgataaaggaaaacaatttgaacaaatgtaagttaataagagaagagtttgcattatttatcataataagattagattatttatagtgcagaagctaaggtagctaccttgttagcaatgttgttggaaagccagtcaagaccctcatacaacccttccccggaagtggcacatgtgctctgaatgtacctggaaatgtttaaattcataggaaagatgactgagttcataataggattaggataagagaaatgttgaaactgaatataacatgtagggatatataccagtggcgttgtctaagagaatgaaggccaagcttatcagtaatttcagcagcattcatagcattgggtagatcttgtttgttagcaaacacaagcagaacagcatcccttaattcatcctgtttccccatcatcattatattatgatcttagtaataataataagagactcttagggtaaatctacagtaaagtacttttggttgaccttttatttagtcaaaaagaaaagttcatgaaggtatacattgtacttatttagggctacacctataaattttcaaaaaatttcaattagtttatagtgtcgaaaataaagtctaaatattttgctgtacgcgtaattatttgagctttatttttcggcactataaattattcaaataataattttaaaataactacaatgtacacgatcatgtaaaaaaacaaattaaaaggttcctctaaatatcgaaacaaatagtttgtctccagaaacacccttttaggaaatgtactacacagatttgatatgtaattgtgttaatgtattgtatgtaaaacaaggatgttgtgtgtgtttaactacacaatatagccattgtgtcaaatgcccaaaatgatgttttctgcatttgatacaatacaatgattatactccatctgtctatataatatgtatatgtatatatgtatatatatacctcattcaacatcctatgtaactcatctctagcctcaacagcacgatcacggtcattactatcaaccacaaagataagtccttgtgtgttttgaaaataatgtctccacaaaggtcgaatctgaaacatacatacataataatcaacaacagcaaagataaatatcatcacatcacatcacaaattcatgttcatatgagtattgagtacgaatctatgaatgaaaacataataaaaatggcttcttgccttgtcttgacccccaacatcccaaactgtaaagctaatgttcttgtattcaacagtttccacattaaatcctgcaatgtagtgaataattaagaacatgatgatccaattcaatcaaaaatcagacgaaacatatagatatatgagtacataccaatggtgggaatggtggttacaatttcccctaatttaagcttgtacaaaatggtggttttaccagctgcatcaagacccaccattaaaatcctcatctctttcttggcgaacaatttgctgaacaatttgccgaacgaaagtcccatttttgattctgggtttaattctgtaactcaaatctgaaatggaatggaatgagatctaacaattctcagatttcggattttcctatatatacccctttcctccctttccttcctcaattaatatggaccttatttcaacatatttttatttaataaaaaataaaagggctttctttttttatttttaaaagttaaaaaaaaaaaaaaaacaaaaaaattagatcatagctttgaatggcacatcacaaatttattaagaaataatttcaataaaataacaaaaaaattacaaaatagaatgtacgatttaatattttatgattttataatttattacgtaactttagttttatattgtactcttgttaatttgttgttgtattttttat

SEQ ID NO: 299705 - DNA, 2185 bp, Cannabis indica
attttttttaaaaaaaaaatgctgtctttacaattgaatctcataataatcatgttacaaaagcctataatctctctcaataatacaaaactagaatctctaaatctgaaataagaaaaaagaatcaatattggtgggaaagaaaaaaaaagtagtgatcaacaatggctgttatactcatcctaatcatagcttataaaaaaaaaagattttctaagataaattataaaattatgtccaacactacttagtatcaatctaataagaatgtacatattaatggtgtgactaatagcaattcaatttctaatttgcaagaatggtacacataaaaaaatgctatttttataatttaacttgaatcaactcattattatgttacaacatcttaaaaaccaattctttttccttttcattccttcccatcataagagatgaaagtacaatttaatattgagtctcacatattttaatttaataaattttataaaaaactgctaattattcaatgtgtcacattattatagtgctagacactataaatatctaataataatgctctaaatggtatttgaaattaattataaaagacgacaccaacgaacgatatcaaatatactatcgtaaaaaaaatgagaaatgctagaagataatcatggtgtctaacacccttaggagagatattatcgataatgtaatttaatatcggtctcacttattttaatttattaaatattataaaaaaaaaaaaaaagataaagctcaatttggtcggttttaaaccaaccaaactgtagattaaaatcgtcgggtatttttacatttatataatagtcgatcggttcacgaattataaccatgaaaaccgaaaactgaattctgaatttttttgtgtgtaaaaaaccgaccaaaccgattattacacacccttaataccctataaaaatcgttaaccatccacaacaaatctaataaagctacttaatttctaatttcccataagaacacacataaacatacataaaaatgctatctttaaaattttgaattgaatcaactcataattacattacaaataatacaaaactataaaaatctctctacaactaaataaaataaataaataaagaaaaacaaatctttttgttcttttttcttcattattccaaataaataggtagtacaacactactactcctagatgatcctctactagcatgaccaccaaaagaaaaaaaagaccttcgaattgatctaccttcaacaataggactattactattactattactattactactactaacctctaatctttgtctttgtaactgaagagcttcttgaatggccagaaacattttccgatcaccggaggaatccatggagaaagatcttctaatgggttgaatcattgaaaattcttcatggtgatctttttctctactcattactatacactcatctcccatactctgttttttccgatttcgattttgattattatgattattgacattgttgttgttgttgttgttgttggggttggagatttcgatgacgagatagtcctcttcatcttctccggcgccggcgagattgccggtgggatctacaggtgaagaagttggagctgcaaagattggatttttacccgcgaaacgattttccggcgaaatacttctccggcaaagtgggcaattagcattgttttgaagccaaacatcgatacaatcgatatgaaagatgtgattacagttaggaatgattcttagcttctcttcatcgttaaattcgcttaaacaaactgcgcaatgatcggagatttgtttttcttgttcttcattttcgccggaaagttgtatttttttgaagtgaaaaacagggattgatctgataacagattcgtctaatccacgagtttcgattcctggtgagtaaaccatgagtaattcttcgtgggttctgtctcttgagagagaaaaacgtctgaggatgtcgatttgatgccatgttaaacagcatttgataacgaaaatgtagtaactgattaataagaaagctgtggctaagattccgatcacggcaattgctatgatcggaaaacttgtatctgaagagaagaagaagaagaagagaggaatgtagtgagttttgtgggcttgtcattgatgaaacagagttatgg

SEQ ID NO: 299706 - DNA, 2647 bp, Cannabis indica
aataaagacaataacaaaatcattcagaaagtctttgaacactcggtttatcaaatccatgaatgttgtgggggtgtttgttaatctgaaagacattactagaaatttatagtgtccataccagatacgaaatgctgtcttgggaatataacagttctggggttattgggtgtgctcaaaacaactgcgttttttagtgagtcatctgttgtatgactcagtgaacaaggaatcaactgtcgtttgactcaaggtgaaaggtcaattttaaccttaggtaatacttgatttaatctcttgttgtgtgtagattaaaaggtaaattccttcatatatttatatatatttcatgatgaaacaataagtgtatgacattgtaattaattgtaattacttaggtcagagaccgttttcgattatatatgacagtgtacgacttatctatatgtattggcattaatgatgcttgaactgggaaattacacatttatctatacatagtaacaagaaaaattaatgatccacctggaaatttataaataaatatatacaatttatatattaatttttaataagcatatatttacgttaataaaaaaaaaacatatatttaaatttgataggtgtgtgtgtcttgtaggtcctgagttcgagtttcagtaaaacatggttgtaatatataaacgcttaaataaaaaaaataatttagcatacattgctcgtccgcctggtatttcaaaaacaccacaaaaatatagtagttaacggatatttaactaacagtgtaaaattaaaatataaataaattttattatcaatcatttttaaattaatgaactaattactaaactagatgtattgtttttatagtttcaattacttttatataattttttaataattacatatataatgatatataaaaaaaaattattaacttgagttattagaattaaaaatttattattattttaattgacaaatatataattataattattattactaaattattaaactttttaatattttttttgcttttagactatctatttgtatttatcttgcttaaattcatagtttacatgtcgtgttataccaatttaaaataatatacgtgcctaaacacatatttttttataccaaatctttgctcgtgcctctcaaacttataattttattatgttgtgtccaaaaaatccagcctatagtgatagagggtatacatccctttgattcaaaatttagctttaatttacatgagtatgcatgtatatatatatatatatttataccgtcgtaatgtattagattgtgtatttgtactttttctcaactactacgtacgtatacgtatgtgtccaaaaatatatatataaagatgtaaggattattcaatatttatatttaaatataattatgatggttatattattttatgatttgctataatagattattaattggtaaaaatttattttaaacttaactaattataattaactatatatttaaaataaattaaatttttaattaaaatattttaaaagatatttttataattaatatttataaatgaataaataaaaaaggttagtattaggtttatataatttcttcattattttttattttaatttctaaactaatggcaactgtttaacaatgatccaataactaatataaatgtaaccatcatagttacatatttaatgtaaccattaaattctctttgtatatataaatataaatatttactaattattataagtaaatgttaacaacacttatgctaatttataataaccaatattaatactcttatattatatataaattataatatatatatatatactaggttaatattacgtatatttaaggtctgtttggcacaactgtgttataagaaaaaaatagttatagttgtgttgtaaaaaaaaaaacagctagcagaattgtcgaagaaatttaagttgagtatttgataaattataaattataaagtgttgtaagttgttaatattctattataataatgataatgttataatctaatttattatatttacaagggttaataccattttgaccctgtgttttgcaaaagttaccaattagaccctgtattttctaaaatggtaaaaataggaccttgaacttaatttttgataatttatttttaatataaccaacttgaagacaattcttaatacgaatatatagaaaatgtaaacagtttatagtcatagtacttttagatcagattataattaaattttattttgataaaaaattaattcagggtcccatttgtactattttagaaaatacagggtccattttgtcatttaataaaatagaggggctaattagtaaattttgcaaaacaaaaggtacaaaatagtatttaccctatttacaaatatataagaaaattatgttaaataaaatttttatttttctaaatatttttgattatttttctccttagtttaaatttatatgcatttgatataaataatttataatatttttaaattatattttatcatgatttaaagaaaatatagtttataaaatcactctaagttgatgtggtttgttaataataaaaatataaaatattttttaaaacaaaataaaa

SEQ ID NO: 299707 - DNA, 5375 bp, Cannabis indica
gtaaaaatacaattcgcttgaccttcctatttggcccctcctcgggtctttgtctggttccgccactgactggtgtatatttgcttcttaggattcacaataaatttcaactgacatcaagtctgtataaacaaagaaaccaacaaaaaagtagttagtattttcacttgtatagaaatatgttaatataagcaaatctaaaagagcaatataattaccaactgaagttgattgatccatatgatctgagaagctaacaaaaggagtgaaattgtattctactgaagttgacattgagatatcttcctctggcacattttcaactaaagtacatctactatttattacccattcatatggtatccctagtacttgatattgtggttttgtaaatttgacataggcgtttgatatatagtagcatccgtgaacagtcaaggtattttgaaatgtctcgatgtcatcatcatatatagtggcctgtatttgtgttttctatacaagagtgaagaaaattttcatttagcaaaatgaagaacaaatgagcagaaattttgcgtatcataaaagttaggaaataattaagttgaagaataaatagtgacatctaaagaataccgtaaatgaacgaaaattagtagtcaaaaatgttcaaaattaacttcaaaatagctatctattatcttcagaaaaacaatttaagagaagaagaattgaacaagaaaatgagataatatattttccagctaacctgcaattagatagtagcaagtttttatatctttttccagcatttcgagcagtttttggcattcctttctctagaacaatcactttcaccctccattttgtttctgatgggtggatatctttgttaaatttctcaattgttgccattaaaacctgaaatgaattgaaaaaattaaggttcgtagaagaagtgatcaaccaaatgaaatcatattgttatattgtgaggtatactctgttatcttgcagcaaaatcatgcccaaaaaaataacagctgcaacattaaaaaacaatttggaagaacattttgaatccaaaaataaataaaattatattgatgagaaatagtaactataaatacactttcattgtcaatatataagctaattaagtcttgactaagaaaaatgaggacaacaagatatgcactatttgttagaatggaggattactctaacaatagtcttattgatataaattcaacctggacatgtgtaaaataagtaacaaagagatgctccctaatgtccatgagaactaaaagtttgtacctcacactacaacactatcatacaatatatgtagtgtacaaaatcattcattaaaaattaattaagtgatagtcacatattattattaatttacaaacaaaagtctatttttgcttcattcagaaaaataacaaatgggaactgtatctaacacggataaaaaaaaggaatttataaaatttcaattgaaacagtaaatattattagctatagaattataccaattttatttcactacccaaacatggaaaccaattaccaatcaaagttgagaaagaacaagataagaaaaaagaatcgaacgctgaaacagatattttataaggcaaactagtataacattgaagaaagaaaagtgcaaattaaattggctagtgtgaaatgacatgaaaacattgttaacacatgagaaaattcggtctccgtgtatgtaaagctcaacaaaaagtttagaccatactttggtgtacctcaaaattgttatcaaaaaattgaccaatcccaattccgtacaaagctagaatatataaaataagaaagctaaaaaaataccaaccttacgtgaccaagtcctgcaatgaacgaagagcaaacccaagcaaagcacaagatgttgttgagccttcaaaagaaactggttatcatgacaaagccacagtgggcaattcatcaaacatgtgaggtgcaatattagaagagtgttgattaacaaattattaatacatggaatcatactccaaacttatataaagaataattgtcatataaggaatagaaacacaatctaaaaaattagagaaaaaactattcattaccccttttcctttttctttttgcctcccacttgtacaacaaactcctatagataagagagaaatgaaagttatagtttttgcagagagagagaactaagacttacttgcttaggtagctgacaatgaaggattggtactaacaataacaatgacaccaaagttttgatagatccagtagtagaagtagtttaagtgtttgaggccttgagaaatagtagaaattataactgaaaagagagtttatgaaggtaccttttattttatttttttgtagtcaagtgacgagcttgatttttttagttggcaagtgaaatgatacacgaatgttactggatagttttagcagatgaagtgggtagaaaatgaaggatacacatcttctagtaaaagaaaaaagagagacacatgtagttttgtgtgaatgagggctatcattttttatgactactaagtgtaatagaacattgtagaaattacagtaataaaaaaaacaatgaaagattagtttttgacttttgataatatatttcaaaaaaacaattaataaatacaattatagtaaaaaagataaaacaataacttaccaaaatttatttatattcctgaagtgtaaaattaagttctaaaaaaattaataaattattaatttaataaccatttttttataatgtctataacttaaagatgtaagtgtatttgtgatagaatctctttgtaaacaatattcttagtaaaaatagctttcgatgaatttattatatcaggtttaattaaaatctttatagaatcagctgtttttactcttgataatgcaacatattattgacaatgtgagaaaacaacttctggaagatataatctaataaagtctaaagtttgtccttgagctttgtttataatcattgcgaaacttaatcgtataggaaattgagttcttttaaaagtaaatggatattttttatttgaggttggtataaacggtattgtgggtaaaaatactctttttcctgtataataaccacaactaatttctgcatcaataatattttgtagtaaatgtcgacaaattaaacgtgtaccattacataatccctctgaagaattaagatttcgaataagaataattgggcaattcggttttaatattaattcatgaggcggaattccattgggagttaaagtgttcaaaaaatcttcttgaaaagattgttcacttgtatctaaagtttcatcaaaactataatatttagtagggtctcctggaaattgatgtattaataaattatttatttcatcaacatagtcattttttggtgttaaaattactcgattaaccatgacgtccaaattatgataatatttgtttatatttggaaaaacagaagctattaaattttgcagtgatacattttcattttcgtatggaataatcatatttgttggtattttaatgttctcattttcatattgcctttctattccataaccaattcgtacaagaaagtttgaaaatccataatctttgcatgctctcatgttgatagttaaatgtatttttataaataatggccataaataagaatttgctaaacttgcatttattatttcttctttttttgctcctgggaaaactggcaagacctgacgaaaatctccaccaaaaacaaccactttacctccaaaaggcaaattacaataatttatatcttttaatgtaatatctaatgtttcaattgcatatttattcatcattggagcttcatcccatattataacttttgctaatcgtaataattttgctaagccttattgtttagtaatattgcatgaactattatgatttattttaaatggaagtttaaatcttgaatgagttgtatttctgctgggtaatatagctgcagcaactccagaagaagttgttgctaatgctatgaagttttttgatttaatattagcaagtatggcacgatataaaaatgttttacctgttccttcaggtccatcgataaagaaaattactggttcatttagaaaatttctatttaaaattaaattaaacgcatttttttttcttcatttagttgtgtttcagctaatatgtcgtcttcagtaacaataactactaactcctcatttatttctttctgaaatttattttcttctgataaagtaattttagaattaattaaatgataaccatttatatttttcccatagattcaaatataaaacttagctgctctaataatttatttctaataattgcagaattattacttatgtgaataagatcttcactcattgcattttcaaatttctcccttattatttttggattttctggttcacaatgtattaatattgttacaaataagcatcgcaaagtgtacgttgattgatatagacaagcttcttgaaggcataaaaaaatgtaattatctccctttagtaatccaagtaacatagcagcttcacgaaatgatgatgtcatagtgttgttgacaaattttaagtattcaaaagaagtttcacctttcacatgatttaaaagtaaacgtaaataatatctgtctcctttagttggatttaccgttataactcttccaataacattaccttttttcttgcataccaaaacttatctctattattccaaacaaaagattgaggaaactgcttatatagtaacgtttttgccttattattatttgtattcatgtaaatattcagtcagcattgtttttgatgcaaaatcattgttaataagtttaccaagatcatctgattttttaaatgtcataaattgtttatttctagatgtaactgtaaagtaattacagatgggtatatttcatttaatgcaaaactaaatatcctccatgttgcttcaggtggggatacccatctacctgattggaaattattaatttcatcaatgttatttacatcttcatctcgattgatatgaatagcaattcgatcatggcctatatatgtatttatataagtacttaactgctttaatagttgaacatatttctacatttatatgacaatcaaattttgcaagtaaataaggattatatggaacaacccattgattatttaattgatgccctctaactttaacatattgaccatcgtcgcgcctcttatatttcaggtactcattaatgcctaaatatgtagttaatgaattgtaatacccggtaaaaatatacatatattttaaattttatttgttatacaatttgt

SEQ ID NO: 299708 - DNA, 4496 bp, Cannabis indica
ttttaaatagcaaataattcttgaaaattgtcatataccggaattcttctattcaaatcctaaaatatcacattttgaactacaaatagtttgatcattcacaaagaatgtatgtatgcagttcagctgtaattctaaattcccctaatttttttaaagtctacctaaattatttaataccatcataattggaatcaaaaagctcaattagccaaaattattgagttctgcaattccaaattccctcaattttcctaaagtctacttaaattatttaatattatcataattaaaatcgaaagatatttttttaaaacaaaaaaattgtcattaaaattattcttttaattgtcgaatctaaattaataaaattttatgctataagtttaacatatgtaaaattatgttttacattaatttttaatattttaaatgtgaaattcttattttacagggctgacagacacatatttatagctatggtcaaaataagacctaagtaatcaaagaaagaaaaataagacaaaatttccattttcagggtattttcaccacatttatgtagtttgatgctgtcagaatccaggacatgaggacaatgctcagctcatgaattttgtacgaaataatttgggttgatatattgaacataaaagctagtatagtttgccaatcattatatatttatagtataaaatcaaagtgttttatacaacacataagacacgaaagaattagaactaagaattatatcacttatttctacttctctttttgaactctgaatttgcataatttggattttgaggttaaaaagaatctaactttctcaaaagtttgaaagccaaactgtgtaagaatcaaagatcttattataaatgcccaattatttaccatggatcagctataattacagactcaaattaagaatagtttaactttctgtgtgttcatcttgcacccaaagcctcattctcagtcacaatattttcatcaacaagtatttggtactgaacatcggcatttccattctccaaagatggtaatggatccctttcactatacaaacaaaaatgaagcttaagaagtaatgccaaaactccataagcaaacagtgagagccatagtgattgacaaaatcagtgaccaaaattaatagaacatttctaactacaaacactatcatgctaggtggtgtttcagtgttctaatgagctataacaatatcccagatgagtttgacacaaattttgtattttacttcaatatctctatgcaaaagataaaatgtgtaaggaaagttagaatagaacttacgttagtgagtatatgatgagcccaataactacaactgcaaaagaaagaaagtataaccaatcaacctgcaaagttaagattgaattctggttagatttgctacaactggcaatgaggattaattatagagaatgagaaggatggtatgattggtacctgttgatgatagaaaaagatgcgaaaaataactgcccacatgtccgcggtgagaacagagagattgaacattgtagcaccacttagctgcaccagagaattcccaaagaaaattgttaaaaacaggtatttatagtcattgaatctattccaaggttcacatttgttttactcaatttgtagttgttagtccatattgttgccaattttgattgtgcattgaaacatagtacttataatgaagaaagtgaccttgagaacatatggaacaattgtgtagaacataaaaccagcaagagtgaagccaacaaaagccaatatctgaagacaaaatcaaatgaacaaatacaaagatcagtacaagcaatgttattacaacaagagattatcaattctttgaagaaaattttgaaactttagttacttacaatatccgtggacaagttgattgactccaaactcttcagctctatgaaaggtctaattggatgttaagaaatgaaagcactagctataaagtcatatattgtatcaacagtgcttatatattttgcaaaagctgcaatgggtggatacatctcacaaatagttactagaaatccaaagacaccaatcatagaaactacttcaacgcgatctttcttctttacacaaaattcctgcaacgtatgatgatcgactaagtgtagctcgtaaaaggaataacctcacttggttacaatttcagttacaacttacaagtaagtagctttaggtgcaaatagatgactaacctccccaacattgctcatagcgaagaaaagagtccccacgatcacaagtgcgtcgccaagtagaggtcttgaaccacctaaaataataaacaagttgaaaaatgagacaagcgttcaaaatatatgactgattcaaatacttccaataacaaactcaggcagaccagaaaatattaagaaaagttacataaatgaatgatggtagtattatcttaagaaaagttgaaaagttaacaacctccatcaccctctcctgaatcagagaagatcaccaaagcgagacccgccacacatatggctgcaccaaaaatttgccacaaggaatatcgagtgcctaggaagatccatgttaacactatggcccatgctatagttccacaatccaataattgcacactagtaattgatgagaattggtatgctttattcactgcatcaagagaaaaacacattgccattcaaaaaccaaacaaatattttaggaattagttgtcatattttaagaccctactcactatcataaaccacataaatatttgttaattgatagtaatgaatggacactcaaccacctctatattggcttgcagtactttcttcctatttattccaaaattgactacttatctagatccaaaacttcataaagaaactttatggagactttgaacatttgggctctaccataaagtttcagcaaatacatttagtctttattgtatatctaaaaatttcaaccataacaagaaataatgtcagaatccatatttgttataactcataagacaaatggacctatcaattccataccattaccccaaaaaagttaattagcttttataaaaaagaaccagttcagcttaaaaacggacaaaagctaaagcaagcattaccactcaccaagataattcccatgaacatcaactaaccccaataagagataccaataccaagaaacctgcagaaccccacaaattctttatcaaaatttttggaacttaataaccaacaaagcaattataagttaataatcagttaaactcggtaagccatttgtcaaaagttcaacttctcattcccatttacatattaaattaaaaaagaaatgcacctaatggatcttagaaataatgttaaaaatggttgaaaaggcatgtttttataagaaaaataataaaattaagaaaagggtcgtatcccatttctacatacatacccttaatccctggcgcctgtacagtaagatacttccataaaacaagcccaagcttaagtaaataaaaatgctctgtgtaagaggcgcatccacacctgaaatggagaattggtgaatcaaaagaaacagatcacaaaatccaaaaatctgaaatggggttttaattactgaagtcacctaaactggcaatgagtgatgaagtgaaactcataagagctaaagtgaaggagaccacttgacccaagaataagaggtacaaagtttttctagtttcatggttacaccaccagcttctgttaaacacagagaagttcataaccaaactctagtaaatatcaccctctctaatctaatgatgaaaaagtgtcactttttgaatggatttgtagttgtacgagggagacgtgagaagagggtgttcttcattttgtgctctgaaatgaccactcggcttacctttcaagatctcttatgaccggttgatgaaatctagatagatcacgtttttcctttgccattgaccacagtgaattggttatcattagtagcacattatttcaatataaaatcctatttatattggttaataaataaataaataaataaaattgtgattcacccactcacccaactgccaaggaagtggagatgttgacaatttcatgatgttaattaaatgaagagatttcattggaaatagaaagtgtgaccgttaagttgagacagtcactcactcactcacacaaccaaccaaacttggcaacccaacacataatttgtcctattgcatattactgggcggcaaactcaccacgcaactgctgggccaccaacctcattcatgtccaatttgtttgggataaattgaagaatatttaatttttttatattcattaataaaaaataatcttatattaaattttattaaaatgtatttacttttatgagtgagttgtttaatatactctcatccttcaagtttaagggattatttcacaaaaacataaaaataacaaaaaaatttacaaaaatac

SEQ ID NO: 299709 - DNA, 2386 bp, Cannabis indica
attaattatgagttttttttttcttgtatatatcacatgtgtaataataggttggatggtggtttatgcccgtgatgaatatatataaatgtgtcatttcagagaggagatattctttggatgctctgaaaatgataaaattaggtataaaaaataaatattagatatttttaagaaataataaaattaagtttgccctaatttatattattatatggatgttaaaattggaggtttgcaactccaaagtgacctaacaggttcatatatacgtaacattataaattaatatccaattataattatggtacagatccgatgtggccaaatagatagagctcatttttgacagagtgtaagtgactgtcaccaattctacttattatatatacatataattaacaagcatttacaagtgttaataaacagataatgtcttattcacgtgatacattcatgttaaatatatgtattatctctatttctgctcatgaataatttattaatatgacaacagtagaataattaagtttgtaattaaaaaaatggggtaaagtaatatataattatcaccaaggatttctaataatataattgaaaaaatatatcttcactaccgattcatatttataaatatatggaggtaaaactaaaaaaatagtatccattaagtctttaatgcaagttgcggtcgaagtgactaggccgaagacacgtttgtttgggcatcacacaccattgtcgaaaaaaaaaagccattaagactagcttaatagtgagagaaatatgaaaaaaagagagttataaattcgaactctaaacttttaaattattaaactattaattgattataaatactattacgctatactaaaaaaaactattaaactagtatatatgtatagtatttaggaggtacgtacgtaggaatagtactttaattaattaatatattaagtatatggatacatatacagattaattatcacaaactgaggcaaatatatccatacatataatatgtgaaaaaataagaaagtcaaaatctaaaaaaatatatgtataaatgtcagtgtgatttataaaagaaaatataaaaatatatatgtaataaagaaaggaaacctatatgagatgtgatagtatgatataaattaaacatattcattttagattaatagtgattacgtgtacaaatctatacaatattgaagggctggcgtggaaggaacataaccatgcaagtatgcaacgaatgaggaccaaaatgacaagaaaaaaaaaaagaattaaggcaaaaacttcaactgatggagagagcagacaacacataataataataataataataataataataataataataataataataaaggcagagctctgtagaaacagcttggcaccaccctaaccacatacaagaaggggttagggttttaattgggttgacttgaagatcgagaagactggtctttggtcacactcgtgcttttgcttgtttcaattcaaattattaataattaaattaattaattattatatataagggctagagaagaagaagtactacaactactgacctaggatgaagggtcgttccaggaatttcaaaggaaataacagctacacaactttggacctttcacccaaattaagtatcctaatatattaatattattatattataatgagaaatgtaaatagacgaaatgtcgtgtcatattattattagtataataatataagatttgacataatttaatttaataaatattataaaaatattatgtcttcttttgtgaggggttcaagaaagtcgtttgagagtgattcagttgggatcaaagacgttttctgtttgaaatttttattttcatttattaatttactattattagtttaattcgaattaatgtttttatggcgttataattatagagagttcattccttaattaattttaatattgtgatcgtatttatgtgttgaaactaatttagtttttcctattaatcttgtcttttgacataattctttagtcttttccttttaatttttcctattattagtcttgtcttttgacatggttttttagtcttttccttctagttttttctggttcgagtcttctcttttggcatgggttgtgtaactcagaataatcatagtgctatggcaacagcattcaagaagggaaagattggatatgttcagcccgaaattgttgagattataagcattaaagaagcattgagttagattgcaactcattcaagggatagagttatgttggaaacaaatagcttggtgtttgtcccgattcagagccgtatttttatgccttcacaatttggtcttattgttcaagatgttcgaaatt

SEQ ID NO: 299710 - DNA, 3251 bp, Cannabis indica
gtactgtaaactattcggaatttaaaaatttagagggatgatactgtaattatgacgaatatctgctgtgaaaaaaaaatattccaacatataattttggacatggagattgattaagaggttataataagaaattgtaattagcacttctcatttattattatgcagggccgcccttgaatttggcctgcgcctagagtccatccaatctaagggctccaagaatataaaatttctttcaaaaatacacatatttttagtaattttttaaaatatttcatactttctaataatagtatgacattgtattgtccgtttatgaatttatttttgaacaccttttcataaagtattgtctatccttatatatttataattttttctatttttagtcactttggttgcacattcaacatttatgcttatgattattattatcaaacaaatgtgatgttgtagctgaaatgatcaaagattcataagcaattctctatgtatgttcttgtattaacttttttttgagggtgttttaatcaacaaatcagggtggtagtaatatcagaagacaaatcatcatcaccacaacaagatgatctgacaaagatgaactcggtgattcggcgaatcgatctgagttgcaagctatttgcacctgtaattactggcttcataataagttttgtgtcactaaaagcttcagcaatgagtttggctatttggaatacaatatcagtttggttagaatattggcttttcatatctgtctacaaaggcattccagctttacaagaaagtaaccataaaagagccttaaatcaaaacagaattaataccaaattggtttcaagtggttcttatttgaaagcatggagagtttatttgaaacaggacactgttctacctggaatagctctggctttgttgttcttcactgtcctaaggtgaaattaaatcaatataatgcaatttttctttcagaaatgctaaaaggcattagtagtatctagcactctcctatgtgttaatatcgctattggtacaattaagtatcaagtcccatataatttaaaataataacttttagagatatatatctaaaggtgcatagaattagtctttttttcttttcattttatttattaatatatatatgtgtgtttgtgtaaatgtagttttggaacattaatgacagcagccttagaatgggaaggaattgcagcatttgagattggaatagggcgtggagtaagtgctgtgattggaattggtgcaacaattgtgtacccattattgcaatctcatatttcaacacttagaacagctctttggtctatttggtctcaggtactaaattatcataattttacttactataggttaaaactttttatttttacatctaatccatgtgaaaaagtattgtctaatatctcctatcaagatagttgttatattttgtttactaattttgaattacggtatcacaagtgattatttgctagtttattcctggtcggatcttaaagtgtctttttgtactattaactagggaaatttacatagtatactaacttttgccatttttttacaaaaatactgccaggcggtatattttacttttttactgtgtttttttataagtttcatactgcagtatactgtgttaagttttcactggtgttctactggtattttactagtgttctactgttgttttgagttaatctgctttgtgttttactggggtttaaaaaaaaaaaagaatttttgaaaaaaattccgtgtggcagtatttttgtaaaagttaacccaaattctagtatttttgtaagtttcccattaactataataagaatgtttggttcaatttcaaaatcaattagtaatgaacaggtctggctctgggttaagacgggctaagctcgtgtgtagggcccactcaaatccagggcctaaatttttatataatatatttttttgtattgaaaaaaattgcctttttgaaatattttgtaaaaagagatttaataatactcacattttactttagatataacaacacactcaaaaaatttcttggaccattttactcagggccagtcctagtaatgaataaaataacttatgttcttgtatgtttaatctatgtgaacaatgttgtttaatattgtagtaaatagtaaatactaactcatgatatgtgttattgtggttttggatgtagtgggtatgcctactagtttgtgttggttcaatattatggactaaatatggaaacaacaatagtaataacatatcatcgtggtatacgctaatgggaggagtagctctttcacgacttggattatggtcttttgatttatcagtcatccaattaatgcaggttataatctctttattatctcaacacttattgctacctaattctctgcagaaatttaactatagttaaacaattttataaactgttaactaattaaaaaattgaaataattatataaaatattaatttttgtaataattttacgtttaaagtttttatatatacatatatatttacaatattttacaaaaaatacaaaagaaccacagtaataagaaaataatatacaaataataaaataacatgaatttaacataaaaatatactaaaagactgttttatatataaataaaatttaaaaaatcgtaaaaatattaaaattcttaaaataccgtatttttgtaatttttttatgctttttgtatttttttttttaaattatcccaaaaagaagacagtatagaatacatgtattttttttttataatttattgatgtactttgttgatatagtattgatattactacaacttttactgagaatttgttgacaatgaatattttattgtatgcaaaacaaataactattatgcattgaggagactagtgtataaatttcaacactttctcccaaagaagagaacaaatgtttagctttcccaaaacaatttagttgtggttttatttgtttatattttataattgcactttaagttacacctatttgccaagaaatgtcaacttctacaccaaagtaaagacttactatatttcagccatagcatataatcattaaatcttgaataaccccacttatatatacacttaacaaattgcatgtgttgggcctcttgtaacgtccccgcttcaagcctccattgggtccttacacccacggaataaatggctcttatacacgagtacgtca

SEQ ID NO: 299711 - DNA, 1419 bp, Cannabis indica
gaagaactttgccctagcagagacgaaaatggaaaaacgaatgataaatagaacaatgaaagaaaatgaaagtgaagaagtggaggagtggaggagtacgacggttgattggacaagattgatggatagatgtcacttttcacttttccatttttaataaatttaaatttcaaaaaaagtaaccggtagccattttttgatacctaattacccctacataaacccctacatgaaccccaaccgttggatcaaattaactacccatccaacggttacagtacatcacggattgaaatccgtgtccgtacagtaacgggacgaaatccggtccctataaaattattataattttacaaaatattttgaataactacaaaatacatcatcatacaaaaaaaaaacaaactaaaattaattatcctaaaatgtcaaaatataaaaggttgcaccattaaaccttcctattcctattatattattattatgtctatatatgtgtgcagcgttcattgaatacgtaagaagtcattggaggtctatttattattattattattattattattattattattattattattattattaatttcctttgaagccctccaaatcaaacttatagccttttaaatactcataatgttgtggtccttatttatcactggtttcatattggtgttggtgtggtccttggcatcacttgaaaattttagcatttcatttgagatggtaattaaggccaagaaaattaaatacttgtttattgtatataactcatgtagcatatataattatttaagaaaattttaataattagtttatataaattaatagcaatattaatacttggtaataattacattaaaaaaaaaacaatttattggtttttatcttcattgtagtatgtgcaaataataagatgaaaagtcaaggaaaactgttgcaattgcatgtctcaaaaattaaagtagataataatgtctagtaaatgaatgccaatgtggttgtaatgtttataaccctatatagctaggtcaataaataaagtttgtcaaaaattaaagtcacattattattattatcaattgtagtaagtttattatggtctctacactctagctttcttgtaaagttttcatatattggatttagttgtcatacgcggcacaatcatgaccacggcaataataaatcagtttaaaaataaaggaaaatgtatttggttattatttttagaaatttttacaccaaaaatacaaattacacactttattacatataaacctacacacggttaaaacaacttttttaccttttctctatattttattacacatataccacatacacatcacatctatgcaccagtcacgccaactcacctatcaaccatcatgcatccctcaatcacttccc

SEQ ID NO: 299712 - DNA, 2423 bp, Cannabis indica
aacaatttggtgttttctctccttatttttcgtttttcactcatctaatctaatctgtgtttgtgtgtgggtgtggatctgggtttcagggctaaaatcgagcaagttctcaaagagaacttgctctgctagggtttcgagtttgtgaggttgtgtgtgagttgtgtctgagtgtttagggttctagactcttctaatgagtctttgaaccaaaggttcaatacgacatcaagtttggtgtcgtggggataaaacggtgccgtattagtctaaggtttatttagactagctaggaaaggtcatttctgaccttgatactgatatttaatcttttgttggtgtagggttaaagtagtaaaatcctacatacgagtatagtgatataatacttttataactactaaatttaatatataaattaacatgctattacttttcatttaatttataattttatactaattaattataaaataagtaaacaataatatcgcagatgaacataacttttacctttaaataaaatcagatcataattacggtgtattaattctctatatgaacaaagctaacaaaattgtttgttgctcccattcgaaaaaaaaaaaaaaattgtttgttaccctgaactttggagaaagttagatgtgtttggcaatatcatattttttaaaaatgaaattttgaaaggtgagtttgaagaataataaattagaaaacatcaaaaatattctttcctatttcaataacaatttttattattgcgtgtaatatatattttttttctcaaacataaatttttcctaattaaggtcaaatctagggccgaggccagggtttagggtccgagggctaaggacatggtctagggtttgtgccatgaaaccaaaatctaggccaggggcataatttttttttttttggtaagtgagggagcgtaatttttttttttttttgtaagtgaagggggttaaaaagtaaacttaaaaagagaaaaaatgcatttaatgatattagaacccttatcttttaagatatatactaagtagcttaaccattaccccaaaattaatattatgcttgtaaatatcatcttttattacatatatattgtaattaattaaattgcatatatattttctttctgattttttttcaggggggcgactgccccgcctcagttatatgtgggtccgcccctcacaagtgactttttgttgtgactaaaagtcatatttagtcacaaaaaatttatgttatgactaaaaaattgtcatggtgattgtatacttttgtcttttgcatacgtgttatattttgattgaactcttctcttttatatgtgtagttatatagtttagagtgaggagaataaatgaaaaatcaactagagttgggctagacatatatagggcatacgaatagactaaacattgcacatttataaacaggtgtgaccataaattaaggaaggttcagaggaaagctttaataatttaggtttggcttgtgtgtgtgtgttacggactgaaacgtcttgatattgatcaaataatgtgtgtacgcatgccacattatatattttgataacgaaatgtcctctattcaaccttaatttagtttcttcacaatatctacatatatatatatgattctttttcatttcaccaattaaattgaattacgttttcataaaaaatatgatataaatatatatacatatatacaaaagtgatccattattactcatgaaacctttgaatttccatacatcaccaatatatgctttactttaaagtgctaaaatctaactctatttacgaagctagccaaaccattaagtataaaaaaacaaaaaagttctttagcaatatatgacttttaagtatagcaaaacaaatataattgaactaatgctgatctacctagctagctacgtatatgcatttaatccaatattcaaaagcaaaatactttttgttttgttttaatttaatgtattaactttatttttttactcaactctttcatataataatatttttgggactaatatacatgtcaattactgatgatatatacagtatttgagagatctagatacgcgcgccagtgtgcacttttaacttgtttttaagatttttagccttaattttgacatgtgtcaaattatattcttgaatttttctagtcgttaaaaatttttttaaaaattattgagattgttagatttaaaattttttgtctaatttcatttaattttactatttcagtgattatttatgtagtaaaccatgttcctcagactttgatatctaccaaatcatgcacctcgaacaatttgacttgtactaaatcatgttccatgaactttcatccatgttagacttttttttattaaaattggataaaaatccttaaat

SEQ ID NO: 299713 - DNA, 1910 bp, Cannabis indica
aaaaaaaaatacaaaaaagttaaaatatgaaacaaacaacaattctcagattcctgcataataatattataataccaaattacaaaattatatttgatacttaattattaaacatagtactgactgtatatatataagcacaagaacaaatatatatatattattcttaaatacttaagaatttaaatcgaggtcatatatatatatatttaaatatattatcaaaaagctaactagcccatgaaatattgtttaattatatgtatatagaattaaaaagtaggcaaagcacatgatatgtacgaataaaaagtagatcaaaatggttagatttagtgaattaagtgatgatgatactaatatatgtaatcaaaatggttaatgagagcactagctacaactatttaaaaaaacagtcttgactgacctcatccgtactgcgtcatgtttatacattcctctttttgcaatttaaagtacacaccagtagatgaccatagatccatgtatatctactttaacatctctacaaaactaattaacaatacaataatattcttcaacacactaataaaaagaattaatctacgaactaaaataactttataactgaactggatgaaaataagctaaaattaaagagctttaaattacccaagaaacatattagttaatatatatcaatgtataaataattaatagtataagtttaattcttggaaacacacacatatatataagagtaacaacatcaatcgagattcttggaaatacaatacatatataagagtaacaatatcaatcaagaaaaaaaaacaaaaataatacacaggtaaaattatatatcttgcacaaactagtgttaccttaatcaagtaaatatatggctgtgtcttcatcgatcgaactcagatttgatgatcaaatctgaaatatataatcaatagccatatatttgctgatgcagcatcatcaagattcccataaatccatttaaaaggggtttaactttcgagtctccatatatttatatatgaatccctttataaaattttgtgaatcttgaagatgccgcatccgcaaatattgactgataatagtgatggccctcatcctgatcttgaagatgctgatgaacatgagatcttccccatgcacatatttatatatatttaaaatctctctctaattcaatatatgtaaatatatatatatatatggatgtatgggaataagctggtgtgcagagataaaataaaatagaagagaaaccctaatatgatagttgataaaaagaaacatcccacgaagcaaaaagtagaggagagtcagaaaagaataggtaaagccagcaaaaacggctcaaatagttattctttatatatatgaacctaccccaccgatgtgtttataaaaaaaaaaaaattataattataaataatacataaagatgtgatgatgttggaggatgggaaatggagttgataagtatatggagatggtagtatttatagagagatctccctcaacaaatatttgatgggtttaaaaataaataaataattaattaattaacaaaaatatatttgactccaaatttggtggctttttagtttttctcgtgtcctattatttgggcgtcagatatatattgaccaggtagtccaaaaagaaagaaagaaggtaattaacctgaaaggcatatatccactaaagcaagactagttctaaaaagttatgccccaatgcctctgcccttccaaccaatcatataatatttaagaatactctattcagaataactctaatttgttataaaaaataagtcccgatttgggtcagttataaataagataacctctaaattgtaattagttatacattttctaagtcccgtattaacaaagtat

SEQ ID NO: 299714 - DNA, 1689 bp, Cannabis indica
tgtgttatgcttttcttgctagtttatccgtgcttatatgtggtacctttcgtgtttttcataccgcgtgtcgtgcttaaacacatatttttcgtaccgtattgggctaatttgtagcatcatatagtgtcctatatccaaacctatatttttctgtgcctagctagtcatgctcgtaccttccgagctcatcccaatttcatgttgtgtcgaaaaatcgcacccatattttcccattttttactctatgctccttttaacaaatgtgggtttggtggcacttggcagaggccaagctcgtcgatgagattaattatgagggtacgtgaaataaaaaattaaaattgaaagttgaaccagaccctaccataccctacccttatcctacctatatgtagttttaaattttctattatattggaagaatttgaagtggctggctaaatattggggcagaaagaggaaattaaaagaaaagagagagagagagaaacatataattaagtaactatatacctaaacatgaaacttggaccatctcactaaaaacacattcgtttatattctttggaccatctgtaataaatacaaaacggtgtgtgctcataactgtgtttcaatgttattcttcttcttattgcctcatatatcttacctgaataaatattattaaagagaatgatgatcttttaataaactgatataaactttctttatctaacatatgggtagttctatagctttactctatgtttattttctcctacactttcattttatttattcattgaaataacttatttattggaaaatgatgttatataagtctacttttgctcccacgtggacatctttctctctctccgaatgacagcaaaacaatggatttttaaatagcctctgaaattataatacactttgcaacttaattcttatttatttattttgacaaattagtctcctaatctcaaagttcttctttttgttttttttttttttggctgaatctcctaatgtcatagttaaaagaccaaatttatcaatgtaagttataactcaagataatccatcaaaaaaagttataactcaaggtaaactatatagaagagcccatggcactagtagctagccagaggattaaataaatttgttgaagagaaaggataagaatttttatcaaattttgatgtcttaaatctagcgccaacaaacgaatgtactgttatttaaacatttttttggtaaaccatgagaattgttgaaaaaatttcattacatatctcttttaattttaattttatttttctttaattaaaattcatctaaaaaaaatataaatttgttatgtttaaaattatgtattaattatgtgaatgtgtgagaataatttagatacaataatcataaaaaaatatatatttaattaaattttatttaaaatcaaatttgattaatatatatatataaaaaatatttttcaacttctctcgtaattgtattaccactaaatcaattacatcttaacaacactttataacaaggtttgagtatacatattttatacatttcacttttcagatttgtacaattacaatttttcaaaccacttagcaatgttaatctgtctaagaaccactataaaaaaactgatacttttagtgacaatattttagtcacaacataattttt

SEQ ID NO: 299715 - DNA, 5148 bp, Cannabis indica
aaaaactatgagcactaacatttatgatatatatttttaaaaatataacttactaaaatagtagcttactgaataacaactcattattttcaaaaataaatttgaaagttactcaaatgtattaatataacctaactaattaatgattattaaagtgtatacatgtaagttttagaggtaacaaaatatgtctcaaattatataatataaaaataatactttttatgaaaaagttacttattagtttcttatcattatgaaaagtaaaaaaaaaagttaagattagttttatttcaagtatattattttaaaattaaagtattaagatattattgtaattaatatttattaatttatttttgtaattattatatattttacgcatattttttgaaaaatccaaaaaaaaaaattaagtacagctgtatttgtgactcttctaaaatctcagatatttgtaacggatgctcattaaaatcccagagagaaactagtgtactgaagaattatgagattttggaaacatatttatgagcaatgaatattggctttgaaagaccaatttcgtctatcatataatgtgtatgatatacaagaataaaaatacattaagcagcaaaactaaggaaatagttgggttacatacaagcacaagcaaacaaaaacttatatgtcaactttatttctacatgtggaactacctttcatttacctgctgaaaatccaatgctctaaaccctcgtcaaagctcccaaataatattagaacatttcagtattatccatttcgaaaaagtaattttagaataataataaagaaaatgacaatagctggttcgtatgataaaaccagcaaatgggtacattacattacatacattccctcaaaaattattatttctggctctgtacctgaatattacatatataaatatatatcaaatgttatttgttctttccctagttgatctcctaaacgatacatcatattttacatcgtttaaagactcggattctactttctcgaagtcagttttaggcctaatattactactactccctaactttctacattgactattagtgtcagaacgcaaaaagggaacgtttccttctccttccaaacccaccgcccagccactcccactactcttctcattccaaccaccatcgtcagcacaaccagtttgatgccctccggttccagggaaaactgaatcatatcggtccaaatcagaaaggcgagaatgctttgagtacaagggggaggaagaggatgacgaacaagtgtcagaatcaggagagttcctccatgggctgctcaagccccgtcctgactccccaaatatgtactcagagaactcatcagtgctaatagagtcacgagtactctctgtactacaggaaccttcatcggaattattactgatgagagaagagttgtcacttgaatcctcttctaaaatcctctgcagccgattgaactttgaataaaatgagtcataattatgggcagagccttcggggggacttaaattgggtaatacttgggctatacttgaaattgtggtggattttaatttaaatgcagtagttttcccaccaatccaagaaggcatagctctagctgtgagatcaggagacactattttgttccttatcgatcttggggcccttggtgaacacctgcagagtagttcataagtcacacacccataaagttaaaagatatggaaaactttaaagaattaaaatccaaagagtcctcaccttgcataaagaagcatgtacgctcccttgctcaggaccttttcaagttccactgctgttacctgctcagccatagacaagacagaaaatggttacaaagcaagaacagaaatataatttgcatcaatgtcaataagtagaaaatacatagagcaaactgttgaaactggaacaagagtgacagcttggggttagtattaggtattagctttcaggaactataatcaactattcacgtatgaagatcaataaatcatttaactatatatcaccaaccaaatttatcatgcaagtccatcttaaaccataccaagtcggtttctaactttcatatgaatttctttaaaaacataggtgtagatcaaagtgaactgagaaaattgaaaaaaaaaggtaaaacgaaaagaaaggacccaaatattttgagagcgtaccgtgctatcatcaaccttgaaccacttattctgcgcatttttaacgtaggacacatagtgtccagaaaatgcagcattcataacgtccaaatgaacaaccaccccatataacctgtaaatagccaatttatcacttgtgccactcatgaatggagccaaattcaggatctcttgaaaccgtattggcttattaagcttcccaaattttccagactgtaagcaaagaaatcattgtaagaatctaacaaagcagggaacgaaaatcattttaaataagcaaaactagctaaagcagatggtaagattaatttgaaatagattaattacctggaatcgctttaaagcaatagtgaggacattgggagcctccaatattgtcagcttctttttggctttctcataagatttgcatctaattatgggagaaggatccattagccatgtccaaaaaccacaaaaataaaagctagtagaaaagaatccccacaattttgcaacctaaaactaattgaaaacaaggaattgccacactagggcatgttttattaattggaatgagaataagggaataattattcccattccacctctaaacaattgaccacaggaaaaagcattccttcgaaaaacacaattccatcagttgctcctcttactaatcctctttgttaatttttatctttaggatccattaataacaccttttggccctacataacttacaataaaaatatatttgaaatagaacgtacaggtgttttgtctatatgatactctatccattacattagcaataaaaaccaaacagtatttcttattccactattgattccaaatttcaaccaagcaatcgaattcattcatattcccattctattccacttaagcatcaatcacccaaaataaccccaccaacctgtaacattggtacttgttttcaccatctaaagtctctgtacttgtaaattttttaagagcctcttcgagggttcctatatccccttcaatctcaactgtaaggtccatcatgccttcctgcctctcagattttacttggcacttcatgcattttatctgaaaaacacacaatccaatttatttatttttatcaaagctaacaatttctatgaaattcagatctgagatccctacactatctcttacctttgatcgaagataccctccaaatgtaagaccaattagagtagtttgttcttccaaagggcctgatgcacttgtgtcaggttccgcaaggcaaacagattgcatagtgtcaatcacatacctgtcagttaatatattaatttaacccaattaaatcatggctcctccatcaactcgtgcttatacatcaaattagtaatgaatataccttagaaactcgtgtgcatcctcttccctcccattaccaagctgacttcccatattttggatcttggatagtattccaataggtgataatggagattttccctcctttgccttcaaaattaaactttcaaactcacacgtgaaacaccattccttctttatacctgaaacaaagaagataagatttcatatgacaaacaacacaaaacactagctgaacaaacattgatgaatggagacatacaagttttagaatggagtccttgaagaaaatatgcagtcaatggaggagtgaatgccaagcactgaagcacagcattcgcataacagctgacaaaagaggaaacaaaacattaaatctacaggacaaaatatgttaaaaattacagattcccaacacaaacatccaaaacaatgaagttcaatttttaatataacaaaatgaactttacaaaggttacaaaacttcattaagaactaactctctcaagtaaccaaactacgaactaatgttatttttatatgttccatcaaacagaacaaagtgatcttacctattcccacaatttataaggccacacgggcgcagctccaccttgttccaattgaataacttcacaaatgactcataagggaagatcccctggaagaacacgagattaaatacaataaatttggttttacacataatattctatagataaaaacaagaaaataaagaagtaaaaccttgtcactaacactgtatcttccagctatctcactccccagccctaatgaattctgctttgatggtttggatcctttgaactgctcaacaactttctgaaccgaggttttcaaaccattcttgacatttggagggtttgaaacctgatatgaaacagtaacattatcttggacaaaatcaacttcagcttttgaccttgaaattgtagaatccttattgctagatgacaaacaagaagaactagatgaatcacgatctcttgacttcaacagattcgaagtgttctttttgtcattgacaacatgatctaacttctgaataggtgtggatggtttagtagcatttgatgaattggtacatctggaagctctttcattactgggaggcactgatttaacttcccccagcttaaagtcacgtgaaatgcatctactttcaccatccctattcttagatgattcactgtccttgaccatagatacatgaaaatcagtattttctgataaatctgatcgattaagagccttcttaataagcaatgcatctgatgaaggatcctccattgtggtaaatcttttggaagatccagtagatgacctgctcccaccaggtacattggagtcagatgtatcatcaatctcattatgggtattatctgagtcaaaagaatcaagagctctctcccaaaaacctgaagatgattcacaagactcaactgtgggaccatcatgaccagcactatttctgaaaggtggaggaaaagtaggctgctcctgctctccatcactggatctagtttttgtttcactcataatttacactagcagtaaaaccatttatagag

SEQ ID NO: 299716 - DNA, 1881 bp, Cannabis indica
taagtatattctgttaaaccaagaaatgccgttagatagacacttttaatatataaagatatactgcccttttctcaatccattcattggtatatattacgacaaaaataattgtcttatttatatttatatttatatatataccactttcgatctcgagacaataaaccttaatcatgtgtagttaaatattgcaacgaaaccaatctcattaattagtaatatatgttttagttttgtcttttggtttttacaattaattaatgttggaaaaaaaaaagttgatttattttaaaataaaattgatcggtcaatcattaatgtagaaattaaccctaaaaaaccaaagtaataaataagtttgctcactattaagagacaaggtaaaatttgtttgagcattaatagtgagaaatcatatataatagtcttttggggaaattatttataagtaattaaattttaaatttttttttaattcttccgtcttttataagaaattaattattttgaaagagataaataagttagctatagaggctttaaaatataacaacatgacatacatactttgaaaaagcaaatagtaaaagatttggcttgaataattaagaaaaaaaattaacgcatattttaattgttttttagtaaaatttttatattttaagaataataataattaaaaaaaaaatcaagtcggctagctctcactttctttttaaagatgaatatttattgaaaataattaaaattttatacatcataagaaaaaaaaaaaaacccactgatcatgcctagttcgtcatccactcaaagtgtacaaactactcataaatttcaaaatatattatgtattaaagtttaaaaattgaaaataaatttctttcaacatttttgtttttattttcttttcaaaataatccgagattaataaaaatggtttgactttatttaatttatataattatttaaatctttttatagcaagaatttgttaaatttgttttgaatgaatcttaaaagtgaaaaatgattttagtagatgtttatatataatataattaattaaaatttcatataaactttacattccaattttatatttatttttgaaaatgaatgaactttgttgatcactagggcaaaagccaaatataaaaacagttttattttacgaaacagtaataaaaacatatatatataataacagctttttacattagagattgatacaacacatttatttgcacataacacgtgggtttccacctaatccaataaagaaggaaagtaaacaacatgagttaattctgcttataaaattaaggtaaaaattaaaggtataattgtgatacacgaagtttaataattaatttgcatgacgcaaggcacagtccaaacttaattaaatattaaagcactttcaattaatataatataattgaagatgttggttcaccaaccatgccgtagatcgaccaatgttttatggtgtactctatattgttcaagattttatacgataggttaaaagttaggaaggtgtaaatgtcaaaaaatttatatagaaaaagagaagtgcggaaacataaacatattattggtgtcttgcactgtttaagacgttatattattattggtgtaattaagtattagtttctatataatttaatttaataactattgtaaaatatcattaatagtctcataatagtagcaccactagtgactaatagtaaaatttatataaaaaatattaaataataaaattattataaaatgtcaaaaatatatttaaaattgactaaatattgtatattgttatgaaataatataaaataatataaagtagatgagaagaaagaagaagatgaagagaga

SEQ ID NO: 299717 - DNA, 2902 bp, Cannabis indica
gaaagatttcaacaatagataaaaacacaaaaacctgaaaaacaagatagtcctccgtgccaaaaattaatagtagccacaactaatacacatccaatcagatggcactgtgacgcttccatggttacccaattttggtggatccttcttgcccaagtgctccaccagcccctccagttggcttactactgcatcacaacataattgaaaatggcaaaattaagcatagacaaaatgcaagctaaactacatcataacattgcaagagcactggtaggaaatattgcaaagaattactcgcaatttgacaatttatactcatcaaaatgccacaccatctgacctccaaacattattatacaaccttctatcctataaaacccaagttatcaagaaactgtatgtgtgtgtgaattgaacacttagaacatattactctcattccttaaacaaaatctaatatacacagacagtcatcacatacaataaataaaaaaaactacattctaaatttatatgaaccaaaaacaaatagagtatgattataaacctatactcaaagaaaagcttcctgccatcaacaacaagaccgtcatctccaagcttctccatcatagcacgtgcagctccctgtgatagactttcctttttaactctaatcacagaaaccaaagatatatatatataaacaaatatagattcataaaaatagagtaccacagaagggaaatcaataaaagcaaatccccgtgatatgccagagtttcgctcctttataactcgaacatgacgaagaggaccccattcagcctgatggaagaatttaattcttaagacatcattaaagaaaaaataaaattttagataaaagcattgaacattacgaggatctgataaagatcttcttcagttgttttttgtgaaagacccttcacaacgacagtagctgatggtgcctacagaagatcaacatcatttaagatttgtaagaagcgacatagttaatgagataattaaaaagaaaaaaaaggaacaagagataccacagagtagtgatcacgctgacgcttctcttcacggtcacgtcgcctctcaaacctttcatgtctttcatgcctagcatcatcagagctgtcctctcgatgacttcgaccatggctacgaccacgaggagatcttgatctagtatggccattgtcatcacgtccacgagatcgagaacgttcatgccttctacatggactgtgatctctttccctatcatgccttttgtagggactttgatctctttctcgatcacgcgattcccgcctcctccaattaccatctttcctaccacctctatcataatcagaatcataactattccgaccatagtcatagtctctttcacgactgtcctccctactactttgatgggaagcacgagacctatgatcataatcatcatgtgcatactcatcctgatcacgtccccctaccctagcagatttgtcaaatccaatatcacgatagctttcaatatttcgatagccatcccgaaattcgtcaaattccttaaaagtatcaagctcaggctcatgaaaagtatccatttcatgatatggatcattgtatggtttctcatgtcgccttgattccctatcaattgggaattcttcttcataacttctccttcttgactgtggccaaataccaacatgaggatgaggtgggggtgggggtgggtaattatccctattaataatgtcacgatgaaatgcatttctcggatatatgttatcccttgagtatctttcatctaaaaaccttctgtcatcatatgacccaccaatcctgcaaaaaggaaaaagaacataaaattggaacaagaaagaaagcaaaatcaagacagtagcaaagcaggaactagaaaacggcaatgaaagttactctatggtcattaataaaccaattacagccgagcgaacacaaagcaacattaagcactcaccgaaagtttggttcgtgaactgcaccatacccctccagagcctgtggattgaagagaataagctatgtcagcaacaaatcaattattatatgaggggttaggcaaatccaatccatatcctcagtgcccatgggttctcatttatcttaaggatgagatgccagaaaaaaatggacaatctcaaggtcctaaaaatttcttgtactatcatccgatataggtgattattaaggaggaaaccacaattacgctgttattatcccatccttgctgaagaccatagcgacccggatccatttctctagtcagaacagccctgcaaagcttgttgatgatctttcaggagatgaaacgttgttaaaccttttgctttttcttttcctgtataatatgaacaaacacagacagagttatggcaatgatgaaccaacaaccaataattcccatgatttgaccgaaccccatttggcttcctttccatattcattgcaaaaccctttccagaaactccaaaacatctcatagattttcatatacgcggtttcggactagtaaacaatagctaaaccctataagtatctaactacacacaatcttcggcaaatctttagatagtacagtaccatctgtaacaatctttccccctaaaacataaattatcaagctcgtatgaaatatattaagttaccatttcacgcaatttaatctataaggaaaacaaattggggacgaaaaaacataccaaagtgttgaaatcaatcagcggcgaaacagcctcttcgttctttcataagttttttagggctttccttagttttttcttccttttgttttttctccttgttctttacgagttagggcgaagaacttctaacgacttttgtatcccatgtccacctgactttaatt

SEQ ID NO: 299718 - DNA, 2024 bp, Cannabis indica
attagataacatgtgatttaggacctaaaagatctgaaaagagttaggttaatttttataatttgtcattcacattgacaaagagaatagaaattagcattaacaattgggtaattaaatcaacaggattcttttccctaatttctcatccttgattaaacacctttattgctttctttaattttcttatttttctttatttcaaaatctatcaaaattatttatctaccaaatagaatcataagtctaatttagtggtattcagttcaattccctgtgcttcgacctcacctgcgtgagtttactacttgattacgtgcacttgcgtattgttttataattttcgtaacaccaagcccttgaccatgtctaatatttgatccaaatatgcttgcataaagggatcagttacggtaggagcctggttgattggcccttcttaattgggttatagcccaatttttcagagctttgctagccataccattgaaaagggtatgttcaaggtcagctagccctaagcttggcatatggctttggccagccaaccctgggtaaggaaactgaccatggcttgccagccccactctaggcatgcattcacggctggccagccctatgctaggtagggcctggccacctgttcttctctgattggctggtacaacttgtgttttgatagagggtagatcacaccaatttctagagttaggtggatctaattatctgaagtgattttactcacttctcaagttgttgttgtcttgggtgtattcatctgttcctagacctagtttgttaaatattgatctttgggtgactcactcccgaatattatgggacgcgagttcaccgtgtttgctggccagaggttaacatctaagggactggctggccaaaggttggcaaagtggggtgtggttgtgctagagatccttggccgaccccccaggatgctggttgctagagtctagctgttctcaactagatcatcgtgggaagacttgtcctcctttgggtaggggaacgtctatcgagatcctgacctctcttgatagttttttcatttaattgccttatcaggtcactagcttctctattaccgtggtctagttctgcctgatgagattggaggatgtactcttagtcatccatccatctcaaaaattcatgtctttattgtgaaaatgcattacaaccaacaatgtgtggttttctagtttggctgacttggcagacaacctctctaagtttggccagctaaagatcttctccaaagtctacgtgaggcttacaatggctggctttctaattattggccccatctctccagcataataccatggaccagatttagtcgtggtgtctggggttgctccatgttggacattcctttagtacaaggcaccagtggagggtcctcccctggcagcaaaggttttccattgagaccaactagattggtagtgtcaacctgaccagttgtggtggccaagttttttgtgtttttcaggttggcaaggttgggcacatccatctgattcatggggattctagttgtggctggaacacgaacatcaggatcagcagtcatagggtcttgaggaacactcgatgaggcaaaatctgtagccaaaattctccttgtgttaaacatggtgttagaccagatcaattgacaaatctcttgcaatgaaagcactaaactattgacctctgatttggctaaccgacaacgaagttgtatttattattattgctaccacgtgtacacaatgagaataggaaagtaaaagaaacacggtattattataaaaattcctcacccttagttagcgggtaatgacctaatcccctttttattgtattaatactagagataataccactcaaatcacaagggctatagattctgaagtggctctcttaagctaattatcctaatttttgcccgcctgacgtttggggtgttcattggatcacatccaatgtttttaggcctatccagatccgatctaatcata

SEQ ID NO: 299719 - DNA, 3401 bp, Cannabis indica
ttattattatttatgttgtttatttattttttttcttccaattacacagtcctctttccattttctaaactctcaaaagaaaaaatgaaacagttctagaagatctttggacttttcatttttctttttccattttatacacgaatttacatatcaagccatcatgtactgtacccccggctcaaattaacaaaaacacctcactcaaccactaacatgcgctcactcctatttttcttttttatttatttatttatgtttgtgcaaccccaaaaccaaaacttaaaataaaaataaaaataaaatataataaataaataaaaaaacaaactactacgagttaaacctgtgataattcctttcaagaaaaccttcaaaaaccacttttttctttgactcttcagaatccagatccaaaccctccgaacccgacccgtttcctcttccaccgccggttcccacggcggcgctaagccaaggaacaaaataaaaccacgcagacgtacaaagaatggcgcagacccgaccccacaataccattatcactaaagtcaccaacaaaatcgacatacccactaacggttcgaaccgcttggcgtcggctggctgagccgatctcctgccgccggcggttcgttttgtcggcgcaacttgtggtctttccctaatcggaaggggcaaaatatccgagtgctgccgagtcatgactgcggcggctcggccgagttttgattttccgttcgatggcgaaccgggttgactcgacccgtttcgtatggcttcgattttccgactgaatgagaatcgactttgacccgtgtcgccttttggggaatgcagtgggcccgagattgagggtttccgattttcgaggttgccgccgttaatacgaaccttttaaataaaaaagattaagcactaattacagtgattaaaactctaattaagtaactaaattataactattattattattattaatacctgatcttgatgacttttttcctttgggggcggatcgtgtacggccgggactacaatctgaatatcactggaacagttttcggcggtaggatctgttgactttgactttggtttcgaccaatctttgtctgaataatccaccggtacggtttttatgccagttgggctttttttgcgaaaccttgctggccaagaaatcttcttcttcttattcttagttgtatcattaatattaatacttgattgcttgataatcatattttcttgaggggaatttattttcccggaaagtcttttcccggaaaatccaaaacaacacaagaaattattatttctagaggaagaggaaattctggccttgttactggaaactgtatattgattaatattatcatgatgatctttaaagggtttgttgggaattttggccatggaattaagagaaagagattaaagatcaaggctaggaagttgagtctggcattttagagagagattgatatttgaagactataatggatatatatatatatatgataatattcattgtttgggtaagtttctaaataataagatttcatttattaaatgatgttgtaataataaatttatgtgttatatatttaatatatatatatattattaagtataaaacgacgtcgcttaagaagtgtagttaatttatttgtttggttagttagttaggaaaggatgatgtacttgactttagtggctgaaagagaaaataatcttacacgtttttttctctagtttttattattattacctctctctcattaattaaattttattgtttttaattggaattattacacaataaataagaaagaaaaataaaaattttacgtaattaaattttaattaataatttatagcttactataaacctatgtatgagccaatgacttgcgtgcccacaattctaaaattatattacaacataaaataatatttttcttgaactttgactgaaacataaattatgtgtgcatatagtttaaatttgataattgataaataatatattaatgtgattaaatttatataaaaaatttatttatatatataatgattaaacttatattaataataatatagtttaaattttattgttattttattcactaaaaattatatttaatattataaaaatataaatttttatcaagttttcatgtaaaaattatgctaaaaaaaaaaaagtagggactccctgagacttaggtccgccactccatatacacaataagatttctacaatatctatatatatttatataattagattgatagagctagctattaataatagtttatttataacattggtctcgcattctttgtttactgctaatataaaatctataatataagatttaatagtgattagtgctaagcaccacactgatccagcatattttctttcataattatatatatatatatatatatataaaatgtcattttagaggtcataatccaaatgaagcaatcagaatttgtgacagtggctggaatttattataattaaggtgttgataatttttgaaagaaatgtatgaaaaagtcatttaatttgtcaaaattattaaatcaaaatcattttgcaagtgaagtgactatatgtacatgtgttttcttttagtaataaactcttttgtacataaatttagtaatattaatatgatattatgtaaaatattattgtatgtgtgaaaagtttaccgggtcaaacgcaaacccaaactcagtgtaagaacaaatattgtaattataacttcatagttaagataatgtcaatataaaagctggaaatatataccaattggcaatggcggagccggatccaaatttagcaggggtcaatacttgtaaaataatataaaattatttgattaattactttttttttaattatttcttacttataattaattttaaaaaaattaataatatttgggagggcgatggcattctgcccctagctccattagagtcaacttatttcagagctcaaatgaaaaagaaattcaggtaaggtttgataataattctgatttttaatttttaatcacaaacatttttttttaaaaaatttgtttttaaaaaataaaatgcgtattattttttttttacttttaaaaacagaaaataaaagtatgttctgtaaactttattttcatatttattttttgattttatttaagtcgggtttaagtctgggttaagtccaggttcgggtcaagggtaggttcagtgtcagggcggggctgggtttgggtccggtttaggtctagttagttagagtctaaaatattgattaaaaaaagtgctcaaaaaaaaatattgcaagtgactttttgtttgtttttaaaaattttattctcaattaaaaa

SEQ ID NO: 299720 - DNA, 559 bp, Cannabis indica
tgaatcaaaaaaactaataacatgaacaaaatttttatgataactcaggatttaggtcgatctataatatttagtggtttgcacctctattttttaggggagagaaagagacaagcgagggagagaatggagggcatggctgagtgtgtctgggtcgagctctgacagtggaggatagtcaggatcatattctggcaagggagagagagataaacaaaagagagaattaattttcaggattatatgtattaattgtttaaaaatattttttgattgtgctttataagttaaaatatttttaatttttaataattaaaatgaggaagaccaattaaaacatgtcacgtgtatataagtgttcacgtgaacaattcatagtgacagttaagagaagaaaatagagaatagtaaataatacaacaaagtcgaaggttggagtgtttagctttcaaaaatttagtaaatgagtttagcataccaaatcttagaattcaaataatttttccaccaattaccccaaaattaaagataagggaatttataattaggaaaatttaca

SEQ ID NO: 299721 - DNA, 2205 bp, Cannabis indica
tatatatatatatatgaagaaaaaaaagctaatatatgatgtattaacattaagtattaaaacgatgaaattaaattattttttagtatattatgaggaatctattataaaatttgcacttaatttggctaaatatatggaagctagtgtgctttattcctaatttggaaacacttgtgttgattttgcctttactgcaattttagaattttcaactataatcttaattaagctgaagattttgtttatgaaggaagatttagaaagtatattaattaaatataaaagaaaaaaagaaaccacgcacaatcgcacataataataaaattagaaaataaataaatcaattcaaaagaagaaaaataagaggaaaccaacataattagagtcgatcgagaataaaataaaataaaatcaattcatacaaataataaagccttagctctctcaattacttttgttcttcttcattttcaaatatggcatccattgaagaaaccaaaactcatgataataataataataagagaactacccaaggaagacaaaagatcgaaattaagaaattagaaaagaagagtaacaaacaagttaccttctccaaacgacgctctggtctgttcaagaaagccgccgagctcagtgtcctttgtgggtcggaggtagccgtcattgtcttctctcccaacggcaaactcttcacctttggcaacccatctgtggaggacgtcgtaagctcatatctcaatactggagccgtagtagtaccgagtagtagtagtggtaatggtaatagtactagtaatttggtgaatgccatgattgagttggaagaggctgagaagaagaaaaaacaagtagtgagacaagcaacattgggttcaattttagagaataataataatattaatgcgtggttggagaaacctgtggaggagatggggtatgaagagtgtgatcatcaattggctaagttgattaaccttcggaataagatctccgaagccagttctagtaaggattttgatgttccaatgacgaagacgacgccgttttgtggattgggtttgaatttttaattttcttcttcttattatggatggtttcctagatcagttactagttctttgtgtataaaataaactattagtatataaatctttaattttttgatcgttagttttcatagacacactagaatagaccaattcatttgcttattgcattgaatattagtatacttacttaccaaaatcaagttacaactagctagctagccttattgagaggatgtgctttaatctttcgttttgctttcttatttcgtttgtttgttcagatattgattattactattgagaaaccttttcttgaggaaattggtttggttaacttttatttgatttttcattaaatgatgattttgttgatgcaatctcaatagggtggatcggcaagcctagtgaaaattccatattgcactctattgccaaaaattaagtaatttttcaaaaccaattattaattaattttcgagtaatttctaaccgtgtaacatttaaaccaaaacagaaatgtttttgtgtgatttgacctgttagaagttagacttcaaacttttccagcaaaaaacacaatataacaattttaatgtgtgatgcaaactatagtatgatgtttttgaaaacatcatcttgttcaatgttattccatgacatgacagtttagatacaggaagaaagaaaaaactatttgttacacaatgttagcgggtgatttatgtattttctcatttcaacatttatttctctttccttttttattttctttgcaattaacattaatgagccacaaagtagagtattttatatgcagccaactcatcatatatattatatggctttttttttttttttgaaaaaatgttagtttcgtatcgaggaacaaaataaaattatttgattgcaaatttgactttgttttatgtgtcaatagatgttggatcaattgaataattgcaattaattggaatcaaatcgaatggtaaaatttataattcaatatataataaaggagatctgaatatatgtttaaaaatagggtctttttcaattttacactttaaaatatatatatataatttttttttttttttgttatatttttacgaaattctacataaaaactcttatttcaactagcgct

SEQ ID NO: 299722 - DNA, 4959 bp, Cannabis indica
tttaatagtgcataattttcttcaatatctttttcttggtttaaactttaacctagaagccaatggagaaagtctaatgctcctctttttccctaaacaatgtcggatagaaagagagggaacatgtcacggcatccacgagtggtgagtcctcgaaaagccatggttcatggttagagtacaatgcagcaagcttccaaggagccagggcagtaagaacatggttgccttgcccttctatttgcagtgtaaaccaaagatagtgtttcttttttctaagtaaaaatttggtaaattgtcttgtaattcagaagaagaaacactaaggtcataatatcaagtatgtataatgctagagacattttcaagcttaagggggtaaaagaaaacaaatttgtcaaaacaaccctacgatttcgggaaattctcgttcgcaacccaaattttaaaccgtatttttcttttaaacatgaatcacttgatcaaaatcaattttttcttcaagatgaaatcactcagcacgaaaagtcaatgcgaaacctaatgagttttttcaaattcaaattcaaagaaaaatacaatagaaatagggaagacctgaaaaattggtgaagttagattcatactatttacaatgaaattttctttgatcatacatacatgtaagaatatatgaagaaaagaaaaggaaaaaactactgtggcttgatttgacttcaccgatttcacatgctgaaaccacaaaccaaaccaatagtttcaaagaaaacaaaacaaatcttaaaatacccgaaagacaaattttccatgagttagacaattttgaggaatacccttttgttaaaataccatcagttctttaacttgtcaaaatgagctcagacaacccaattcctaatttctatctaatctcagaatcgaaaaagtttctgcagctaaccttaacttcatcgccgcctgtatcggttgatttttctcgtgctgccatgtgcacaaagatttagacattcatgaagaactagtagtagtaagcaaagtcaatttgccataatggatatgagttgagacaaactgaatgaaacaaattatcataataaatgatatctaaacattcttagataataagaatggggaaaatggtgatgatgacaaatatatataaatgatgagatagttcaaatgaagcatgttaggtaaagatgaactaaagaattactgctgaacaaacgaggagtgcgtttgcactcaaaactcgatccaactaaaggataaagatgatgatgattaatgccaaagcttcatgcagaatccagagggaacaacagaggatctcttgctcgaaatgcattctgtaaaggtgtcaacaagttgctcagcaagtgatgctggttcttctatgaatgtgtcgataaacaccttaacaatccttagctcctgtgagcttgctctcaagctataccaagttaggaatttctgcctgaagttcttctctatatgaccctcacattctaaccatctaatcaccttcacataatactcaaaatccctatctgaaaggccgtttcctgcacattcctcgtcaggcctttctgcatttctcttctttgatgtgctaccatcttggggttctcctttccctgctgcattttctaaatccttgctgcttgatttggatctcacatttcttcctagcccctcctttagtatttctatcttacaaggtgtaatgggcaagccagcatctgagctaccagcaaatggcacgcactccattccagttcgaactggagagttcgacccattatcagtgctaatgtcctcaacaatatgaccatcagatgagggtttgttatcaggttctacaacatcagaattggatatggagccaaccaccgaattgaacagttcccatctaacaagatacttgatttcccttgttttctccttcacctgtgctgttgaacgtaatagtaccattagacaaactaccagaagcaaccttttcattatccttgcaataactaagataattctcttgacgggtatcagcctgctcgctagatagtgcaacgttattagtttcatcttctactgatgaaggattagagaggctgctacagttagttgctgggctttgacttctttccgggacatggcaatttggaagttcatctgcattgcttgttgagaatcgaactatgctggtgcccaactccttggtaccatcatgtgaaacaactttgaaacaatactctgtggcaggagtaagatctctaacaacaaatcttgcatttggcgctaacagtttgcatgtcggttctttaggatagttgatatcatcaaccttacaatgccacaaggagtagagtacgttattatctgatgaaatattttgagattgcaaaaaaatggtgagcgaggttgcccgagtgtcttcaaatttgatcatgtttggcccaatcggtttcttatctgaaatgaagtaaaaaataacaagcacattataaattgatctcgaaggtacatataatttaatcacgacggaacattcattaccttgtttaatgggattgggcaatggatctgaggttacattagaattcattgaatccagcaactccacagcggaagaacaaagtttctgaacctcgggtccagaagaaagcctgttgacaatacccctacccattttgacgggcaaaccatcgagtggaccaacttcagcttgaagtttctttgaagcttcatcaacaagctcataaagcttttgatatttttcagttcctttgagaagtttttcgcttaaggagatacgataccacaaaatgtccactcgtctggtttcccttgccaccaccatttgttttctccaacacctgaattaatttaaccaaccaattcatgaggattagatgtaaattaacaatggcataatgaagcctttgtataaaaatgactactacattgaacgaaatagacattacgtaaaagagttcattatggcatagttacagacactgcatatgttcggctacattattactaggattgcatgaatacagttaattagcataatgtggtctgcatttgaatttgtgacagcattagacaaaccagtaatctaacttgaaaaaccaactttgttcctaaataatgatcattaactcaaaaggatctaaaagttgtggaaaacttttgcaaagaagaaaatcaacatgatacaaacaaggacaaagagcataaatatttacccgagtaaatcattctctttcccgcaagaaacacaacaaaagctaccatcatgtttcccaactttcgccttaataccaatgccagatttttcatgtgtcaaagcacactcaagatggcatgacatgccgcatgaatcactttggaatggaggctctgagctgcacattaaccacaagctaggatctttgttatcgtcatacttattacatatgcaacacgaacacctcttgcaaaaggcaccttctcgatttaaagtagctctacaagcagagtttttgcaatatattacattgctagtcaaatcaatgatgccattgttggtcgatacactagcagcagcagtagctagccgagaaggttgctcagttttcctctgccgtttagcagctcgttgaccagacataggagaagcctgtgaatcaaggtctgttgtgacaccctcactccctcctgatttcttttcagatacaattttcagaagatgctcgataatctttaactttgttaaaccagtatactttctttcttttcccatctcaacacaaaggatctgtaaaatttcctgacgactccatgattgtagcagctcagacgcgccttctgaccaattcgatatttcataaacaagttctctctttttctccatactcatcttaccgccttttgatggatcaagtgaaattcctgaacatcaaaatttaaagaaaagaacaaacatttaaggaataatgaagaaccccaataaccattttttttttttcaatgcattcacattacagaaacccaaagacaccttttttttttctttctttaaatcaaataacaaaagaataatttaagtaaccaaacttcaacttctacccataaaaaagagagagacacacaagtggttgacttgtacgaacaaagacagcccaactacaaatataaatcaaacaaagtatactccatatgattgggtaaagataacatcaaaggcatcacagattattgtattgaaaagtcaaaacaacttcattagagtttgacttacaaaatgcctatggttctgttctgcattttctgaaaggatattaaacccaggcagaatactctcctaaaggacatcaatgcattacagcatttgattaaaacaacaaaatatttacctctaattaataataaatgtttagaagaaagataaaaatataaaaaagacaatgctaaagggaaaaattaattagattcaaacatcgatctataaacaaaaacacaccaattcgcataaatacaatcaatttaatcagtaacccaataatacccagatgttgaaatcaaagccaaatcctttaacaacagattagacaatgttatataacgatttgaccataacccagattagaaaatcacctaaagattcaacctttatcaaccccatcacataagaaaatcaaaacccaacattttagactgaatacaaagggaaaaaaaaaaaactaaccctcagaagaagaatcggtggccataatataggaaaaaaatagaagggaaccaatcagctcaccacattagcatcaacaacccaagttttgttgaacctgtaaataagaaaatcctcagagcacaaacaaaaataagcaaacaatataaatatatatatatataaaggtaatatttaaaaataaaaaataaaaacccaaaaaaaaaacgaaaagaagagagaagaag

SEQ ID NO: 299723 - DNA, 2188 bp, Cannabis indica
acaaaacacagggtccaattggtaacttttgtaaaacagagggtccaaaatagtatttactcaaaaatataccacgaaatataagtatttattgagtgaattattatgtggtccccaataaattaagtagatatatttatacatagaaagaggaaaaactgtgatacctacttatatattctcattaatcatactcttaatttattttaaacatctacaactataagcaagcttttttagttagggtcttaagttgctgatgatagttttgttcctttcatatatatagaaaggttgttttgctttttgccactgaatttgtattcaaactaattagtgccacccatatttgtgattggatgtctgatctaatgttagtagagtagtaacgttgtagtatagtaggaggttgaggtgcaaggaccaatatcgtaagattaaaagtagttaaaataattaattataacaaatattaaaacataattttatttaagcaatcaattaatggtttcaaggaataaaatagttaggaaagttgaaaaataacaaaattaaattgaaaataatcagataaagataattgttcgattttacccaaatataattataattttaattattaatgtgactagttagtttattctaatattttcaagaatctacaacattactgtatgtctataccctctcttgagtgttgcatatagaatgtgtaagtgaataatagtctatatttatataccaacattaaaccatatcttcataaagtttcactttagaaacaattctaaaaatttcacctctctatttcacaatttgtaattattttggttacaaataagtgaatgtttatctctcgatttcacaccacttaagttgatctactcgatgcctgattatttaagagtttccctcttgagtaataaatttcacaatctaaataatagcttaattataatcacatcaagcaaaacaatacataaatcataataatggcaacaattaaacaaggtagcatcacataaagaatattagatgatgaaactaaactttgcattaaattataaaatcaaaattataattagagatccatttgaaaactagttgcacatagtgtggtttataatctcaaaatattatttagaatctaaataataattgagaaaataaaaaaaaaaaagaatgaatgaaaattcttgaatgcaacttcaaattgcttctttcatctctcaaaattatttttctcctttgaaattatgtttctcaatctctttagtcgtctccagttctccttatggtcgtttttaggctttaaataggtccaaaattgactcctggttgaattaggttaaaaaaacacgtttaaatcttaaaattatgttttttgtacgaaaattggtgatgtgttgccactctgtaggcgatgcatagtcactttagattgttttgagtgtttcaatttcgttcagtaaaacatgcataattttcacatcctgactctaaataaaatagtttaacatgttttagcaagttgagaaagaactctttcattttgcatttcacgagctcttccaaaaattgatgagaacataatcaaaagttagttcaaatatctcactctatcataaaatcgtatttaagtacaaatctacacatttagagaaaatatattaagtccaaccaaaaatttaagaaaaataagtacctaaagtaaggataattaagagtaattaaattcataaaatacacattcattaaactttgactcagtgtttaagatttgtcataatgtttaacataaaatatctttgcataaatatttgaaaccaaaggattggaaataattagtttggcaaacttttattaattttttttttttttttttaattttttagtttatttgttgcagcatgatttttgcataaatattttgaaatataacacgaaatataagtatttattgagttaattacatgtggtccccaacaaattaagtagatatattattgtggaaaaattgtgatacccacttatatattctcataaatcactcttatttattttaaactatctacaactacaagcatactttttagttaggtagcttaagttgctgatatttcttgttcctttcattatatatagaaaagtcgtttagctttttgtccactgaatttgtactcaaact

SEQ ID NO: 299724 - DNA, 1795 bp, Cannabis indica
taactctctatctatcttcatcactttagcaatatttcaaaaatggcgaagctctcatccactgcagctctcctcgcagccctgctgttggtggcccatgcagtcgcattccgaaccaccatcaccaccgtggaaagcgcagacgacgaggacaactactactacggcagatcttccgtaccagaatgccggcgtcaggtccagaggcaggcgttgagccaatgcaggatgttcatgagggagaagatgatgcatggcggaggacgattcgatgaaatcgataactacaaccaacattttgagcagtgctgcaatcagttgaggaatatcaatgagaggtgtcgctgtcccgcgctgaagatggagattgatcagcagagacagatgaggaggagccagccgggtgagatgaggaagatgatggaggttgctcaggatcttccatctatgtgcagaatggcgcctcaatcttgccattttcgtactccgtactactgaagatagttgagtttaatttaatttcatggtttttaattaaccatctttagagcaattcaaaaacaaaaaaaaaagcacaatatcgtgtgctttctccatcctcttctgtagtttataaagtagctttttagggctctttctctttgtgtctcttgaataaaatggatgcttttttgtttgacttttaagtgaagccgatctttgaacaatctcgcaataataaatcctctgtttttgtgaagggatctggtatataattactattttatatatttttatttattttttgaaacatactgtttcagtgaccattcattgataatacatgtagtacaatacaaatcaaagagaaaagaaataaaaattcatattcatctagggttggttaattaatattcatctagggttggtttggaacgtttggaattgtattaattttgatggacacttatataattcaatttaatataatacaatataatacgaactaataccacgtcaaaccactcctaaactatagtttatcaactgttaattcatgcaaccatatagcggaacaaaagaacatgattgtgtgtcatgaagcacaagagcaactctcaaaagaactaatagatagtccaagtgcgtaatataagtaaataaataaatataagtgaaatagtatgctaatggaagtaaccttcacagtaaaattattccattaaaattttaagtgtatttatttgttgagatgattcaaaatgtgagtcactgaataaaagaaagcaatacaaaacagaacaaaacatatcatactataccatatataccgaactataaagaaaataacaaataaataattaatttatagatctatataattcagtttaaaatctaaactagtatgcttgcgattatttgaagcaaaaaagtaagattatctagcttcgttttagggatgaaaacacttcttatattcttgctagcagggccggccctgaagaaatgggggcctaagacgataaaaaattttgggccccttaataaataaattttaaaaaattatatgttacatttcatgacataaaaataaaaatctgaaataagttctaaagtatcataaaaattagtagatttgtatttttttaatttactctatcatccatagtaatatttttatcttgcccaatttcaacatacaataaattaaattcatacaaagaaaaactatctagtctatatttacctatagctaaaataatttttaatacctacattagattataatccataattataataagatatttaaaaa

SEQ ID NO: 299725 - DNA, 3519 bp, Cannabis indica
ttgcgtagtaaccataaaattcgtaacaaccaccatagatgcccaccaccaccttaaacttttctaaatccaaaacaaccatatctattgtcacctccaccccaactcacaacccgagaagatagatccaaacacaattccacaactcatatcttattaggtcattttttgacaatttaagttatcaaaatatttttaaattattatgaatattttatgtgaatgaaatattatgtttcttctgttaatcttgttttcatgactgtaattttctcttaggaaactttgtataaaagaggaagaaattagttttttggaaagtttgactaaattggtattgttatccatgctttcagacatgagatatgtggcatgattaaaagacaaagtgtattagcagaaatgattaatcaaaataactcacaagacatcccagagaggatatctaggcaatcttggaagtgtgcactagacacccaacaaaatgagcaatttgcggataggtagcatctcctggacctggagagtagttgaggtaggctacacccaaatggaaatcctttaagtgataccttgagtgtgatagcagtctcacaagtacgtcagcgccatataaaaatcactttatagatggttacacctttttctgacacaagatcaaatcttgtcccccatgtcgggccatggtagtgcacgtacgcacctctagacatgctttttgcccaacaacttggttagagagtattttgcggaggagagacctttgcaagacacgtgttctggttcgtacaaaattcctcactgtacgccacgcaatgaagaaggttcttatcaaccaatggttagatcgtcctattgtaataccggccttggcagtgggtagagtacaaaacactaggtgaataaagggtataccttttaccccatgtgtgcctataaatactcctattttctacgagcaaggggtaacaaattttatttgcagacactcttctgaaattcttagagagctttcttctaaaatgagaaacaagaggaatacaaagttcattattgtaaacatttgcccaaggaggctaataatatggactcgtggactaaaattattaacgcttgaatgacgtaaaaaaatcaattgcttattgtttaatatcttttaatttcttaagctctctttaatcagtttctagaaatctcggtaaatattttggtactttcattgagaaatgagaaaagtttagtaatcctcatcatgattcaaccatggtgtatacccaaaaaggctctagtaaaaaagttatcctagatacagttatggaggaagctgactcccatgccgccgacccccgagcaggaaacgatggatagggcgcaacccctgctgagaattgagaaggggataccgagaatgttggcgataatcttggtgatagccaaaaccctggtggtgaagaagaaggagaaggtgacaatgaggaatacgtaaaagatgggtattataaggatggttatcactacgaccatgaccctattctgttacaagtaatgaaagaattggaagctactcaggaggagttagtagaacaaagagaacttactacaaaaatgaagaacatgatggaaaaacttcacaacaagtttgacgacttggctgagttagatgaggaacccttggtggaagttgtagtcgaggggcgaactaaaaaacaaaatgaagctgaagcctcaaactctcacaaggaaaaggtaaaggaaagatggatgagctcccacaaaaatcaactcctaagcctcatcgcaaagacgcgaccttggctggtcagccctcgaggacacagaaggccactagtgctttcgagcctggacgcccttctaaccctcgatgcaaaaccgtgctgagaggaccaaccacgcctgtacccaagcctcgaagacgggggaatcttcctagtgactccgtcaattaggataggaggactcccgtaggtcactcgaatgatagttggatctaagtgtattaccctagtggagaagatgacagctagaaccaaagtatggagcacaagaaatttgtcctttgctggaaggacaattttgattaactctgtactaatgactatccacctttattagagtcaaatcttcattctccctaggaaagtaataaaagaaatagagggcatatgtaaaagtttcctatggaaaggtcaaagtaacataaatggccctggtagtattgcttggtataggctttgtaagcctaaaaaagtaggaggaataggcttcctggatatcacaaaatgaaaccaagctgctgtgatgaagcatgtttggtcaattgccacaaagaaggacaatttatgggtgaagtgggtgcatagtgtttacattgctcatgaagactagtggagttacaaggccccactttaaagcagctggtattggaggaaattagtgagcatcaaaaagatagtaaaatagatcatggaacctgatctgttttcttcaaataactttaaaatttcctcagtttataagatgctaacacaggaacaatgaaacttttatgttggcaaacaagtgtggtgcaggcttaatgttccaaagcatagttttttgctttggattgcagtgcagaacaaattaaaaaccagagaaagactactgcgttttcctgttacagatgaggcaacttgccttctttgtaaaaatactgaagagtttgtacaacacttgttctttgagtgtgctttctcataagattgcttagctcagatgaaggtgtggttgaagtggaatgttcgatcacaaaacctacaaacaatattgagatggatcgaaagggctaaaagaaccaagttcaggaagagctgttatacagcagcgattgcagccttggtttacaagctttggcaggcaaggaacaataatttttggaaccaagaaactaccaactcgaatgttcttgtccaagatgcaaaatggctagttaaaagtaaaatttcttgtgtaatgccaaaatgtataaaacaaaaagatataaaatgatttagtttattataatattttaatacttatatagataacacacaggctctttcggagtgctataggttgtataaatgagattgtgatgcaatgaacttttaatttataagaaaaaaaaaacgagatttagaaaatgtaaaactaattacatttaggttattcttatttataacaaattaaaaattattcttgaatagagtattcttacctaataaaaaatcaatttatacaataatacacaatctattattttgtttcacatgtttaaaaattatttttgaatagagcattttcaccaaataaaataaatttatacaacactacaacaaaattattaattaccggcggaattattaccggcggggccaaaccgccggtattaattggttattaccggcggaattggtaatccgccggtatgattttttgaaaataaaaaaaaattaatatttaaaaaaaaaaagtaaataa

SEQ ID NO: 299726 - DNA, 2818 bp, Cannabis indica
cgacgttaccggggtttagggtttttaacatttgcagagatgagtggagctggagctccagattttttcttacagagaagctcaacgcctgggctatgtcgctcgctctgcttttaaggtaccgtcttctttctttcattaccgtttgtgtgtgtgagtgtatgtgtatttgatatttgtatatttgtgtgttcagtgttgagtgttctattgctctgtttctaagttcttcctttggttcttttaaatacagttacttcagatacagaagcagtacaagctcataacatcgggatcatcagttctcgatcttggttgtgctcctggtgcttggcttcaggtcccttcagcttcatccacccacccctttcaattgccactatttcatttttattttcattaaattttaagggattttcctttattgttgttgatttttgttatggcatttcttccaaaactatgcaattcccaggtagcttgtcagagcttgggtcccctaaataaaggtggcgttgttgtgggcattgatgttaaggtctggttgcctccatttaagttgttttaattcatttattaatttctttataagcaaagttgaaacatttggtggtcacgtaagagcttttgctgataatctaaactgttttgaagatattgatgagtaaaagaaaaaaaatggaatatgcagaacagaaggtgaaggttcctcagcttcactgtgattcaagagctcaaactgtttgtgctgatgttatgaacctacccagaaatcgaattcgggcactttctcctcaggttcgtctttagatgagttttatttttgaataatggaattaatcacttgaaggcattttactctagaagatttctcaaaaatgtgggactggaaaaataatatgatatgcttgtgctatggcttggagcagagaggcttttctgtgatcctgtctgatatgtgtcccccagtttctggaatcactaccaaggattcggctttatcagtcgaattaggtatgcgagctttggaaatcgctgtgggtagaacctccttagagcagacagaggctaatttggaagatttagttactggtgtggatgatgatgatgttaatggtctactacaaaggggtggtcatcttgtaattaagcttttagagagtgaagatgggcaaggtatcatcatctctgttttgtacttttctttgataaatatagatggttcttttagttctgatctctttgagtgtaatttcttgtaaatgcagaattcagcaggatttgcaaaccattgtttagaaaagcgtcatggttgagacctaaagctacaagatcttcatcaagggagatttatttgatttgtcaaggtctacagtcacaagcgaagaagtagagtgtcacacaacatattaatcaaatatttttatttagcctatgaacatgaacaacattaataattaaatttcagtattctcctcctttgtagctcagtattctcctcctttagttttcttttaataataaaacttattacattcccggtcaaaaaatgaaatgagaactcataaaaaaaaataaggttactatacaaaattcgtagtaatatatcagaaaaacactctttgtccccatttacatttgtcttcacattcaagaaagatcaccgaatctgggttcgtccttttgaccaaagaccaatatctttaaccggtgtctgaaaaacagttgtggaattgagttagtcaatcatatatcatcaacatagtcaatcatatatcactgcaatttaacaaaaaacatagtccaatccagtcatgcttaccggtgttttcatggatgggaagatattccagaatctcagtgtttcatctccagcaccagtaactatggtctgcagcattgtgatgaccattttaattagattctaattaataaagaaaagggtaattataaaaatagtacatgcaagatttgctctgagggaaattcgatattacctgaccatcaggtgacattgcaagatatagcactcgcatgttatggccagttagagtggctacctataaataaagaaaagaaaaagagaaatcattttgagaattctgttgacaggttgaaaattcttaacgaaaagtgttacagaatttattatactatacatacctttcccattgatggatacttccaaaccataatttgattctgggaataaccatgagtgctgactatctcattaacgttcttactccatgcaaggttgcatacctgcataatagttcaaaccttagttatcatagagctgcagatatgtacagatagataaaaaaacatgaaactcataagaaaaccaacctggcttcctgtgtcgacactgttcagttggtggccgtttgtggtgttccaaaagcgaatacatctgtcggccgtcccgcctccagatgcaagaagaccactctggtgaggtgaccaagcaatggccttaacagctgctgtatgttctgtcaattttagaattggttgttggctgtgctgattccacaccaatagctggccgataacaaaagcccaaaaaagttagcaaattgtgtagagataaaagataccaaaaacttagccatgagatgtaccagcatacctgattatcattgccacctgaagcgagttccctgtcatcatgagaccacttaagcccacatacctataagaatttgataactaaacacgttaacttagttaattgtgaaaaatctttcctataaggagaatgttttgcatagttatattgcacacacctcagacttatggccaacaagcttgc

SEQ ID NO: 299727 - DNA, 8237 bp, Cannabis indica
ataaaatgtgaaataatttttttaaaagaaattaacttttcaaattaaatttatatgtatagaaagtgtataaataaaataagacaattgtttattaattaatttttttcttctactgcttaaattattatttttttttaccaataaattagtaatatctattattgtttatgttttttttacacatttggttcaaaatcatttattaattgctaattttcatctttactttaaaaattagacatgtctctaatttagtgtcaaaaatttgtaatatgaaaatttttttatacatatatatatttgttttataaaaaattaaaatttaatgtgtattttaattacgagtgtgttaataaaatatttctaaatttgagtaatttttgttttagttatagatgatttttgacataaaaatgaccgaccgtgttgtaaattgtgtaataaaatttttgtttgatactaaaatttaaatttaacccgcctagcaatagcttggcctctgtttgtgtcctatatcgatacacatatatatatacgcacacttgtatttatatatttaagtacacatacacatacatacacttatatatatacatacacctatatatacatatacatatacatgcatacatacacgtatatatatacacatatataaacatataaatatttacatacacatatatatatatatatatgcataagaaatacacacatactcatatatccacacacactcgtatatacacacatacatatacatatatattctaactatacacatacatatatacacacaaaattaaacataaatcaatatacacaaataaaaattaaacccaactcaatatttaaatgcggcgatggaattgaagactcgggcagcggtggccgaaggtgtaggtggtggtcgaagttaccttttaattttttttatttctctgaaaaaaaaatagatagggagagagagattgagggaaatgggagagagaaagagggggatgatggtggtgagggtggtgactagtgcctagtttaagagaacgaagaagaagaagaagaagaaaatggggaaagggggttcggtgctgggttttattcagcatcaacttttgtcggcacacttaggcttgctagcaaaagttaattttgaaaataaaaatttgtcggtgcacttaacctcaccagaaaaagtttttccctaaataaaaaaaatgaaactcatctttcattaattgtaaaaagtttggtcggcgagcctaagtgcgccggcaaaactgttcaccaattttttgtgcatatttttactgtgcaggaactcaacccacaaaaatttcaatacttttgccgatgtatttatttgccgacaaaagtaaaattaaaccaccaaaaattaattactttttcccggtgcacttatttttaccatcaaaagtggaactaaaccgccaaaaattcttacattttggcagttggtttaccaccttttgtcgacgaaattaatgtacttcaccggcaaaagtaacttttgttgacaaaataagtggccggcatatgtattacccaaatgaataaattgtctatatttttccaatgaggttcatgaactgtgccgacaaaatgcaattaataaactgtgctagaaaaagttatttttctttagtgatggcatacttatttaagtatttgttgtctgtgttgttcctttattttttaatcatttttaacggtgcgaatataaatatatataaaaatatttgaaggatgtgaatattattttagtttaaagtctcttaaagtattaactttctttttctaagaaaccagaattcgccaaccaccaccgtctataaaaaacgattacatcttttgttatatttagatattattaccaaaatatgagggaagatatgcttaataatcccatctaatcattacttccttaatattaaagattatcattaaacaaaagcgagataatttaatatctgtgaatgtgattgactagttgagagtattgggaataatctgtatgtatgtaatgtaagctcctggctacactgcataaatattggtacatataatacagcgtgattttaatatgtttttataattatagtaataattaataaatattttatatttttctttctcaaatgcagacttaatgaggtacatccaattccatcatattgttataatatatatagtctttaaaaatggactttgccttattgaaaatagggaaagtatcttttcacatggtattacattgcatatatatagatattattatagtttttggatttgattttagttctcatgaaaatttaaattttaataatatgtgataatatattaacacagaaaataatattgcatacattacagattcagattaaaattattagattagagttatgtaatggtcggtttaacaatcaaaatcatccacgaaaaaggaattttgccggcacagttaatgaattgcactgacaaaagatggccaatttattccttttggtaattatttcggcaacttattttgttggcagaagttacttttaccaaaaaagtacaatagttttgcttacaaaaggtggtaaaccaactgtcaaaagctgagaatttttggcagttcaattctacttttaccggcaaaaataagtgagtcggcaaaatataattaatttttggtgaattaatttcacttttgccaacgaataaattcactggcaaaagtaatgaaatttttagcaattgaattcccggcattaaaaatgcgcgtaaaaaattaggtaaaaaattttgccgacgcacttaggctcgtcgacaaaactttttgcaatttatgaaacgatacatttcactttttaatttaggaaaagacttttgttgttgagccttaagtgcactggcaaaagttttattcagaattgacttttgtcgacgagcctaagtgcaccagcaaaagttgatgctgaatataacccaacatcgaaccccctttttccattttctttctttctcttcatcttcttcttcttcattctctgcataaaccctcaccatcatcatcaccactctcaccaccttcatctctctctctcccatctccctcaatctctcattccctctccaattataatttcttaaaaaaaataaaacaaaaattaaaaggtaacctctgaccagtaccacccgcacctccagccaccgctacccgagcctttgcttccaccgccgaattttccattttcagtcaaggtaacctctaatttttatttttatttgtatttgtgtgtattgatttgtgtttaatttggcacatatatatgtgtaatatatgtatatgtatgtgtgtatatgagtgtgtgtggatatatatgagtatgttttgtgtatttttgtgtatgtatatgtgtttatatatatgtgtatatatgtatatatatatatctgtgaatgtacatatatgtttatgtatgtatatatgtgtatgtatacatatatgtgtacgtatatatatatatatatatgtgtatgtatatgttatttgtattcctggatgctatgtacgtggaagtcacgaaagggcgccatgacagatgatacatagttagtatataacttttgtccctcgtcttcagcgaacgtgttatacgccagaggttatccaaaagctctccctgttagcaaaggtagaaaggactacgggattcttattaataaaactgctactagaagagattagaagtcgcaagtgccccaggatggtagagggttagcctagtctgggaaagtttttagccaaacatttgtggaactcactcaggtatgacttacttggagccaaatctgacggttgtgtacctcctaacaccaaattcgattttgtcccctgtgtcagaccttggtagtgcacgtacgtgctctatagctaatttttgtccaatagcttgactagacaccaactttccaaggtgaaacctttggacgacacgtgtccttagtcccacgagttgggttataacagttgtacacgatatgatgaggaagctccctacctaccaatggtcacatcatcatgttgtaaacaccagctattgaaacgtgctgagtaagaaacccctaggtgggtgaggggtatgcccttacccgcacatgtgcctataaatacccctatttttatgtgcaaagggtggaacaaatattttacttacaaaacctctgtcaaaattcctataagcttttttctttaccaagagaaacaaaaggaatacagagttaatattcatactgtaaacattggtaatatttaaagattcacctgcaaggttaatacaatagactcatagactagtgatcattaatgcctgaaccacgtaaaaaactatttgtctattatttattgttttatattttccttaagctctaagtaatcagttttcaaaaatttcagtaaaaattttggtgctttcattgagagctgaggaaagtttactagttgttgcattattttgaccatggtgaatacctacaagaatacaagaaagaaaaactcccttggacactgttatgtaggaggcagactccctcgcctcttgcccctagacagacggtgctaaaggggaaggcatgaccaacaccgagaaccgaggggaggatgtcgagaatgtgtttgacggcattgatgatgaccaaaaccttaaagacagggaggaagaagatgatggcaatgaatatgtgaaagatgggtactataaagatggttaatactataaccacgacccaaacttgttgcaagtaaccaaagagttagaggctactcagacggagttagcaaaataggggaagctcaccgcaaaaatgaaaagaatgatagaatgccttcaaaacaagttcaacaacttggcagagtccgacgatgagccttcagtggaagtaatggccagagaacgtcctcaccaacaaacaaaagttaaaaccttaaatcctcacaaggataaaggtaaaggcaaagtgggtgagcccccacaaaaatatgctcctaaacctcctcgaaaaaatgcgaaaccagctagccagccctcgaggatgcaaaaggccattggtgctttcgagcatggatgctcttctgatcgtagaggcaaaattgtgtcaaggggacaaagtacaagagtacataagcctaaagggtgaaggaaccactctagtggttttgtcaattaggacggaaggacaaccgtgggacattccgaggacagatgatccactgtagacctacgagggaaattagatgccaagtacgagaattacaagagtcaaaaagcaagaccacatgggggtgaccttaggaaccacttaagtgagaatacgaggggtcgtgatcttcctaagagtgacacaaaaagattggaggagtagatagttgctctgacaaagttagatgaaaagcagagtggagccctctcgaactcagaagatgaagacccaaaaccttgtgtaaggaggatcatggagacccaacttcttaaaaacttcaaaatgccccacattgagttatatgagagaaaaactgattcgcgagcacatttggcgaagtacaacaaaatgatgcaagtcccccgggtcagtatgccaagtgcttatgtttttccttaaccttgaccaagtctacagaagattggtggaaacgactagctccgagatcaattaatagttggaaggagttatagtcggctttccgtaaatagtttatttctacacgtgtcaaggacatggaagttggttctcttaccaatgtcaaataacaacataatgaaagcttgaagacttttattcaaaggatgatggaggtagctactaagactaaggttagtgatgacatgaaattgatagccctccaatctggattagtagttggctctctgatatggagaaaaatgtagagaatgagagttgaaactttaagtgagtttatggcgaaggcccaaggcatcatcaaccttgaggatgcttacacacaagcttttggagtcccttcggctcaaactccttccactactgcccctaacatcacaccccaagttctagctccaatctatacccttttaggagcttagtttatcccaaccatttaaagacctactactttgtgtctcgcccctacacagactcattttttgggtacggggcggcacaaactagatgcagtgtagctctaagaaaagaaaaattaaggtattggattctagtgcaaaccattcccagaacaagagagggggtaaaagccacaatcgcaacgattcatcaaaaaagccaaggaaggagtatgatccaaaatacaccgagtatacaagtctaatagacactcgagaaaacatctacaaagagacctacaacatggtccattataggaaacctccacagatatcacacggagggaggaatagacgtgatcaaaacaaagaatgaaagtataacggggagaaggatcacaccacaaatgagtgtgattatttgaaagatgatattgaaacgttggttcgagcaggacatctaggataatgggtccggatcctgatcatctctcctagacatggggtcgtgcatggacacataatcgttcccaaagagcagaacgttgtaaatcctctggagggggtaggatgttctcaagctctagggacatcattgcctgcactccttgctccactagcctcggttggggtggcattacttacaccaggactgagaaccccatatcctaccaaactcgctccacctccggtggacggacatgtggccacaatctcaggtggacccatctcattgggagtactcaaaactcacaaaaaaggtacctggaagaggtagaagaaggggaagtgtgcgaactggtgcaatctcccgcacagcactccaaaatgatgaattttcccatcacctttatcgaggatgattccaagaacgtatgcttcccccatattgatccttaagtgattaatgcatagatcgtcaacaaacaggtttctagggttcttgtggagaatgggagctctattaacatcctattcaaattggcgttctaggcgatagggctcaccaaggcagatttaaaaccttgccccattcaattgcaaggatttaatggagattcctaatgtcgatagggaaggtccatttacctatcacccttaaaagagaaaataatacaagcaccttcacgcactcaacctttgtggtagtagactaccagaccgcatacaatgcgatactagggctaccaaccctagtggactttggggaagtaacttccatcaagcatttatgcatgaagttctcctgtgataacggatgtggtggcacaatcaaaggcgatcaaaagaatgcgagaaattgctacagcgtctcaacacgggatgtgtacatggtccaagaagaaacacatactgctcccagaattgtagtctgatggacattgaagctgtcctagaggattttcaagaagaattggatcccaaggttgggacttaaaggaacttaaaatcaatggaagaggtaggggagataagcatcaatgatgaagaccccacgagaactattagagtgggaagaacctacccccaatccataagagagaacatcataaatatggtcaaaaggaatcaggatgtggtggcatggagccattctgatatgactgggatcaattgtaacactatctgccatgctttgaacattcgagaagatgcaacacctatcctctagaagaggagacctttagatcctgtaagggctgacattgtgaagacaaaagtagataagttaactgccaacaatttcctatgcgaagcgttatatctgttgtggctcgcaaacccagaattggtttctaaacccaatgtcccgtggataatgtctatcaactttaccgacctaaataaggctttccctaaagattactttttcctcccacagataaatcaaatggtagatgccacgtccgggtacaagttgctcaccttcatggatatctattccgggtataatcaaattaaaatgcacgttgcgaatgagaaacacactagcttccaaaccgagaaaggcatttattgctacaaggtgatgccattaatgtgacatttttctccagcaatgtgcatactgaccacgtcgacctgcgtgttaggttgccaggagttgttttgggctgtatctattgtgtattt

SEQ ID NO: 299728 - DNA, 2450 bp, Cannabis indica
aagaattaaaaaatataattaaagtctctcaattatttttaactacacaattatagtataattatatgatgaaataaacataccaacttattttttcaacccttttctttaccaattaagtttaaaattggaattatttatcccaaggaaaaatcttcaattggaatcacccaaattactataaaatatgcagagtcattcattactactctttatgacacataaagaacctcacctattcaccttacaataccttaatggttaatagtaaggcatgtccttcttcatcagccttatcttctatccctttccataatgcccatgttaatttttcaatgacttaaatgtgcgacaatcaaatctagactgtaccttaaaaaaataaaaaattgaaataaaatcattctaccatttaattttcataccttccttcctacccatatggcctttattatttaatgagaaacacttttaatagaaaacaaaagatcctaaaaaaatcattttacatacttacacaaattacttggaaaaaaacacctctctccctaaaatcttagtttacaccaaataatggatgagctatacaaatgtgaagccaattatgtgcctttaagccctataacattcttgaaaagagccgctacttcctatgctaatcgaacctctttgatctacgataacactcgctttacttggctacaaacttaccaacgttgtcgccgccttgcttcctcactccgatcccttaacattgtcaagaacaatgttgtaagtaatgtacattttatttttctcaaacttttctttttggaaaatattttaattggtgtaatttatttaggtttcggtattggctcccaacattcccgcaatgtacgagatgcatttcgcagtcgccatggcaggaggtgttctcaacactataaacacccgtctggacgctaagaacatagccgcgatcctcaagcattctgagtctaagatgttctttgttgattaccagtttgtccagacaggacacgaggctctccagattctaactggagagcctaatgataaggctaaaatgcttttggtagttgtgattgatgatattgatgtgcctaatggaactcgacttggcgagttagagtacgaggagttaatccgaagaggagatcctaagttcgaatccatcgagttgaatgatgagtgggatgcaattgcacttaattacacttccggaactacttcttctcccaaaggagtagtttatagccatagaggtgcatatttaagcactcttagcttgttacttggttgggaaatgaggactcaccctatctacctgtggaccctacccatgttccactgcaacggttggactttcacatggggagtggcggcgcgtggaggaacaaacgtttgtctccgccacacaaccgccgacaaaatctaccaaaacatctctctccacaaagtcacccacatgtgttgcgcaccaattatcttcaacattcttctcgaggcggccatccccgaaaaccaccggaaaatgccttattcggtggagattctcaccggcggcgctccaccgccggcgacattacttgaaaagatggaatcactcggtttccacgtgacccatgcttacggcttgaccgaagcaactgggccggctttagtatgcgaatggcaggcccaatggaacaaactctcgaaagagaagcaggcccaaattaaggcccgtcaaggaattagaattctaagccttgctgacgtggacgtaaaggatttgagaacaatggaaagcatgccacgtgacggaaaatcattgggtgagatcgttataagaggaagcagcttaatgaaagggtatttcaaggacccaaaaacgacgtcgttggctttcaaaaacggttggtttttgaccggtgacgtcggagtagtccattccgatgggtatatcgaaataaaagaccgatcaaaagacgtgataatatcgggaggcgagaatatcagcagcattgaaattgagagcgtgctctacacgcaccctatgatttcggaggcagcggtggtggcgatgccccacccacggtggggagagagcccctgcgcttttgtcgccggcgccggcgccggagatttgacagaggcagagatcttgaggtattgccggaataatatggcgcattatatggttccgaaaaaggtggtgtttgttaaggagttgcccaaaacttcaactggaaagattcagaaattcgagcttagagctatggcgaaaagctttactgttacggagaaagagaaagagacgagttctaactatgacgtggcattgtctcgtctataaattattattattattatgtattattattattattatgcatgaagagaaatccatgcatgtttgtgtggaataaaatacacgtgtaatattcaaaaaaaaaaaatcaacg

SEQ ID NO: 299729 - DNA, 1049 bp, Cannabis indica
aaaaataaataaaaaaaactaatcatttcccacttgatgataaccaatacgtagagattttctcaacccataatcattaacaataaataaagttagatattaaaagaactcaacaaacttcagtactcgccatgataagacacctcatggcgaaagctatgatgattgtatattatataatattaaaattggctgagttttgattctttcacgccacatttttgtagttatggggcaacaacaaagattaagaaagattcttaattttcaattattaaatattcaaccgtccaattttccattttagggatgtaaatattactcgtacagttagatgtatagcattaaattgaatatatcatatgaacggatttaaacacaaaatccaacaaataaattaggtgggaaattaatgtgcacttgcttacccttcataggcttttattatagcatgttttttcagtggaacagaaatcaattgtatattgtagagtattgattctcattcactcttataaaaatactttataggagcaattttttcagaacattaattaaaaaaggaagttgaagcttcctaatgaaaaattgacatttagaactgtagctatagagtgtacctagaccttatagagtcggttttttgggtttagtcgtgttgggggttcagaaattttcgaacaggattttaataaccctatcatgtcggttattagaaaataatcgacaacataggcacacgattattttgatatgtgtgtcctatgccgttggttatttcctaataaccgacgggatagggtatatatataacccttcttcgattcatcttcctccctacttcatcttcttcatttttacaaaccacacaactgaaccatgcaaaaactcataattcctcgccaaccaccgcctaaaacacccccatttcaccatttatcaaccatttttactcttttaaaaaaattccagttttcgtactcaaacacatgtacgtccttggtgtttatcatgtttttttttttcttttttacttttttggtgtaaac

SEQ ID NO: 299730 - DNA, 3385 bp, Cannabis indica
ttttttttttttgttaaatggagctgttcatgttttagtagagagtcattcttaaaactgcaagacaattatattctattaaaaaaaactcttatcttgccatgttgtattatgtttcaatctcgtgtttaagggaaatttgagcaaatatgtatcccaacaaactctttcgctgtggagtatttttccatgagtaaccattgttgtaagtctaaggaacccaatattgacccttaacactaatttcttcaatttcaatttcctcatgacaacgaagatgataaacacttgaaacagaaaccagtcacatatctggatgtatattatataatatatataatttcatatgtttcagaaaagtgttgagagcagaaacgtttttacagctttgatttaaaggacaattaaaatatgaccatggtcataaactaaattacacattaaacttcaacaccattaagttgcataacgatactacaataccataggaaccatctaaatcctcaaggaaacactttttatgcagtctcctttgcggctgcatgcccatcatactcatcggtggtaacctgtccgtattcacccttagagtccttctctacctcctcaaagtaatcctctcgggcattgtcagccaacatcaaggccaccaaccagaaaagtgctgaatcaagggacacaaaagcaccgccaccaagcaaacctgtcttagcggtagggcaatctgtcttaagattgcgatggacatggtgcaataggtgggattgctctgtgattgtaggccacaacaagagggctgcagctattcctgctgtgaacctatgtaatttcaccgaaagcaaaagtgactgtaattagaagagaataaagaagctaatcaaagactagcctctataggaaattccaggttatctaatcaatattgcagcaattttttcaagagaaaaaactggtcagagtaatacaaggcattctattaatttgttaaaagtaaagtactataccaaagaaaggaatcactatgacagcctcattatttgaagatctgcctgagttacaagaaaatcacttctaccatggagttatttttctatttctataaagtacacacacacaccagtagagagtacacatctaattctcagctctataagcacttgtgtaataaggaagatgatataccatcaactatagtagtatacaaactatacaatgaaaactcatcagatagatagatataacagctaggctagcagtgccatataggaaaatggacaatgaaggttaactttatggatgaatattatatggaagaaaggatacttacaaagcaatgttgaagaaaatgacaaaagtagtgttcctgaacaaagcaccctgtggaacagactttcccttgtatggataaaacaatgaccaaagcccaaaagctgttgatactagcagaaatgcaaaagacagaaatcccaaagccactgttggatcagagggatatttgcatataacaactcctattcctgggacttgagtgacactgccagcagcaggctgtcaagagaaaaaactttgttatatatattcaaaatcaaaagcaaaatcaaatttatacccctcaatgatctgaatgatattgttgttcataataaaataacattggaagagatactgtgagagatattattgtagatactatttcaatttctgctctacaaccaagtctggaaatttttctaaagaggaaattgaaatgacattcttcaaaataaagtttctttctaatactcttttgtttcagaaacaaatgaattaaaattgctgagctggtgtggtgagacaatatttacttaataatttgacatatcactcatgaaattatagaaacaaaaaaattcaagaggaactgcaaattaagacgatattattacctttttattttcagcaacaactccaaaaatgaaggacaacagaccagaaaaggctactattagggaaaactgcttaatagttaaggccattttccctgcttaatttgttatcaatatcctgtaaaacaatcattatccaattattttaagagagacactgaacttagaaattaatcaaataaaactaacaaaccaacaccctgaaaggaaaaacagaaagtatctttacaaattaattaaatcccatacatgtataatagataaaattgcaaaaatgaatgaaacccaaataactgagtgtaaaattaaagaagggaggtgtaccaaacaaacacgaagataatcaatcaatcaaatttgcaattgcaagagaggagaggagaggagagataagctgtgaaactgaatttaggggtgaatctagagagagagagaagtaagttcagaatcgagtcagataagattgaagtcaacccttggaatctctatctttctggttagagtaacaaagttattatcaagtagagaagagagcaagagtaagaacctttttccctagtaacctccgtacaaggcggtgacaacaactgtccaatgtcgatgtcaatattaatatacccaagcaattaagttttaaatcatttacgctactaattaacaaactatttgattaattaaaattaatagcataacacttcgaatggaagggaagaaaatgtgcatttattagtttctttattattattattattattattattattattattatggaggtaaacaatttttcatcaattcgagtgtgaacgaattgactttgttataaataaattaaaataagcagttgtattgtgtgctagttttgcccctatagcgtgatgcgtgagtgatgataggggtagcaatttttgtgttcatgagttgtattccataatagtcctcaaacattctttaatttgtttaaattcttatcagagaacaaataaaaaataaataaataaaaactaatgtgaaaatagagtctgagtaaataaattgatagagccctactagaggtttcaattatagagaaacaaaaagtaacgagctcctgttcttaaatttttgaattcgtattgtgtcgagttttatattacaagtaaaaatcaaacacaaattaaatccgactctttattaatcatataaaaaattaaactaattaaaatttttgtcccttaaactttaacatatactaaatcataatctctgaacttttttagccgttaaaaattctccctaaactattgagattgttatatttaaggacttttgtctaatttcattcaattttactatttcaatgattgtttatgtactaaaccatgctccctagactttgatatctaccaaatcatgtccatcgaactttgatatgtaataaatcatgtcccctgaatttttatccatgctagacttttttt

SEQ ID NO: 299731 - DNA, 1390 bp, Cannabis indica
caatcatagtgagtaagacggtggtaaccgaacccaaaggagagaaagagatccatgttcagatcttgataatgctctgtgacagaaatgaatcaagggctagagatcttgaacagaaggagtcattatattccgctgcaataaatataaggttttcttaaacccttatgtgtttattttattgttttagagaattcatatttaggatgttaatataacatacttgtttgtaaatctagatcctggtaaaatattcctagcacaaacatcatcaaattcaagaacaacattattatgttttgtgaattgagagatgcttaacaagtttttagttagacttggcacatgaagaataccttacagcactaaaggatggttagaagaaaaagaatgaactaaaccctgactaattttatgaatggggagggaagagccattacctactattactttggacttccctttgtaatcaatagcagtgctaaactgttgagtttatgtggccatgtgatcagtaggacctgtgtccaagaaccaatcttgagtttgaatggtagatgaattggtgtgagtgatgttggcttggggtgggtcttcatggtttgtggtgggtgatgaatttgattgatttttagtgaaattaatgtcgaatctgtggaagcattttattacagtgtgtccagccctaccacatagctgacaaatgggcctatttccattattgctgcgacctcccctgtagtttcctcttccccctcggttggagccacggtagccacgattggcctaagttcctctgccaccattgtaggtgttcatattagccaagttggcttggacattgattgaagattctgctgcgagttgttgcagtctcatttcttgattctgcaacataaattgcacttcttgcaaggtgagttcttcagatctggatgtgagattgatgacaacagcctcatactcagatctaatacctctaaagatgtaaagaatcaagtcatcgtcttttaagggttggccagctggtgtgagactatcaacaaattgtttcatcttcaagatgtagtcctcgaccgattgtgaccctttctttgtggaatgtaaaaatcctcggagttgaaggattctggccttggatttggcagcaaacagttgtgcgaatgtggtccaaatctccgtcgaagatcgacaattgataacatgaccaagcatgttttcaaagacggaattcattagccagtgcatcaagaattgatccaatctcatccattgttgaaaatttgggttcggaagattacctgcaagtgtattcggtggaggaggacgtaatccgaggatgtatccatcaagatcatagggacgggtagaagctgttgggttttatgcc

SEQ ID NO: 299732 - DNA, 3331 bp, Cannabis indica
gtttttgaatgtattgaataataggttgatactgttgatggtccataaagttgagactagatggaatggaacttcatggttgttttttcaaaaacaaatttgttttttttgttttaatgcttttccccttttgctttcattacttaattgaagaaatggccataatatttcttgatgtcccattttgattccatttattacttgacatttggtatatggtttttcagctcactactatacaatttattgtccaataattctgttgtagttgagcttgattcaaattagttggattcattttctggattttttttggattcacttcacttgttatgtttaagcaaaagattgattttttttccttctaaaaattctaatttcgtttaagattttatggaattttgttaaagtgaaaaggaacttctagtcttatcactagaagacaaaaaggtagcaactttagagcttttagcattaacagtggtcatttttttttcctcaggagatgtttcatttgatatagctgttggtgcttatgttctttgattttataagagctagagctagtaagaacttttatctgcctgtggataacatctgcctacccattaccaaatttggtaaagtctattacttgggattttcaggtaccatgagagatatcaaagtaaaaggcacttctaatctgtgtactacttctactactgtatctgatggagaatcccatgtagcgcaatctgagttaatcatggacaaagagacatcatcccttggtgtgaaacaaactcctgaaattgaaaaaaagtttgtgcatcgtgtttatgatgccatagcacctcatttcagctcaacacggtatgccaagtggccaaaagttgctgcctttttgtcatccttggcctctggatctcttatcttggatgctggatgtggtaatgggaagtacttgggattgaatcctgattgtttctttataggatgtgatataagctatcccctcattaagatctgtgcagatagagggagtgaagttttggtagctgatgctgtaaatcttccatacaggactggtttcggtgatgctgcaatctccatagctgtgttacatcatctaagcacagagagtaggagaaagaaagcaattgaagaacttgtccgagttgtgaaaaagggtggtctagttctgataacggtttgggctgcagagcaagaggataggtcattgcttgctaaatggactccacttaaccaaaagtatgtggcagagtggataggtcctggcagtcctcgagatcgcaatagtccttcacccttcaaattgaaaagtattcctgaaaccgaggagaggaatttaggaaaagtcaaagattccaaggaaataacttctcgaagtgaagatgatagtgtagcttctgatgatgcgagcaatatcaataatcaagaatattttatcccttggcacttgccttatcatcgggccgaagttggcggcgcttctgcttgtgctgtcgaaaatggctttgcaaagaaagatgataaaaagggtgctgtagtatacaaccgatattaccatgtcttcagcgaaggcgagcttgaaaggtatgcatacaagtggtttaaggtgtttccatgtgattgtagtttctgttatcaataactaaagttaagtttgtgcatagaaatatatctctagcaactgaatctttcgtagaggtacttttatactttctattagtcatgtgatgtagcttttaagttagcacatagacatatgctctgtttgccttaccctgattaatttcgtatctatgtacaatctaatgtggtagttattcttgcagattagtagttggcatggagaatgctgttgttgttgacaggtttttcgataaatcgaactggtgcatcgttcttcaaaagacatcatgaagaatcaaataattaaggagataagcaaaatacatgctggaatagcaaccttataggcaatgacatacaattgctgagaaagagagcaaagttttgttacatttcccaatgtatcttggattggctttaaggattttgtttcattgttacatgtaaaattctgattccaaccgcatttttcaagggttggactataaattttaatgagtagttcattgtttttataatctcaaagtaggttctatgaaagtatttcttctattaatttggatagccacacatcaaacttgtggtttgtgcttactttatttaagtatgtaccacaatatgagctaagtatgtataaacaaacattattattggataacattgtcggatcaaatataaaaatattgagtcatatataagaatatgaattaattcacttattactaattagttttactaattgattattgattttgagaaggaattttatgattctcaatactcttagctagccgcaagcaagcaaatggcactcgtagcgcgaataagaataagcaagcataacgtgctaagcaaaaataaatattgagctatatataagaacataagttactttactcatcaccaaactccatgagcctctgttggacccttacactcacgaaataatagttcttatacacaagtacgtcactctggctacttcattgactgatgactgaccttacaaaccaacacgagtatttctagcgtgctttgtcctcactcgcacacatcctgagaaaatttcccaagaggtcacccatcttgaaattacctaaggtcaagcacacttaaacgtggagttctttcgtgatgcgctaccgaaaaacaagatacaccttgttgatataggtagtaccaatcaaaccatttaagccatcttcaactatgtagtctcatacctacacaatcttagaatcatcccacttgaccttctctaagcggtatgaaactgcacaacttacccttgtgggactgcacagcttacgctcttcaattattgtatattacaaaacttctcttaacaaatattgttaaaacataattctaaaaataaaatagtaatttagtaaattagtaattatttatccttccattattctaatattctttttaccaaataacataaaaagattattactctcctttctcatttttatattctccttccactctagcaaacatagcttaagtataatattatgagttattaacccaagttggaatttgggataaggtggatgcggttttatttcaaaatcaatttgcgatgggaggagtaacacattcatcttatatatgataatttatttctacacataagtaatgtgggactaactctaatacatcgtcctcacgtttgagcctgaaa

SEQ ID NO: 299733 - DNA, 7981 bp, Cannabis indica
ttttccaacctggttcttgacagtggcataatattcgaccattcttgccctcatacatctgaacaaaatggtcgagcggaaagaaagcatcgccatattgttgagatggggcttacactcatggcacaagcggcagtacccctaaagtattggtctgatgcctttagtactgcagtgtacctaattaataggttacctactgcagttttacaaaatcagtcaccctatgctacactcttttcaaaacaacctgattacaaatttttaaagacctttggtgttgcatgtttcccatgtcttaggtcctatcacacacataagttccaatttcactctattaaatgtgtgaatttgggctatagtgagagtcacaaaggctacaaatgccttagtcctcatggtcgaatctacatatcaagacatgttgtctttaatgaacatgaatttccttttaaatcaggttttctcaacaattatgccactgaacaacatgttgttgttcccatgcctcattcatggttccaactgcctttctctgcagccaactcttcatcctcaagccacacttcagctgatgctgatcctgcagaaccactaccccaagctgcctcagacacggatcaggttccttcttctccctctcattctgactcacctatttctgtatcacctcaccatttttcccctgcagcttcttcctcttctccacaaaactctgctacagtcgggcctacctcttctacttccccaacacctactgctgcccctacccgaccccctcactgctccttctcaccctatgatcactcgaggaaaggcaggcattttcaagcctcgcgttttccttggccgagccacattctctcttgatcaccatgagcctctttcggttcaggatgcactcaaccatgaggggtggaatgctgctatgggagtcgaaattgtcgctctcaaacgcaacaaaacatggtatttagtgcctccttcacctcactataatgttgttggcaataagtgggtttacaaggtcaagtataatgctgataactctttccaacgctacaaagctaggttggttgcaaaaggcttccaccaaaggcctggaattgactttggggaaacctttagcccagtgatcaaagcatctactgttcgggtagttttgaccatagctgtatccaagagttgggacattcgataacttgacataaataatgcgtttcttaatggaaacttggaagaagatgtgtatatggtccaaccacagggattcgaagaccccgagaagccacattatgtgtgtaagttgcaaaaatccatttacggacttaaacaagccccaagggcctggtatgagcaacttaaaatgacactacagaaatggaaatttgagaattcaaaggctgactcctctttgtttatgttcaaacatcctaactatgttatcatggtgctaatttatgttgatgatataatagttacaggcagcagctccaagcaccttgatcagttcatcactcaattaaacaagtcattttctctgaaggaccttggacctctgcactattttctcggtatcgaagtctttagagatgctactggtctttatttgtcacaaagaaagtatattgctgaactcctccaaagaactgatatgtcaaatgtaaaaccaagtccaactcccatggtggctaacaaaccgctgtctatacatgatggagaacctatgacagatccctcacgatatagaagtgtcataggtgctcttcaatatctcagccacacacgaccggacatctcgtttgctgtcaacaaactcagtcaatttctcaaatgtcccactggtgttcactggaatgcaacaaaacgtgtcctaaggtacttgaaaggaactatccaccatggacttcatatagcaccaagtgacagattgagtttaactggcttctcggatgctgattgggcttgttgtcccgacgatagacggtcaatagcaggatactgtgtcttctttggtgactccttgatctcttggtcatcgaagaagcaaacggttgttgcacgctccagcacagaatcggagtacagagcattggcacacctagctgctgaattgagttggatccaagaattgttgaaggaaatgaaactgaagctgcctgctgcacccgtaatctggtgtgataacatgagtgccaatgcactggctgctaaccccgtatatcatgcccgaacaaagcacatcgaacttgatgttcactttgttcgtgataaagtgctgaagaaagacttggagattcggtatgttccatcaagtgatcagattgctgattgtctaacaaaagggctctcacactcacgctttcagtatctcgtggacaagctaaacgtgactgcatctccctttagcttgaggggtggtgtcacgagaaaaatgcaggggcacttcagtaattcccctgcctccgaagttgttggaaatcagcaatcccagtaaagatttgcaccagctgtcatatctttccgttagcataggattcacaaaatattcctttgccaaaatatcttgctacgtgtatggccctgattgtacaatctgctcttatgtaatgcagcaatacagttataaatagaaagaaaatcatcagcattcattgagctgatttattatttctttactacttttactaacaaataataatttttcaataaattaaaatgtaattgtgttatccaatctaaataacattgagagaagagatattaaaagtagtggctgagggagaatatgtaaattgggaggtaaaatgtaaaataataaattttggccggagacaaattaataattattgtatataattttgttcacataattaatatatatgaaaatccattagaacaaaacatttagcagggctacaaccccatactttttctaagtggctccgtcaataattaaaagattacaactatattcctaaacaaacaaatagtaatattatatatataaaaataaattgtacaaaatatatatatcatatatgtatatatgtatgtggttgaaactcttccagctatatgtatgtatataattaatgtatttatatagggagagaaatcaaaggttcatatttgataatataccattagatacgtacaacatatatatagagttagaaatatgcataatattttatagtatatatgatttttggggtattcatgtgcacatgcatagatacgttatatggttggatgaagtaaccacgtgttagtttaaaaaagccaagaaaggttcaataatttaataaggaaaaaaaaaagacctatgagtatggtacgcattaccgtacttaatattgtcatggctgggttatatgagtatgataattaatccatgtggtgttaacgtatacacactatattatgtattactaataccaaaatttaatggttcaaatttgtataataatataatcagtttggttttcgtttcaaaaactatatacaatgacaaatggctgcgattttattaatggtaataactaaaaaaaaatgtagtattgtattttttttatatatatatatgcatatttaaataatgggaatgagaagaaagaaatatatgttaaaaaggtggtttgacctatttagttaaggaaaaagacgagtctgtgatacaagaatatttgtcttgtagttgattttgtacatttcttgaacatggctgatgaaggaaccacgtgaactacctctctctcctttctctttttgacaaaataaggatataataataataataataatatatgtatttatataatagttctaaattaaataaggaacattattagcaggttagtaactctctctctcttttgatcttttaaaaggtgttctaaactctcttttgggggtgggtatttaagtggtttcaactaattagaaaaagaaactagagccaccaaagaattattggataggtattgagtttggataagcatatataaatagtgtgtctatataatatgcatttctatatatgcgtgtgtataaaaggttatgagagagatttgagcatgtggattggccggttttgaagatgcacttccaaaaatcaccaccttagaaacacttaaatcatcatatatcatatatgtcgatgtcgtatatggtagttgggtattagaagttaattaggacaaatcaacatcttcctaataatgaacaaaagaatttattattcatttatttaattaaaacttcaataaatattttgacgttgaaagtttagcagcatcggttaagataatagatgaaaaattgaaaatgagttctgtattattgattttcaaggcaaggtacagagtatatatacataagttgagacaaagctaaaagcaactaacaattagaaaaactgtacaaataacagaaaactattacaactaattgttttcaacagcccccttcaaagttaagttgcaaaagcattcaacattgaatttgtctctaagaaattaagaaaaatctaaagcttaatattaccttgattagacagccagtaatttgatcatagactggcacatgtcttacattgagactcttgttttgaaccttttccattctaaagtataagttcaattctatgtgtttagttcgagcatgcaagattggatttgcagttagcagcacaatgctaagattgtcacactagactattggtgtgcactgcaatgtcacctgaagttcttcaagcaagaacttaatccaagacatttccgttgtgatgctggcaaggcttcgaaattcaacctcagttgaagaccttgacacaatttgctgcttcttagattgccaagcaatcaggtttgaaccaagatagatgcaatttcatgtctagtgacaataagttattgtagtcctccaacaatagatatgtagaattgaggactttctataggatcactgccttgcacagataatctaagaccagaagtcatgggggttgagtttggctttacatattgcatttttgctctaaacaacatatcttttagatacttggtttgagatagatgtagtacccttgttttgtgtgaagcacttcaatcccaagaaagtaccttatttccctaaggtctttaagagcaaaaatgttgtgaagatcagaaatcaaggcaaaaacaagaaatgaattgctccctattatgagaatatatcatccacatagataaggatgagcattgtttggccaagatgatgcttcacaaagagagattgatcaacttttgatgactggaaaccaaaggagattagaatagaggccagtttgtcaaaccaggctcttagaacctgcttgagaccataaatggccttgtgaagcttgcacactgcttggggttgaatgggatcctcaaaaccaggaggttgttgcatgtatactttctcagtgagatatccattgcggaatgcattgttgacatccagttgatgaatttttcatgagttgtagatagccaaagtgaggacgattcaaattgtacaaggcttgacaactggactgaatgtttttgaaaaatcaaagcttggttgttgtagctatcctttggccacaagtctggcgttgagcttgttaacagatccatctggattctctttgattttgtacacccatttacatcctattggagttctgccttcaggtaaagaaacaatcgtataggtcttatttctttttaaagcacacatttcctcattcatggcagagtttcatttggcatcaagcaaggcttctgagactttggtaggcagaagagtagtaaagaaagctttaggctttttgataccattattggctcttgtgatcataggatgttgattaataggagcaggggcttgtgcaacaggggagattgcaatagctggagcaggcatgtgtggttcagcagcatcattacatgttgcagatgcagtagcctatttagaaacaggagaggtacctgcattcaaaaaaacagaggcactagaggaactagtatccatgttagtggtttgcacattatcaatatggtcatttagggaacgtgatgtgggatgtataacagcaggtggtggtggttggggatcaggtaaatgaagtggaggagatgcagtgggagtaggagtggatgttacttgagaagaggaggaggggaaggaatttgaagcaaagggaaacatgtattcattaaaactaacatctctagagagataaattctcccatctgcactaaggcacttgtagcctttgtgaacaagattgtaaccaaggaaggtgcattgagtagatctgaagtctaatttgtctctattgtatggtctaagattgggataacaagcacaaccaaagactttaagagcagtatagtcatgcaccttatgaaatagaatttgaaatggtgaaatttggcctaatttgggagagggtaaactgtttatgaggtacatagatgtcctagaaatctcatcccagtactgtagttgcatgttgacatgagcaagtagagaaagaccattctctactatatgtatgtgttttctttccacaatcccattttgttcatgagtgtggggataagattgggtgtggaggatgccacattgctcaaaatatttgtcaaagggtttaaattcatccctacaatcggattgcatagctttgataggtaggttgaatttaagttcaacgcgtttcttgaaaatctgaaaagttgggaaggcttcagatttggttttgagaaagtaaagccaagtatacctattgtaagtatcaataaaattgatgtagtaggtgtagccatttgatgatttgtggggggaagggctccatagatcagtataaatcatttgtaatggttgagtgtaaacagtcttaaatataggggaaaagttaacttgtgggatttacctaaacaatatgtatgtgaaaaatcaaagatagttttattaattggggaaacattacaagatgtcattatattttatacaatttgagctgttggatgtcccaacctactatgccacaactgaaatttagatggtacagaaatatgagaaagaaatgcagcagattgtaaagatgatggctgtggtgaaggttgaccagaggagaagggagaatgcatatgatcactaatttgagtgtgatcaaacacatagagaccattgttagccttgccaaatagaatagtcttcttggaaacctggtccttcacaaagcaagaatccgagagaaatttaaagaagacattattatctttagcaaattgggatacacttaaaagattcttagttatagtggggacatgcaataaatttttgagaactagagagttaaaaccaatatgagttatgtgcaaacggttggattatggttttaccaagatctaaatttactatcatgtatgttatttaacgtcctaaatatgaatttctaaaataatgtaattaaacacatataaagtttgagaaaccttacattggttgcagcggaattaaatgactccttccgctcagatctctttacccttgtatccttttggtagcagagtatcaccaagatctgagcccgattctccttcacttgaattggattcttcatagtcttacacactatgattgagtaccaacttgatatgtgtgggcacgtactctatcactctagggttcgaaaattgaagagagaaagagatagagagagaaggattcgaaaatagagaaaagagaaggctcaaaatttgactgaaggcaagtgaattattaagcttccaattttgagaccatcactatctatttataagaatccaacaaggtttaggtttgaattatttggcattaaaaaattgataaaataaatggtaaaatagacttaagcgaccagccatggatgtgggcccccgactttgcaattttgccatttttcaactatttattatttttt

SEQ ID NO: 299734 - DNA, 5087 bp, Cannabis indica
gattatgtgaaatgagttttatttagggcataaaacccaacacttatctatagttgtgctaatcgagtctcaaactcacacaacatggcaacaacttcaaaactctctgctaagtttcgatggaaggcttgagaggctcaatgctatctcaaccaacagcaagcttgttgggaatatgtttgcaaatatggcacagaagccatatggatccaacaactctcacaacacaggagggcagcgaagattcaatccaaataccagtggtggaagaggaaatcagcaggcatctggacagtttagaggaggaggtttccgaggcagaggaagaggaggaggaagagcaaatggcccaaaaccaacttgccaagtttgtggcaagtatggccactccgcagtgatctgttataacagatatgatgaatcttacatggggaatcaacccaacactgctggatctcaagacaagcagttttcagcactcattgccacacctgagatgctcaatgatgataattggtatgcagacagcggagctagcaaccatctaacttcggatccaggcaagatacaagccaaaactgagtatgagggtaaggaacaaatcaccattggtgatggcaggaaacttcctatttcacatgttggatctggtgtaattcaaactaagtcttctaaccctttgctgctaaaaaatatgctacatatccctagtatttcaaagaacttgattagtgtatctcaactaacaacagataataatgtctctatggaattcttttctgatttttgttgtgtgaaggaccaaagcacagggaaggtggttctgcacgagacacttaaagatggcctctatcaacttcacacttcaccacaatcatctcaatctgcctcaccattctctgctgtagctgtcagtacctcgtctgttaatcaagttttctctaattccctaaaagacatttggcatagacgtctaggacatccttccattaatgtactaaatcaagttctaaaaatgtcaaaagtaaaatttcctattaatgaaattcaaagtttctgtgatgcttgtcgatttggaaaatcacatgctctaccttttcaaaactcatagtcaagggcgactggtcttttggatctggtgcacacggatttatggggaccagcccccattgcctcacacacaagcttcaaatactatattcacttcctcgacgatcacagtagatacacaatgttgtatttactcaaaaacaagtgagatgccttggctgcctttgttcaattcaaggccatggctgaaactcaatttggtagaaaagttaagaaattaagaactgattggggaggggagtatcaggcattctcgagtctagttgcacagaatggtattcttttcgatcactcttgccccaatactttagctcaaaatgggagagctgagcgtaaacatcgacacattgtcgaaatggggctcacacttcttgcacaggctgctatgccacaaaagtattggtctgatgcttttcagacagctgtctattttataaatagacttccaaccaccatacttaatcacaaatctccttatgaagtcatacactcaaagacacctgattacaagtttcttaaagtattcgggtgtgcttgttttccttgtctgagaacttatcaaacacataagtttcagtaccattctattaagtgtgtgaatcttggctatagcaatgtgcataagggctacaagtgtctaagtccgcatgggagaatatatatatctagcatgttgtttttaatgaaaaggaattccccttccatttcggttttcttaacaactaccaacctgaaaagtcagtcatcatcaccatgccgagtacctggattcaattacccttcaacactcagtcatcctttcctagtacagaaccaccatcccatcctccttccacacaagatcaggtatgtacttctattgatcatggctcaccaatctctgctgtccctcatggtaattctggtttgtttcccacttctattgatgataattcctctgcaagtcctggttcagttttaaggctcacaacgtgttactggtacaccttcctcgcaaccagaacaagtggttgctgctcaacaactcccttctgcatcagttcagccgcatcatcctatgataactcgtgggaaagttggcattttcaagccacaaattttgctttctacagccacttcacagcagccccttcgtgagccctcttctgtccaggaggcactcctccatgaggggtggaataatgcgatgggtactgaaatggtcgctcttcgcaagaacaagacatggtatttggtgcctccttctccggactatcatatagttggcaacaagtgggtttataagattaagtataatgcagatgggtcggttcaacgtctcaaagctcgccttgtggcaaaagggtttcatcaaaggccaggacttgactttggagagactttcatccctgtgataaaagcttctactgttcgggttgtcttgacaatagcagtggcttacaactgggatataagacaacttgatattaacaatgcgtttctcaacggtgtccttgatgaggaggtttacatgacacaaccacaggggtttgaggatccaacaaagccacactatgtttgtaagtttgaaaaatcaatttacggcttgaaacaagcccctagggcctggtatgagcggctcaaagacacactacagcaatggaatttcgaaaactctaaggctgacacctccttctttatgctaaaacaacctgactatgtgattatggttctgatatatgttgacgatattgttgtcacaggaagaaaatcaaaggagcttgggtttttcataactcggctgaacaaaatcttttccctcaaggatctaggaggtttacattacttccttggaattgaagcatttagagatgaaactggtctctatttaacacaagggaaatacatctcagagctgctgcaaagagtgaacatgtccaacttgaaactaagtcctactcccatgacaaccaacaaaccattatcaatccatgatggtgagcctatgaccgatccctctctctacagaagtgtcataggagcactccaatatctaagtcacacaagacccgatatctcctttgcggttaacaagcttagccaatttctcaagagtcctactaacgttcattggaatgcaacaaagcgtgtgttgaggtatctaaaaggaactttgaatcatggtattcacatcactccgagtgacaggctgtctcttactggttttttcgacgcagactgggcttgctgcccagatgattgaaagtcaattgcagggtattgtgtatttatgggagatacattaatctcatggtcttccaagaagcagacagtggtggcacgatcaagtaccgagtctgagtatagggctcttgctcagcttgctgcagaacttgcatggcttcaagaactacttaaggagatgaagtttaaactgccagctgcacctataatatggtgtgacaacatgagtgcaagcgcactggctgccaatcctgtttatcatgcaagaaccaagcacattgagttggacattcattttgtgagagacaaagtacttcaaaagcagctacaaattcggtatgctccatcgcatgatcaaattacggattgcttgaccaaaggcctctcccactctcggttcaagtttctagtggacaagcttggtgtgattgaatcaccctctcgcttgagaggtggtgttacaggataaattatgcaggggtatttcagtcctatgaggtgtcccctaatctgttggagcatatagcaatcccgaggcaatcattgcattgcagctgtcacatcaattccgttaggcactgattttaaagattccatctttgtaatgatttgttatacacgtgtaaggctgagattgcctcttgtacattcctttgtatttgtactttgtctataaatggaaatctctgcatcagcgataatttgagctgatcatttaattctcaatcccttagaaatttgactatatacatagccaattgatttggacatcaaaacacaagttagaaccaactcatgccacaagtcaaaagtaaatttaagcataaatctcacacaattattttacatattaaatgcataaatctcactcaattatttaagcatactcttattacaagcaaagataaaatagaagactattaaaaactattatagagatgagagtatcatcgttccatataaaaaaaaaattatacaaaggtaaaatatagatattaaaagaaaaaagcaaatgaaaagtcataaacttttgtatcatattcttcattttgaaaaaccttcagagccacatatggagttgcagtgacaatcaatatattccaagctacaagcaaactataatttaatcaagataaatgtcacttttgaattagggtatttgaaacataaaaggaagttcataaactattttttctttttttctctattccaatatgtaaataaaaacacttctcagcaattcaatgtttaataaaatacaaatcatggtgtcatgtgcaatgaaatattcacaagaagattcaggctttatcctccttaactatcaacaattgtcatttatatgtaaccaccaaaatgcatgagtagatcatcaataataaatataaatgacatatgagtgcataacatggctttttactaaccagtacttgataattccatcccagccacatgttgctactttattttgctgcaatgtatgccacatagctccaatgcatataccctcatgacacatgagagttctgaaactaataataattcaatagtaatcaactaataactataactctcatgtgtcatgtactgttacaatatataataaaagctaaatctattctaaaattgtaacgtcctgaataaataggcacgctacccaaaatacttatgaaatcctaatccccaaaacgggattactaatcaaaatagcaaagaatttaaacttttatattaaacagattgaaaataaactt

SEQ ID NO: 299735 - DNA, 2870 bp, Cannabis indica
ataaaaatatttttattttaattttttaaaataatatataagattcctgtactcaaccaaacactttaatttgattaacaggaatatgattacatattaccctacacaaccaaacacagtttacacatttccctataatcatattctccttcataatattccctataattaaattattttgaacacctcgtaccaaacgcccccttacattactctcaatactctcctcttgtataatattattatttgatttttgcttagctattattatatatgtgagtttaagattattaataaaatatttatatatatatataaacagattgatgcagggatgttcaccaaaaaagatggtaaagatgatgaggacattgagaggatccgactccttcatttcttttatgaaatgtatcaaatgcaatatacgcagattggagagctgctacaaacaacttttaatattttgaaagaaaagaaaatagtttcttaattagttatacgcatttcattccatatcgataactgtatatgggtctttatttgtcatttttttaaaacatgatcatcatcatgaattttctattcttttgataattgataatttaaaccatttatttgtttagagtaaccatatatatatatgcgaccataacacattctttcaataatattgatgatgatgatgattagcatttataataatttggtcataattctaattttgtatttattattttaattttaatttaataattaattattattttcattttaatttcatatatatatatatatataagtttagaatttatatgaattcaatcataataatttcatatatatttagttattaaattcttgtagaaaataaaaatcgcattatgaaaatacatataaaagagaaataaatttattttgtcaaaaaagaatacataaataaaattggtcacttttattatagtttattattttaatgaataaaaaatatttatgtccaaattcatactaattgtaatattagttctagtttatatactattgaagagtacaaattataacaatttggtcatttcattcttagcaaaacacataagacatacaataatttcatgaggcatacaaaaccagtaaagaatctaaagatgaccaattttgaagtttcttccgccccaacgctatctcaaatggtgaggttgaagaaatgagttaggagtttaagttgcctacccacggggaggaagacgtggattataatgacgaagaataagaaatcaggtttaattttgtggaagacgctcctctggaagaaccattctcttgcgaggatctagaactgcaggtaagaaaattagatttgaccaagttccaaaggttgaatctagttcaaattggctataagaagttagtactagtgtcgagacaacaaccacgctttcctttcacaaacctaatgattcgaaccgatgttgcagttgtctcgattctcatacttcgttgtggggtcgtagttccgttccacttcgtcaaaaataatctaactcattacgacgtcgcacccttccaactcaccccgaatagctacaagatcgtcttgggatttttcgtgatgtacaaagagtatacgcagggtgaaccttttgtcgaagactttagctatttccccaacataaaaaatgttggccacgacaatggtttctaccattttagcaagtgggccaactcgaagatcaacgggattgaaggcacggtttctaatatgggcgactggaaattgaaatggttttatgcgtttgcattacaagggattagggtagatattaatcgtcttccaagtatgtcgcatacttttatacttgtattatttttgtcttgaagaaattctaatcttttcgttgagttcacagggagaacaactcgatctacataattaactggagattgcatagagattatagaggttctaagtagtttgcccacaaaagatcacgattgccgcatcatatgtacaacgacaaaactgtaggaacaggctctgataagtaacgatgtcagacttcagcgagaacctatgtacaacgagcccttcgagaggcaaaagtgaagatcgaaaggtgcatatagctaagcaaagaaaaagacaacccgcaggtaataatgctcccagcatcatttgtgaaaaaatttatgtatatgcggttactaacattgttattgcagataactttcttgaagagtgccccaatccttaatcgcgtgtcaaaaatagacaaagagctcgcgactcttcagtgaatccttttttgatactccagttatcaattcgtcaaagaagtaagagaaggtcactcaggacaagagggaaaaacctaggttggaggcaaccacaaaagtttgcaatttgatggcgctaatgaggtctacataagtgacgacatctttgtctaatttaaaagtgctcatgtcactgacatttagggacgttgctttgaacatatgattcagggaatgactaatattgcccctgattttgcccaatgtacgtggaccaaccagacaaggacacgtggacacaaaggttttagcacttaaattaatagctaagtttttgtaaagaaaggcattatcttggatatgcctcctagagaaggcatgcaaggttctatatgctcccggagaccaagatggcatcaaagcatctccgggaggtgtcaggcttcctttgagcagtcatctcgcatttaatgctgcatgggaggaggcgtgttggaactgccacacgcaataaagtctgacgacacaacccccgatctgcacctacaagactatgaccactaaagtctaatgacgactactctgtgaagaatcacatc

SEQ ID NO: 299736 - DNA, 892 bp, Cannabis indica
cctttctgccaattttgaatttttgtctgagagatatgaggaaaaaacttaaaaagactcaacttatttgactttttcattaacataaatgagatttgataattgattatggatattgttggttaaattcccttacaaactacaattgtaaatacaataaatactctaagcatatttcttttccttacaactaactctacaacaataggttcagttaaattaaaacatacacaaagtaaggaacaagctcagccatcttcaattgtagatatcgttactctcactagcacaggctattagacctggtgtcgccatcttcaagcctttaaaaggctacaaaaccctactttccagctaagttgcgaagccaaagatccagacctggaagtgtagactagagagagatagagtgttcctcgcaacacagagagaagagagaaagttaaaagagtggaagcaaaagtagtaatacaattgtaagaaagaagaagaattcaaagggaataccagctgatcttgtgacttggattcccttgtgttgtacctagatcaatctttgatatagtgtagaaagcttcttcatcttcctaggagagctcgcggggacgtaaccctaatttttggggtgaaccttgggaaattcgtgttattctttcctttgctttctatttgtaattattgtgtgtgaatcttcaagatcgatctagatcttgaagaacagtgcttcgtgttgtgtttctctcagaactcgaatgtttgtctgctaggttttttgaattgcgaggattggttttttgaatgttctagagtgattctttgtaacgtccttgcttcaagcttctattgggcccttacacccacggaaccatggctcttatacacgagtacgtca

SEQ ID NO: 299737 - DNA, 3457 bp, Cannabis indica
aaatagaatcacatgttagaggagaattcaaaaatcagggacaagcatctgtctaaataaactctcctaaagaactagtaccataagtagctagtgcgtgggcaacaatatttatgagaaatagcattacaagagccaccaccaacaactgttaataacaaaatatcataaagaataaatgaataagaatattatcactctagaactatcagcccaactcacaaccacaaaaaaatcacattcaactttagaaatagaaaagttaaaccgctatgcaaaagaaagatccaacggcaatgcaagcaactcggccacactcactgaaaaatgcctagccgcacccaccgcccaagctccctataccacacaaaggctatcccgaatcacacctccaagcccaacaaagcctctacttggtacaacatagaggcatctgtgcacaacaaaacaaattcaacagaggcaaaactcatcgtgtctccctctacaaaattgagccaccacccacctggaatagaccccgatgctccatctgctgaaactcctccaaagcattacaagccaacccatcaagcacatttagtcgcaagtgcaccccaccaaacaagactgaatttcagtcaaaccaaacacaccaaagcaccatgacaaagagctcaaaggaaaaactagtaaactcctcaaatagaaccactaaaagctcaggcaatgacctcgactgccaacgactaataacaaactagaagcccaacgtatactaaaccagaaccagcaaagagaagaaaacaaatgcatgctcaagagtgtcagtcgcttctccacacctcaaacaacaaagagaaacatgaacctttcttctaacaaactaggaagggactataacatagaatgatataatctccacacaaacactttcaccttagacagaattttcaaactccacaacccatatcaccaccacttacccttgacgaatttgattgctcattgtaaactttaaaagaccaagtaagagaatacccactattcataaagtaaatctcattcctatcatagtgccaacaacatctatcacctctcacaccattagctaatagaatactaagaataacatcaacatccattagtagaaaactattgcatagctccaccacatcccaaccaccactgacattgagatattcatgaaccactctattatcatctcgacgtgtagattttggcttgaaatatagcaagaccatggaagccacagatcttgaaaagcccttataagtctcctatcccaatccgaaagcctaagcccttacttcaaaagtttcatcccccacataagactagtccacaaatgagacaaagcattaatttttatcaatagagtcatgtatagaaccatgtggaaaatatttatgcttcaaaattctagctgcaagcgtatccaaaaactgtagtacacgccacacttgcttggccaccagtccttgattgaataaatgaaagtcttaaaatctggttccacctttcaccttagcccgacacacatactcttattccagccaagctattttctttttatctcccaaagaaccccactaaactgcaaaattattaacttcagcttatcgcaagtccatcgtggcgacttaaaaatgctcatcaagtacatcagagaaatagcttgtaaaatggccttgatgagtagtttctgcccgctagtggagaaaagactcatgtttcaaccccgcacctttgctgagcctcctcaaaaataccttcaaatgtcttctttttttttttttattctgccccactatagttggcaaccccaaatattggtcttgtgaaaccaccaaagttaatctcaatatctatattactgcatctttgtcagattgttgcacattaggactaaaattgatcgttggcttactaaaattaattttctgccccaatgcctcttcatacttttgtaaaatctttctaatagtctttgtatcatgagcattagttctcccaaatatcaagttgttatctgcaaagagcaaatgtgacacttgagaacctgatcttgaacatcgaaatctaaccaaatcagagttagcttctccttgcgtgatcaaagatgacaaagtctctgcagaaaataaaaataagtcgggagataaaggacactcctgacgcaatcccctgatagggactacatgtttcctaaggcgcccattaactacaaaaacatactcggtagtcgtcacataattcataataagcttaattcacccttctacaaatccaaacttccttatgtacactcttttataagtatgttttaagcattaattaaaacttatttaaaaaatttcaaaaattcataatcacactaaggtatatcattacattcattagaaatattatatatatatatgtcaatatcaaagtataagtggagtcttaagtattcatttatgtattttgaatataatttccttcattctagttttttcattgtctaaatcaattatttaatgtctattttcctttttgtccaatgccgaattcaattcatgttatgcatttattttggttctaattacaatttatggagataataatgaacatttagtatcaaatttataataacttaattaactagcatgtttgggatccattgtcatgatatatttttcaattatttatttatttatcgttataaattgacattaatgtattctcattaattattatgaaatgaaaatttaggttttttacaaccggccccctctaatatcactattgtattacaaatagtttattattatcatttattataaaaacattacacgctttaattttttacgagtatagaaactaaatattgagattttaccatgcatagactaaaaaaaatgattttacagaaagttttattcatggtttatttattactttttgagttaaaaaatgattaggaagtttgaagttagagtttcttgttcttaaatttatattttttttctggtcaggcatgcctattttctttgagataggtgcggcttagtcaagattgtgttttgctattacaatttaatttttactattgtgattagtcttgtttctgtgacatagttttgagtgttttagtcttgtctatgtgacatagttttgagtgctttagtcttgtttgtgtgacataattttgttttgttatttattcttctttgttcttcgatgactcgtcatcaaatcactattagtggttaggaataacaatttctctatgactgaaggggttattagtagtgcaattatgtaccttgtataatagttcaatgctcaagcaatgaggttaaatgaacttgttgtaacagtttttactgttgtgtcttctgagcagtagatgaaactgaataaaagtgttctaaaggttatctgtggtgctgcaatctttttatctgatttt

SEQ ID NO: 299738 - DNA, 2149 bp, Cannabis indica
aagtgaacaggaaataaaggaaagactaacacaaacgaaaacatctaaacagcaacaaactataaacaaaaacaaagatgcaaattagaaaataacacgatagaattcttcatagttgttcaacaggccagggggcacttctttaagatttagagaaaaatggattacttaactacttcaaagttgaagcaattctagcagtgcaatgttcttactccgaatcttcagaaggctcatcaaaggagcttatatcaagctggtatcgtagaattcccccaatgccaccataccctttacaaaactttgaaccttcttgtgatttatcagtaaccaactcaagcgagcaaccaaactgcttgtgctcattggctaaccactcaagcagagccatactttccacagtttccagttcagatgaagtggctaaatcccgaaaactactcggatcagtctcttgttctttgttcagtagcttcacaataatctcttcagtcagtctatttttcagaacatatctattcatatctaaactctcccatacaatgagtttttcaattgcgccaaattcaagaattttcattgtatcatccaaaccatagacgtatttttgagtgtcttgctcaacctgtttgaagaaattctccatcaacaaattctgttttatgaacttgacattggagagaatctcagaagacaactcaattgcttgattgaagccagtttcccctccatgagagatgtctaccaccttaagtatcttggctcgaatacgagggtcaaacgcaggacataaggtcggccttcaggtctgcagagccagcaagaacaagtccagccacattaggcatgttggtcttttgatcaataaacaattcagttgctttctctgcagttttggtcacatagttgtggcggctctccattctaagacggctgaatcgcaacgctgattgccctcctctaccatgtttcttaggaagatcaactgtggctctgtgaagcaccgccctagtgttgccactcaatgtcccaaaaaggtatccgcccccatccattattataaaaccaaaagtgtcatcagattccaagagatgacttagagcttctgtatggaaccttttgtcacaaatgtatagtgaagtattgataggcttgaaaggtacaatttcatgagttactttcttctccttcccatcttcagtgacagttgttccagtatacaaagcaagtccattaggaggaaccttgttgtagagcttaagcctctgttgggcggacttaatagctcccaacacagacagacgattcaccctgcttttgatttttgcagcattgccaaattcctcagcaagcaacttagtaagttgagatatttgatcactaggagatatgatgagagagatcatgcttgtgccgtttcctttagcagcttcaagtgatttcaccaatttcttcattctccaaatctcaatgtatttatcggtttcgttacattcagccattggaatatttgagaataacagaaccacaaatctaaatgacaaaacaaaataaagaattgtatcaatcacactatagcacatattcatagttcaaggttaatacacatcataggaaagttctgccgaaaacaagatcaataatcaaaagaatctccaacatatataaaaaaagtcaccaattgtaaagaagatccagatttaatatcaagaaatatgctccaaaacaatctaacattactagaatcaattcttatccaaaaaaagaaaaatatagttagaatcaatcaaaaggacaatacaactattagtcataatactcagatgtgaacaattagttagacacttaccgcctgtgatagtttacacagagtaaataatgtcacgttgattttgtggaaactaggtcaaaattaagttaattaacacttcctaacaacaacaacaaagaaaaaaaaatctaaaattgtcgcaaatttgttagggctaaaacaaatttgaacagttacacttacacccaaataatctatatatatatatatactaggtgattgttacgtgtcaagccacgtagtgttagttttatttaatattttagttttttattttaattaataattaaaatagtataattatttgaacgatttgtt

SEQ ID NO: 299739 - DNA, 1085 bp, Cannabis indica
ttgtcgttttttttttttttcaaaattaaagtcccgtcaaatatttaaaactaagttagaatattcttgttttatttgaaatagtttcttttaatgttagtcaactttcatgggttcgacctcgtacttgcatgaacattatattccgaaacgatttgtgcacttgcgagtataaatattaaaacattcacttttgggtacaacacatctctttctccttcagttctcacatcagttcctcatctcctcacataactctcttcttctcctatatttgtcttttgatctgaaattaagttagaatgagtaagaatgaacaaaataaaggattacgaaaggaccctgcttggaagtatagtgttgaaattgaagtgtcagagaaaatgatacaagtatttgaagtgcaacttttgtagtaaggttattaagggaagggtgaagagaatgaaataacatcttacttgcacacacaaagatgcagcaccgtgttctaaagtacctcaaaaagtcaaggatgagatgaaacaatatttgaaaaactttcaaaattcaaaatttgcagctcaaagaaattatgaggaaagtggattgtggagcttactttaacagtggtggtagtggtactggtaagccattcccatttcattcagtctattggacttcaacaactcatgttctagcagcactggtactactagaggtgttagaggacctatcgatcgatttatgaagacgaaaagagatgatgagatgattattggtgctacccaaaaaatgactctagcaggtgctaaagagcatcgaagttaggtttgtctagatattgggagattcttttttgagaatgagataccatttaattgtgcaagaaactcatcatattttaatatgttgcgtgtgttggattaaaatcctatgtgggcacatatgtataatgtatatgctattataaagtgtgatacaaaattaagtttccaattatattatgggtatcaaaagggtattaaagtgtcatggaattaatgtgtagataccataagttaatttataattgttgaggggccaaattataaatacccaaaact

SEQ ID NO: 299740 - DNA, 1015 bp, Cannabis indica
cgctaattttattagtaatcctaagcaggggattagggttttataagtattttcggtagtgtgcctaattacttagggcgttacattatatgtcaactcaaacttccttatataggagctgagcatataacctatcctatcctgcatacaacctacccctacatataatctcctagcactaaccttatctcttaatcaacttgttgatcgacaaagtagtatctcattcgtaattaaatacttcacccaagagtttttattaaaggtaataacccttccttttatacctttttattttatcaataattttcaggtggagtttgacaagaatggcaaagcttatggagtgacctcagaaggagaaactgcaaaatgtaaaaaagttgtttgtgatccttcatatctccctgacaaggtaagccttttttggccaaaatgaaacatctatagaagttattcatagtttatcatattgtgttgtgacttctggcttattgaaaatgcaagtttgtgttctgtggctcaacaggtgaagaaggttggaaaagttgctcgtgcaatatatgtattatgagtcataataagattatgtatcaattagtatatataccagttagtgttagtgtgttctgttagtatgctgctatggttgttaggttgttgtctgttatttgttatttccatttatattgttcctatttttatggtgttccttgatttgtggaattttgttttcatactctctgcttgcctatataaaggcttgattccttttgtatttttcattcaattcattcaataaagacacattattgttcttccctttcttccgcaatatggtatcagaacaaggaagatatacttccttttgatcctgatttccattgttcttcctcaccgtgttctttgttcaacttccccggcgacgttcgatgtctgcagttgaagaattcatttcttcaatcgacattcttctaggggtgttcatcaaaccgctcaaaccgcccgcaccgca

SEQ ID NO: 299741 - DNA, 5385 bp, Cannabis indica
caacctttcattccctaaaaccaaacattcactaaatttcaaatagcataatttttgtgtaaggaggttttcttttttttgaaccaaagaagtaaaagtgagttaaaatagtaattaaagatgtgggggacactctagtacttgtactattcttaccaacctactcaactagtgtactactactactacacactacattatagtaaacaaaaaaatgaaaagaaaaaaaaaaagagaaagagagaagttgaagccgtactcttctttctccatcactttttcatttattattattaataattttgatttaatatttaacccattacattaccacaccactaattttgactgcaaaatcaaaccaaaaacaaaataaaaggctctttctttctttcttcttcttcttcttcttatttagctttggagcttatattatgatcagaagaagaatctctcttacagtctcactcattattatggatatggttatgcttataatgttggtcccaacttcagatttctcttcaaactattaacaacaacaaaatctcacttccatttttaaccatggaatatgaaaggatccaaaagcctcaggtatctttcttttcttctttatttttgatttttgctttttttctcttcttccaatgctcattaatgtaaaaagaacaaagtgtcattttcaattttttatttttgtaattttcctttcttgaaagctgaaatctctgctactcccaccaccgttttgatcgaaatctctgccattttcaacctacattttgtactactacttctacttcattgataatatatactgtgttttgtttttatgcttgtgtgttgactgagttgaattgggttagggtggtggtggaggaggaggaggtggtggattttcgcctggaaagttgaggaacatgcttatgggagtagagaaacagaggaagaaagaagaagacctcattgaatcagccttcacattgagatctcaaccttttgatgttgatgaatctggtaaaacctttttctttattttgggtatttttttttgtgtattttcactatgacccctttatttgtttggtaagtttgggtttgtactcacttttttgaaattgtacccaccaccaataaagtaaagtgattcactgattttgaatgtttttgttttacaatacatcgtgtatcatatcatttattcattctctttaaaaagcaagataagcaaccaacattgggtatgcctcttttctcattcaaacacatgatatcttagatttgttttcttcattttcctaagctttctctgcaaccaaacagaagttgtatcatgtgtttgatataatcagtaagtagttgtgattgtgttttacaaacccaaatgaccaaactaactaactttggttttttattgaaagtaatgctagaaagaaagcatttttatttgtatttaatttttgttttgttttgttttgtaggtggcaatagttctgatacctgcaaagatgtagatgttgtgagtgttcttcctgacttctcaacctcagggacatctgattcgttaggcttggatatggttagtgatcgtagattgaaggataatagtacattagtaaattcaagagctagaaatcaacaagatccacctttagattatgattgtgggcaggatggaatgagcatttcctcatcaatctttgagtttcagaagggtgagaggacccaacaaagagttccccttgctcctttctccaagccagctccttcgaaatgggacgatgcccagaaatggatagcaagtcctacctctaaccggcctaagggagggcaggctggccagggagctggatcacgtaaggtgggtggtcttagctatgggagccggcaacagtctacaaagactgttgttgaagttccagatcaaagagtggtagcttccgaagaacctgatacgaaacagatggatacaaatcaaactaagatggaaagttggggtcaaaagcttctaccttgggaggctgactcatatcctactgcagattcgtatagcaagcctgtgctcatgatcgaaaactcagttggagaatcagcaagtaagacttttactgaattatttcagttcatgctgttgttttggtagtacttcactcttcttaagttagatgatcagtttttctatgaaagcttttcccattctacatcctgatgtttgttttcattttaaatcagtagtgaataagttgacatatcaatttggtgaagaagaatacttgataattatgtttgttgagaaaaatcatggtatgttggtaggaataattaatatttgattatagtcatatggtctatatccttgcattaaggatatgttgagttttaggtaaggtacttgttaatatttaagcaatttctatcttctgagagagaataacctttcatggaggatggttatttgatcttagagaagggaaacgagagtattacttatttaatcaatgaactagggttggttttataaaggtttcaggaacatttgattcattgataaggggattttcaaggttgatgatactcgtttctcattaatgtgctagttttgtccaaataaaatcagacttgattcattagatcctgaagggtggtgactcttttcttttttcatatggagtatttggattgagaaagagagcgatatcttggagagttcaaattaatttgtttgaacctctctctctctgtcacgagctaattttcactgacaaaaggctgttaaacgtcattgttaatttagttttattctccaagatcttgtttgtacctttattttctttctctattaattgtttggcttgtattcttaaaattcatcatggggttttttcatctttaacactactacataatatatactaggggaaaattgaaataactaattgtagtaccctacataactaacaaaatgccatgtaattctctcatcaaattcaactttcatgcacaattattcacagttgggctacaaaataataattttgatctaaattattgcaatcttcacttacatgtgctgttgttatgtgcagtcaatctcagccgtcatagctcatctgtagccatccagagtgcactgacatttattccacccccttcaacagctagatcagtatcaatgagagatatgggcacagaaatgacacctattgctagtcaagaaccttctcggactggaactcccgtgagggctacaacaccaagtcgcagcccaatttcttcacttccttctactccgggcagaacagcgctggagtcatcttcaactgatccaccgattgtcaatctggatcctaccaatggattgtctgagaaagagctgcaaataagaactaggagagaaattattgctcttggtacacagcttggtaaagcaaacattgctgcctgggctagcaaagaagatgaggataaagatgcatcctcttcattaaaaaacatagcagcagaacaacaagctcaaaatgttatagagacccgtgcaacggcatgggaggaagcagagaaagccaagtacatggccaggtgaattcatttccattggaatttgtcagttttcataaatgcgatgttctaagtttataccaagatatcttggttatccatgctgcaagctatgaatatcaataaaatagtttatttggaaatttcacatggcagcagaatcaactattatctaatctgatctttgaaagtgtactttggcaaaatgttgcacatggccaagtcaatctaatttctgatcttaaacaattttgtttgtgatcatttaccggaatgtgtgaatatgttacaacttgctttcaagttgatcatataaaaccaagtcgattttcagtaacttaatgttaggaatcagttgatgtccataatcgctgatgcttatcatatttgtagatagtgtgaactgatcttgactgcatttctcaggttcaaacgagaagagatgaaaattcaagcatgggaaaatcaccagaaagcaaaaacagaagctgagttgaggaaaattgaggtactgtacatatgtaaatgtatatgtatatgttcgtgtgtgtttgtgtcttagtaacaggggtaggagcggtcagcagaggaccgacatgcttaatctgcatcattacccatttgttcatgtttcaacatgtgtaatttactgagttcagggagtagggagaactaaaaacctatcatcctttggaatagctaactcaccctcataatatttcataagaacaacattatattcaaggattctgcttgactaattttttctttagttaatttttaatccttttttctttacatgctagaagattttctgtttgtttatgtatatttcttttaggtaaatatgtgactaacatccttttaatgatattcaccttacttacaacaatggttttcaggtagaagttgaaaaaatgcgagggcgagctcacgataagcttatgaacaagcttgcatctgcaaggcataaggccgaagaaaaacgagcagcagcagaagctaagagaagccagcaggctgcaaaaacagaacaacaagcagagtacattcgaagaactggtcgcgttccttccttattctactgttggaattggtgctcttgaactttattcctttcttgaagaggaattttcttttcaatgttttttttttgtcaacatcactgatactcttacatattgtctacacgagcatgtcaaaatgtttagctcaaaaccattccttgtttagaaaagttatgcttcttacaatattcaaatgaagtcttcttttgtacatagacctttggtttttgatagcaagcattatttctcttgcaagtttaagtactactattgttgattataatgctttgtgtgtaatatacctataagaataataataagataggagaaattatagcactatctaaataaatgttgttatttcaaaatttgtagatatatgatagtataaaaaaaatgagacaattaaagataaaaaaaaaaaaggataaattacgacataaatacttaatttttagattttatacacttaaatatcttatctttattttttaaggcaaaaatacttaatgttacaattcttttacgcatgaaactactattttcgtaaactcataaatatggacacgtggagagttcaaatgtgttgctttttaaccaaaaaaaaaaaaaacagttttcataacaattttcacatggtattggtatttcaatttgataactatgttccatatactgcactggttcacttagctatggtaatttagtattgcatctctctcattttttttttttttgaaacaagtagcatttagtt

SEQ ID NO: 299742 - DNA, 2380 bp, Cannabis indica
catcaaaactatatgagttgatgatttccaaaatcttggcatctgtaagatcggcatagcacccttgcttaaacaacagctcatgaagtttctgtgcagtctgatgtgtaaaagtagctgataggtctaaaaggagtggggaaaacaaaagtaagaaaaaaagtaagaaacgaaatgtaaaagatcataaataacactaagcccccttcccccttcttatactgttttcattctatttagaaaaaacctgtagtaatacctgatgtaacagaatcctgaggaccagattgcagaccagatccaactaaatttcttagcatttcttctttatgggtagcatactgtccatatgcagatagatcctctcgtaagccattaaatccatttatagattctacctctgacgaatcccatctcttccttgtgtgaaatccatttttatcttccccagcaccataatcaaaagcagctctaagtgtactaaggcactgtaaaactggcaccagagatccctgcaaacaatctcatcccattgataaccatgaacaaagctaagaggtgcaatgggaaggaccctattaattgcttgtcaaataatggttcgacattggaaatcaaattcaagtggaacttattgcgcatataaaattaacttgtgccctttaaaaaggcttaactaatttctcctagtgatttatagaaaggctaagcacaagagtcaaaatacaactttaacgcacaggttcaactttaagagtcgaaacacccactggcataggttcatttttaaggctgcagtgtcaatacgatactttttatccagcaacccagatactactgccatgaagtcagactaccacatatccagcaagatgcaacaacaaaacaaattattaataataataactgaaatggactttatgtacctgctctaggtctacaatttgaaagctcggcaaacctaattcctccacagctgccaaaaaccttttgacatttgtgacatctggataagaatttggtacctaaattgtaagaagaaaaaggaaaaaaaaatgaaccacaggaaatataaaattaggttgcatttccaaattcaccaaaaaaaaaaagaaaagaaagaaaaccacgcaacaaagtagtactcctaccatttcaagtgaaccaggacataatttagtcaaaacgctacataaaacagtgccatcaatcaaggatgccctcaattcttctgttgaggcctcaatgggcaagctcaggtgaggaagcaaataatttatccactccaacaaagatgatttctgatagcctaaatataaaatgagagtcaaatgtatagcatgaagaagcatttgaaatttaaatcaaaggggcatgcttcttgacacctacaaatgaaaaataagcttacaacaatcagagattacttaccttgagacatgtcaccaaaattttccatcattgcagaattttcatcatatgctccattttgaacattccatttttccatatttaccagcttgtggctggaaatggacgttcatacttcatgataaatcctacaagaatatcccccttccaaaatcaatcatagaaggaaaacagtccaccataggaaggataatgaacaaaatgtgaagacacaccaaagcaaggtgtcagaaacctctaatcgttacaaggctttacacatctgccatatgggccttatcatatcaaaccaatagcacaatgcccaacagaaaaaatcaatgctttataatatgtcattctgggccatcataattctaaccacacaaaaaatttacaagttttttcattggaatgtggttgtatgtttctgaacaacaatacaatagtacgtagaacaaattgcaacacaaaactcatagatgaataaatttacctgacattagcagctaagcttcgcaataacatttcaaaaccacatttacttacacgctaaagctcatacattgatacattttatcgtcctacattttcgttcaaacatttcttacactgaagcaaaaccccttttctttttcttttcaaatttttgtttacaaatgcttcaaagattccttctttaaatataaattttaagagaaaaaaaatcagaaatcaaccagttaaaagcccaatttcaaagaaccaaaaatttcaaaatccagaaatatgcaaagaatacgaaaacccagaaagctcaaatctcattcagagctaaagaatgccaatgcacaagctgcattgtaagtatatcgactcataaatagaaggaaaaagaaaaaacacgcaaagacacaaaaaccacaaactcaaacttgtattcagatccaaacaaatccaaaatacaaaattacaaggtttcgaaactttt

SEQ ID NO: 299743 - DNA, 1683 bp, Cannabis indica
ccataatcaaagccacggggaccggtaccatccctgctatcgcgatctctgtgggtgggacccttaagattccaacgacatcgtctgcaagaccgaacggcgaaagcattgaagtaaattccaaaaaacgacgtcgtaaggagtcaaatagtgagtttgttgatgtaagggacaaggcttcagtgtcttttgggctagctcctatagcaccaatggcgtacggggctagtgataatggggcacaaggactagtgcttgtgtggcaagttggaacaaataatgctgctggtgctgggcattttataatgttcccaaattctgggggaactgttcctggcatagcaaatcaaacccaatactgggcgtttcggtgtgcaaacgagacccatttcgaattttgtctcggccttgctggttcagctccgggacccacaagcatcggccgagtcagtttcaagcgttacacctacaactggggtcggtgggagtggttcgtctactatgggacctactttaagctcaagtagtgcagtagctacaactagcacaaatagtgataacaatggtgccgattctacgacaacaactcatatgttaaggggtttctctttagagatatacgacaagaaggaggtgccgcttatgggtcgttcacaacaaacttaacgctcaaagccttgacttgaatttttttttgttttacttttacattttttctcgttctttacgcccaagtccaacaactcccattaagcttaggtagtttcaaagttatgagttgttttgtattttagagtaactgagagttgtagatgtttcctattggttaatgcacaaagatctagaacaaattttccattctccattttctaatcttgggttgaagttcttttattcaaacttatcttttaccccattctcttcctcattgttgttctgaacatgtttaatcacatgaaatttcgttttcgattgcacgggattttaattttagtgctagttgccagtaagtttctcaattagtacctcacacgggggagatggggtcacgttaaaatgggttgtgcacgtgtgaggttaatggggtccactttgggcgcattaagtccccagcaaaagagaaataaaaagtaacgagtgaaggtaatctgtggcccatgccgaatgtgggccatgaggtgttgttggtcatgtgatggtgaggcacgtgtcccggtacgggtgggctcagttgtttcctttttttgcgtggtggtctcggaatacatcttttccaggttggctcacctcaactgacacgtggtgccgctcttagcttctttgtggggaccgtcaatgagttatgacacctggaatggttagtatctctttcagcaaatttaagtcagcagcaagtcaacgataaatagaggatggatcgaaggttgattagtcggtgattaatgattatgagttcggccttcgcaagaccttcacccagctattgggatcctcgggctgcaaagctattttggaaagggttattttaaaaaatatgagaaaaattattaaggttatgataaatatgacataaaaagtgaatgtcattaaatatggtattatctaaccaatcaaactaaaatatggtttttttttttaaaaaaaacccatataaaacattaaaaagaaatctgaatttaaaat

SEQ ID NO: 299744 - DNA, 3671 bp, Cannabis indica
ttagtttctaaaaatttcagtaaataaaatttaaacaaaatatatatagaccatataaagaagtttatttttcatttttatttctatattttggagccatctttattttactccattgagtgttttatattaatgtaatttctagttagttattgatgttatattggggatatttggttgagaataatgaaaatggaagatgaagaaaggaataaaaatgaaattgaataaaatttaatacaaggaaaaaaaaaataattggtttagtggaagagcctttcttcctatttttgaatggaattccaccatagtaataatttcattgactcattccattctaatgatattctaactatttaatttcattccatccttaaactttccctccctatctcaaccattcgagtatccctagtgatataattaatgtgagactattgtatagtatcattcattttctcaataaagtcttcacttgtttttattttcctttgtttattgtatgagcaaattatgtaaaatacgattttctcataggtataacattacatttccctttacatatgctcctttttttttacttgaattaaatccaaccatcgtattttcataaattttgcaacaaaataatataactcctaaacctacaaaagtgaaagagaatgaggtgcgaaatggtgaaaatgatatgggtcttggtgagcccaaacttcggctctaggaccattaatgtatgctctttattctttactttctcaaactgcacgcattcatggaccattttttttaataaatgaagagcttgtttgtaatgtcactcccactcccatatcctggcccattaactttagtgggcctaatcatatctctccatgcaaacgcaaagcatattgctttgagagagaaataaaaaaacgttgcttacaaaaacatttagtattgttctgcacattaagttgagttaagtcgtgtagttatcataaatattatagtatcacacagttttttaggtaaaaaaacgtttcaagtttgaatcccttctctaaaatttaaataaaaattaagcatagtttaggatgtagcaaaaaaaaaaagagactattgaataccaataccacatcctgaaaatcatttctttctttactattattcatcgccaattaaattaagaccaaaagaagttcatattatattttacaaattaatcatttccttttttaaatcatttttgcaaaaacaagttttattattatgaacaacacttgacacttaaatgttaaaggttaattggtgttagaaagactgttttgaaagtaatttatgtatatcttcatacaattactttctcttttttttttctttcttttttttttagtaaaaaatagggttcagtaacacggttactgcagtttcgtttgatagagctcaagatgaacaaaaggataaatagaatctacttgattttatttgcagggtcagtaggctcaatacattttttttctttccttttaaaaaaagaaaatgaaatccacatgtatctcttctttttacatgagggaatggtataagtaatctgtttttttgttaggttgaacacgaaatcaaaagaaagagtgagataataaatcaaagtaatcaaaccttggaaatagggaaagaaagaaagaaagaaagagaaatgagtcaggggattgagatagagagatctactttggggaggaggatcgctgaatggctttgcaatcactttttaaaccacaaaatattatttattttcttattttaatttcaaaaacagaacattcctaacgttaaaaagtggtctaatctaagactacattgcataaccctttcatgcctccacttttttttttccttaatctttttttgttgttattttctctaaaaacaaaagaaaaattgaaagtgaaactatacaaatagtggtttcatctaataatcaacatattataatgtgaaatgagaactcattgtaatttacaattgtgccctttcgattaaaattcaaatgggttggtgaaaaacatagtaaactgagccacaacggaattgttacaaacaacaaaatcaagaaccctttaaagtttaaacactaagaaaaaaaaaatatccaagaggaactttattcccattaatattcattcttgtactaacatagatagatgataaagaaaaaataaacataaaagttattgtaattaagactttgtgtgttttccaaaaaaaaaaaaaagaactttgtgtgtgtgttaatacatatatatatatttttcaattttaaatatatttttgaatttaattactaaaactctgtcaaatgatataaatgttaggtgagagaggctgagggagcacagcagagagtaatgggggagagaggtgctttgggaccttgactatgcttttcttgctcaataagatcttgtggggttggaagcccccaattctttagctataactttttttcacccctaaaaactaaaacatttgtattattcatcagcccttgaaaagaagcacttgttttgctggcttgtcatttttttttaaatgggggttattttatccctcagtttgaagccattctttgcttaaagaaaggttagcccaggaataaagccaaggacagttccagtaaacacgaagtattaaagttaaaaagcacactacacaaaataatatcaccagtatatgatctctagcagcgtatgagttggccataaatatttggtaataataatgataataagaagaagagaatattgttaagcagtaagcattgtaagtagcagaactgacaaccgacaataaccagtaataactctgcccaagagacacatctcaaacgagtagtcaccggtcacagccggttactttctacccacaaaatgtctagttttcgtactagttttctctgaattgtcccagttgggttttttcattgtactcttatggagaaagactgaataagacccatgccatgactttaaccactactactcacaatgaccacaaatataccattgtttcctctctgagtttgtttacaagtactgaatttgaataattcataagttgtcaaagagagaatcattggattttagatttgagactcggaagggtgttagcataagaaatgccttttggctaatttttcaaattaaacaacacatgcagttttataaagttttcaaaccgcacaagtaccgcatagaactcaaaccacaacacaaaaaatatgatatagtacaatgcgggtggtttacatctataatcaaactaaaaaataacgggtgattctacgatgcacccccttaaaagggatgtattgatgcacccttaacttatttcggcatctagaataaaattttagtctaatttttttttatattcatgtacattatagctatttaagatatcctacaaaattttgagaaattcggaataatttataatatagaaaacaatgttcaaacattcgattttacacgcgtataaaataaaatagtcacgagtgcaacacactgtttgaacatagttttcggcgtgttaaacttttccaaatttcttaaaattttgcaggatgtcttaaataactataacgtacatgaccataaaaaaaaattgactaaaaaattatctcggatgct

SEQ ID NO: 299745 - DNA, 2496 bp, Cannabis indica
ttttattgggtattcaagttttaatttgggtagtgtattgtattgagtagggtggtagccttggatcgttttctgaagagttagctcgacttctgcaacaatacgatgttgaggacgatgcaactagtccattaaaagaactcccacatcctaagcctgagcctgatcctgagcttaatcttgaaaactttgatgttggaaatttctcggcgtttgaactggtaaaagaaatacatattcctatcttgagtagatgttgtgctatatttgagcttgcttattatgattattatgttatatcacctccgcaatatgtaaatggtgattgatgggtgcttttctgtttttcaggactactttgataataaggaaccacaagatcatggttttcaaggatttcctgaacttaaaggatctggtttagattttcacgagacagtgccaaatgattcaaatttgattactggactggagcatcaacagtttgatatgtatcaagacttcagtcaagggcttattgttggagccaatagcataaatcagtgtggacaagatcctttacccaatgttcttcctgatatttcccctccaccctctgcattcatggggccaaaatgcgctctttgggactgttctaggcctgcacagggatcgaaatggtgccaggactattgcagtagttgtcattcagttttagccttaaatgaaggtgttccaggcatagctccagttttacggcctactggcatcggaatgaaggatagtccgctgttttctgctcttagtttgaagatacagggaaaggaggtgggaatcccagagtgtgaaggagctgctaatacaaaatgcccgtggaatgctcctggtaagtcgataacgtagagcatattttctttttaatcccctcttgctaaacagccattttggtactttatttcgtgacaatctcatgtgcatatctatttaaaccatgctgcttgatgctgtgatgctgtgatgcagttcactctttctgtttcctttattgttattgctccgatatagtttgcagtcacatggcctctttttcattttcttcaactaattgctctccttccatgttgcagaactgtttgatctttctctcctacagggtgagaaacttagagaatggctcttttttgataagcctagaaaggcatttgaaagtggaaatagaaaacagaggggattgccagattacaacgggcgtggttggcatgaatcaaggaagcaagtcatgaaggaatttgggggactgaagaggtcatattacatggatccacagccttcaacctctcatgaatggcatctatatgaatatgagatcaacaactacactacatgtgcattatatagattggagctcaaacttgttgaaggaaagagaagtccgaaaggaaaagggttgaatgattcacttgcggatctgcagaaaaagatgggaaggctcactgctgaggctcctatagatggtggaaattcttcaatgaccaaaattaatactactcaaaagtaatttagtaatttatttatactccttaaacgataaacagttcaagaggaaaattgaaatatttgtgtttccttttgaaaagtctcagtcctatatcaattcatctgcagatgagttctcatcactagagaattcatgtttggctactacagctgggctgtgtttggttagagaatggaagattttttaatgccaagcaaatcaggttagagctttgtcatctcatcgttgtgtagttgacactatgttggacttagctctaataagatactagggaatctagatgagagatggagagacatagtacagtaagatcataagcaaaacagcagttttaattgtaaattgattctaagtatgaacggtttattctgctttctccattgtcttttttatcatgtattggcatagaattttgttctctctcgtaaacaaacaattttcttgaattcttcaaggtagtcgatacacggtcaacctctcgcttcgtagtgatggagcttgattgatgaatttaggaagccaggaggggttgccgattccatagacagttctcttccaagacccatccaattgtctttgtcttgcttttggcaagtagtatgctctaaatatcagtccgactgtcatgaaagtcactgttgttttgattcctaaaggacgtaaaatcttgtgaatccattgaacaaaattgaagacgacaaactcgggttcgaggtctcataggagatgttcaacttggggttctgttctatccatgtctatcatgatgaatgggaataaggaagaagacatttcaatagtgatctcagcctcggcaggtatgccgacatgaggaacagtgatttggaagaactggcctttttggctagttgtagagtgcgagcaatggagttgtggccaaaagcaaaccaagggaacattatgaaggtccctccgtatcatactttcttgttgaggaa

SEQ ID NO: 299746 - DNA, 7866 bp, Cannabis indica
acaagtaagtaaaaaaataaagttattacttgacaaaaagaaaaaagaaaaattaaaaaaaaaaatagttttggttttttctttgcagtgattagtgaataatgtgagtagagccacatatgagggaagaacattacaaaagtacaaaaaaagaaatagaaaaatagagaaaaacaataaataaagttaagggagtgtcggttaactcacatggggtagttttgagattattagcactgttgaatatctttgtctgtggcatacatataaaaccaattaaaattaagaaagttgaacaatgttacatgatctacattaaaactgacataaaaattttatttttaatttttctttttatattaagaaaatatctagtggaaaagattttagtatatcacacatggggccaggggtgggactggtagtaaactgtactaaattaaacttgttgattacattattaattattattaatcttaattaagtaagtggtaagactctttgtgatttatctctttagaacacagatctgatttaaccaagaggttctgatgagatgataccaacattccaccacacacccacttccaccgtctttgcttttactgctctgcttcatctcttctctccttcagtttttgactggttttctaagacacagacaagttaggtgtgctttcttttctttctttgctttctctttcatattgactcaattttttttgctcatttcttgaactgacttcaatacacttctgctcccttgctataaaaactttcatcattcacaaatcgcagcaacaaaaaatctcaccttccagcattttttttcagctcacccccacccaaaattatatatcaaaatattctctcttaaagattgtatttttttggatgcatgttcagatgggtatatgaaagtattgagttttgtttttttctctgttataacaatttaattcccatcaactgccaaaagaaagaaaaccattgtcccttctttttctctctcaatgagatatttttagatgcattttgaggtgggtatgttaaagttttgagctttattctttcttatttttatattaaaaaaacttccaatattccattattgaaaagaagtgaagggagaaagccctatcttctagccgtccatataggactagaaagaaaatctctccaaacctttttctcactcgaagatacatttttcgatgcattttgagatgggtttgtggaactgttgagcttcattgttgtgttggttttgttcaagctattttggtgctctctctccaaaaagggatctggctgtcagagaaacgtgtattcataacctgtcttttctgtgattccaaaatctcatctgggtattgctgatctcaggagctctttaaccaaaaaaaaaggagttttggggattgttcccaatttgggcaagctttacatttttggttcagctacagctactgaaagtaataatgtctagaaagaaaatggcatctgggtatggtatgtgttatcccattgttggatttgcttcatgtatggttttcatctacatgtcgtttggtgacgtgaaggtgaagctcaatttcaacaaagcaccgaaattggacttcgtaggaaggaatggaactcagtttgtggttaatggtaaacctttttacattaatggctggaactcttactggttaatggaccacgctgtggatgaatacagtagatatcgggtcgggcaaatgttggaagccggatctaaaatgggtctcactgtgtgtcgtacttgggcctttaatgatggtacctacaatgccctccaaatgtcccctggtgtcttcaacgagcgagttttcaaggtatttccatggataatcgatctcctttctgggtttgtttttccatgtcaaatcttaaggatttgctttacattaaatcatacgatgatatttgagtcttaattgcaagaccccaaaatgaagaagaaaaaaaatatgtctttgctgtttaagtcattttcttttgccgatctcttgtttgatgtgagaggtaatcatgtttaattcggtattaaataatttatcagttttacttagtttactaattcgagttattagggtgtgggatacctgtttatgaatgctaatttaccgttagtggtaccacaaacattttcttctgtcttattcgatcttaatgtttaatgagtaccatttgtcaaaattataattgcactacttgcttttcatttgtactcgttttccatacgaagtttagctctagaataaatggttgagttggtttaatttggtccctaaactttgtagtaacctctttctttcctttttggtgttaagaaaattaattaactagctctaacagattaagaacttggtctgcaggctttggattatgtcattgcagaagctgggcaacgtggaatcaggctgcttcttgccctggttaataacttgcaagcttatggtggaaagactcaatatgtcaagtgggcatgggaagaagggcttggtttaagtgcttctaatgattccttcttcttcgacccgaccatccgtgattatttcaagaactatgtcaaggtacttatgtatgcagtcatctttttatgagtttgatcttaaatatatgctgtctcatcatggggccaacttatggtctcagttagctcttgctgactaagttttaagatattttttttttcatgtctttaatttgtttaatttttgggaaactagacaacaaatttgacacctgagagttaatttttaccatagtattagtcagaattggtataatggaatggagtaaaactgttaagcattccaaggacctaagtacttcaaacatggttgatattgcttttggcttttggacaatgaaagtctgtactcttacccgcaggccaggccctgggctaaggcgggctaggcccgtgcctagggcccacccaaacccaagactcaaaatttctatacagtatacttttatcttatgcagtaaaaaaaaatggtatcttttgtaaaattttacaaaataaaccaataataatacttaaactccactttagataacacaaaaaaaattcttgggtccaataatattcctggccgaccctgcttgccaatgattttgtagaacaaggatcaaaatttttagggtttttttactttttgcacttcaaaatagttttttttatatttttacgtaattctacatagaaacccctattgcaactagtagaacaacctaaatcgcaaccaaaaatcgtatagcaacctgcatagaaaccactttagaaactcaaactgtaaatttgataaaaaaaaaaaattaaaaaaatagtatatggggtaattctccaaatttttatacagtatacttttatcttatgcagtatggtatcttttgtaaaattttataaaataggcccaataataatacttaaactccactttaggtaacacaaaaaaactcttgggtccaataatatcccgggccgaccctgcttaccaatgattttgtagaacaaggatcaaaattttgttggcaagttagtttagcaagttgattgtgcaaactgatgaataataatcttgataacctggtgaagtaaatgtgtatttatattcatagtagaaattccgttaacgcatggctaaggtatagatacaatgccataattgttggaattcgatttctttgatgctaagtgtgcgtctcagaaagaatgaggtagatgcatgtgcttaaacttaatggatatgaaaatatgtgtggcaacattatgaatcttgtataattcactaataggcactaggtagtggtagtagcaattcaacatttatgacttacaaaagttaatttcttgaagttgaaactaatgaaaaccaaagaggaaaaactaacatcctgtagagctacttagcatggcatgtaacgaggttaactttgagaaaaatgaatcttttgttcctctagtgccccaattctgcactctactacaagtcactttttttttataatgaatatttatgtgtatataatgaaatatgattagttgaaaatatctgcccaataagtgtgtaatatttgggtggtgcaccatcacttatttattcgaaacactttgctaatatagaaattgcatttcaagaaaattgttttatgtgctataataatattgtctatttctgatttgtttttcttctctttttcagactatcctgacaagaaagaatactgtaaatggcatcagatacaaagatgatcccaccattttcggatgggagataatcaatgaaccacgttgcgtcacagatgcttctggtgacactctccaagtaagttgttaattcttggacttgccacttaacatgtataactgaggggcaatatctttcaagttgcttagaaatatgattttattaattgatttcatggcataaaacttcaggattggttagaagaaatgtctgctttcatcaaatcaattgacaatcgtcacctggtgaccataggacttgaaggattttatggtccaaaaagccctgagaagttgtctgtgaaccctgaagactgggcttcccggctgggagctgattttattcgaaactcccagattgccaacatcgactttgcgtctgttcacatataccctgatcagtggtaagcatagaatacaaatgaaactaaaatatgagaagatatggaaagaggggttttagtcaaatatgtgcattcatcatcatatgtcactattaatttttcttcatcattattattatgataggtttaagaaagttggatttgaagataaactgaaatacctctccaagtggatgctatctcacattgaagatggtaacaaagagctgaagaagccagtcgtgttctctgaattcggcttgtcaaacctgaacaaggatttcaagccggagcagcgggatatattttacaaagttatttacgacataatttacaaatctgccaagaaaggcgggtctggtgccggtgcgctgatctggcagtatttggttgatgggatggaggagtacaacgatgattttggaatggtaccatgggaagtgccttcattgcaaacattggtggtaaaacaatcatgcaggttgtcaaagttcgagggagtggctcaacaacagccggatttcaaagcctcttgtatgcaaaaacagtgatatttctgagtccattgagaggagggaaaaaaacgtttctttttttggggtgtggttatattaggtcattgatatggctttttacagtgttggaagataaaggggttcctcgtttttgtttcatatttattctactcactcgtacactatttgcactctcttatcaaaatccatacttagtcttatgtattgctagtggcttggtaaaaatatgatgctatgaattgtaaatgttatggcgtgtgtcatgttaaaaaaattacataatggctaactacagttcagccacaacaaaatgaaaaatagcagagagaaaccttttgaataataccttccacttgtgtaaaaaaaagtagcaaattataaaaagtggttgcatctgtactatattatgatctttggtcactcttggtaagtttgcttatcattataacatgactttaagtacattacactattgttaattaagccccaaccactgacaatggtctgtcatagattttcacaagtcaatgaattatgcagtgtagtttgcctctcattttctgcgcaagaatgcttctaccatctcgttctttagtgggtttgcatatcttgtcactagaccaaatgctacaacaaatctcagcagcatggataatataacacatccaatacttgggtcccaacaagctacattaaacattaggatttagtcaaatcatatccttacatgttattgtttattttggatagattgtaagtttatacctaaagattatcatttcaaaacaaaatggctaaaatgagaacaaactaagatgaatatatctaaatcattgaaaatctttatattgtaggcaaaagtaactcctgcaattttgactatacattactcaattttgaagcaaataaaacaaattcaaacatcaaatcactactagtataaacccattcccaaaagaaagaaaaaaaaatacaaattgaaatgaaataaattcatatattctcatcatgctagctcaactgagaatcattaaacttagatttcattacatatcaaaaaaaaaaaaggaaaaaactataaaaaagataatatatttcacaaggtaatgactacataaaccctagaatcgaaatcgagatcgagatctggagacttcattcctcatttctgtttagccaatcttggagaatttctggatctagtaaccggagatgattcacttcctccaccagatttcactttcgttgcagacccctttagcttcttgcccttggaactcaacttattcacctccttcacaatgtccatcacaatctcagttgcgggggcaacagaatcctccaagatcagtcgccgactcctcaatccatttgacccagaaccaccgtttctcagactccgtgacggagtttcgcaagctttctctttctcttcagccaccttatcaaagtcatcagtgagtttcttcaccagccgcctccttcgaaccttactgctcccaatttcctcatcttcacgattcatatcctcatcgatcaaatccatgaatctccgtcgtttggtcgcgatcggagcgggaggaggggactcatcgtcgtcaccggaagtatcgacaactttcttgcgcttaagcacaccaggatcggatccggttgtaggcgatttggaggcgaacttttcgttcttcttcgcgatcttctcacgctcggcgcggagctttgagacattcccttcgatccggccttggagacgcaggcgcttgtagcttaagccgcccatggaccaatgagcctcgttggcccaggagagaaatgggtccataaccgaaagcggtgggtcgacccgatggtcgtttagcttgacgtcggtgtaaatgcgagggcggggaaggctggtgccatagaacttgcctggacctagagataccaccattgacggtaggcgttaaagggtaggtagagagtttagggtttgttagagatatttttgagggagatgatgatgttgagagaggggtttataggggttggtttcccgctctgtgaataggcgggggtttgcttggcgcctttttggagtttggcgccacaactgaaaatggcctccacgctgttaacggacccatttttaggtttgtaatgggccatgccatttttaataatgagatttatagcacatttcaattaaaattatgagaattacttttcccaaatatatttgtatatgataacgatcagtttggtattatttttaattgtctgaaattgaaaataaaaaatatatatttgtgtttcttaacatttttttaattattcttttttgtttttaaattagaagtgaaaaatatttttcaaaaatcatgttctataaaattcttttcactttttaatattattgagaatcaaaattttgaaaaattaaaatttactttcaaattttttaaagagttttttttttagttaatatgttagacttcgaaccctatctacctagaccatggaacttgaatcccaacccaaacctcagatttggacccgaaccctcgccccatactcgaacttagacctagtctcgatcctggtcatggattcgaacccggtcccggacttggacttggactccagtctcggacccgacttaaataaaatcaataaatgaaaatga

SEQ ID NO: 299747 - DNA, 3486 bp, Cannabis indica
actccctaactgcttctgcccaagaagagatgatgctaactgtacaagttgctctggttgcagaccagcaatatcctgtagagatggtctgttatgttcagataccggaaaacctgaagctccgcttgttgagtaactggaatttgtttcttgcgtcgctcttgtcctgactggtggttgtcgctgaattatttcatcagcagcaccaacaagcgcttgagatgatacagttttagtgccagaaaatgagttctgcatatggggagaaggccagttctgcctaggatctccatgatgtggaaattcgtgcctgttttcaggaaaattgtccgatctactaccaacacgggatgaactagaaacagcaggtttcacatttccgggaaaatatttctgtgaattattagaattagaaggtgttgatggtttcggatatgatgcattcccaggaaatgacaacaaatttccatcttctctttcgtgttgtcggtgaaaaggacctgcattagaatcaggatgttctaacctcaagataacaccagagatactaagttttccaggtaccttcagtactttctctgagaaatttgatgggggcacaaggaacaaggttgtcttctcatctaacttggcaactgcagcacgttctttctcctccaaataatgcataaactcattgtaaaatccaatatcagaatcactctcagggacaaaaaagacaacccaggcatttgctgcttgataataatgctttgaaagcatgtctaacccagtcctggcagtgcaatctaaaaattcaggcctgcaacatgggatatgattaggaactaccttttgccttcataaaatatcaaatcctgctaatatgcaggctgaaacaacacgtaaaatttcccagaataagagtgagtgatcctgagagatatggaaaataccgacaaacaaatttagcctaaattcaagcataccagcttaatttttatttcacctaattttgggcaccatatcagatatatatttgtataatgatgtcaagactatatatccaatacaaaaaaatacatatattcatacatacatatatatatatatatatatatatagatggaggaacatgaaattctacccttcccatgaggcacatatacaagagaaagatgtgaaatattttttttgaaaagaaagatgtgaaatattaaatgcatgtaagtcatataatataatgatgatgaaacttggtgcatactttcgttaaggttaaacacattctaagcatcagccacataccacactcatctactcctagtataatttttgatgaggaatcaacagaaggagagattttactacttacaacataatgtcaaggacctttccaacaggaaagcatcgagctcgacagacaggtgttcctcccttagcaatagttccctcccatttccactcattaagagaaggaagacctgattcaggggtcaatcgtttctcttcaacagaattcaatagcaaagaaccagatcctagctgggggctgtcataagattctttccagtgattactcctttctctctgaggtggagcattcaaagtgcgatcatagctctgcttatcactgaaaggtccggcagcaaattttctatttgagcgatcagcttgggatgaatcagagaattgaccagggaaaacatgtctctcatgttcttggtccaagaaaggatattcaggaagctctttttctgatggataatatccagtctttaatttcttggctccatgagaataatgaacatcttctggcaagtcccatggttcttcatttaatgtacttgtctgctgaaacctctgatggaaatcatgtaaatggccacgtttacctcttggactattctgatattcgtacatatcttgagactgtgtaaattcaggacctacttccccaaatctcctctgctcggctatactatttccacccatccataaattaccctttctacttgaactatagggatcgaaatcaccagaatccaaattagagtaatgttgaggagatctagtgtatggatcaccagttgagttcccaaacttcctatcctgccaaaaatgttcagaagatccatggcgaccatttgacttaaattgcgaggatggagacatatttaaagaactccttccgttgtttgagccactttcactcttcgcaaaacaaatatgtacacgaggatttccgaatagtttaccatgaagagtatctttagcttcacaagctgatattacactcctgaatcgtacaaaagcataactacgacctggaaatgcagtaattttctcaatctcaccaaatggtgagaatgctctccttaaaattgtttcatctaccattagtgaagctggaaaccctacccataaaacaggactaggttctgcattcttatcatccatactagaatcgtcagcataaatttggtcagaacgagcatgacgagctctaaactccttctgtaaataaggagattctcttgctccagagtattgctcatctcggtactgagagcgatcttcatcatgtaatggtgccggtgacttatcctgtgataaaagttcttatcaacctaacagtaaaagaaatatttatagatcaaaccactctaacatgtttcgaatttttaaattaaaattgaaataaaatggaactagattctaacttcataaatttgtaacaaaaatgcacaaggtattctataaggataaagaaagatattaaactactttacatgtcatagttactatttcaagatgcaaaagatgtcttagattattagcagatgctttatctagcatacaagaaactgtagaatatgctaccctagctgttcctcagtggcaacaatgcaacattgggaccagcccaaggcacatatagtaagtgatgtgtttatcaaaactgtgtacaaggggatgctggcaataccaagtaagtcccaattaattccgcaacatattttgaagtttcaatgctctacaataggtggacattgagggaataaaggactcatctaaactattttgagaagggatgagacggatatagtgcaatttgtctagcgatgttcttcatgtcaaaagacaaatatttggccacaacttcagcaggactcctacaaccccgataaattttattgaaggattgcacaagttagatgggaggaatttcatcttagtgcaggtagagtaaattgagtaaaaatacccatttattgccatagaacatcctacacagcagcaactttggcagctatattcttatgagaagtaataagactttatggcatcccacaaacaattatctcagatcaggatagaacttttatgagcaagttctggaagtaactcttcaagttacacggacaaccctaaagattaatacaacttatcacccacaaacgatgggcaaagtaaggttgtgaaaagatgtgtcgatacctattt

SEQ ID NO: 299748 - DNA, 2609 bp, Cannabis indica
aaaaaaaaaattaattttgaacattttatgttttatgaataaagtttatttaatttcaaacttatgtgtgcaaagttaattaaataagacttcaacgctcatagtataactttgaaatcatgtttaaatatcttaattattttgactaaataatacataagtaattgtttggaatagtaacttatgtatgtttctataattaagtttaaaataaattaaaatatgattttaattctataatattaaacttagaaattaaatcacatttaattaaaagctttgaatgactattaaaacatatacatggatatgaaattctattccaatcatttatggttaatgattcattaaggtatcattagtagaaatataaatatttaattagaaatgtctaattaaataaaatcacatttaagcattcactagttgaatctatttagtgaaaattataactaattattcaaatcaatatgagatatgatttaaataaattaaaagtatttttaagtgcttagaatacatcgagattgagaataattgattgaagttgttcatgcaattaaatctcaataaagatgacaattaaaatgaggttaagtttgaagagtcaaaattaaatattaatagtcatgatcatcaattatattcaaaggtaataagtatttaagtaggagtattctactcattaaaataaataatttaagaaaactaaattgttcttaaatacaacaatcagtatttttaaatcaaatcaaacttccatggaactatacagatttcaatagatgagatttattgaaataaaagatataccaagaaggtttgaataaccaactaatttaaattagtaattgtatagacatatagaacatcaaagcctaatgagaaagaaattaatggaaaagttaatactttctaattttgaactatggagtcgaaatatgattattcaataatcatacattaacagtctcattaattattcaatacattaagatgatattgaatatgtatttttaataagttagaaactttaaccttattaaaattgatattgattatggtaaacaataacggtacatgtgatagttcaggaaaatattcattaagagaaggatgacttggttattgacttcataagatgaacatttgaattattatattttgatttgaattttgatgtggtttaattcaaacaatataataatgtagtaattattagatatcaaatatttttgagagaataaagtgattgatatctttaatgtataattactaataaatagtattactaaatatggatttaatactataataatggaaattttggatgttattaaggtattggataaataatttaaaagatattcaaaatatgaaatattagatttgaatataataattgcttagctattgaaatttagggatactagcataatgagattagacaagtaataaattttaaattataaattaagaagagtcttaattaaatgatcaaagacagtggacaaataaggagttgtcttattgagtgggagtattaagtatgcccgagagtatatttaaaagatcattcaataggtgaatctatttgcaacgagttgttagaatttaagattaagaaaatatttaatttaagaatatataaattatagtatcgtatcgtttgtgaaacgagaaataaatattcttattaattatgtgatcttaaataaaaaagtcacttaaatgtgacaatgatttaaaacgagaaaggatgtgaaatgaaatttttcattccaaacatctgacttgattagtcatgaaatttattgagttcattaattatcataattaaaagaatcaattagatgtggctaatggagggttttggattaatatatttaaaaataatagttttgaataaataaatatttaatattgagaatataaaatgatcaatcaaacaacatgaacctgaaagaaataaaagaatgaataaattaaatatactagaatcaaattttatatatttatccaatgatgatatgaaggtctctgaaatctagaactatagtatgtggagggtctcgttcatatgacttagcctgaatagtcgaatgggatacaacgtctataagagttatagaatatgtaaggagactctccacaagtgagagatttttgggatttatatcctaaaaataagtaattaatagataatatattttagaatatatgaaatacaattataagataaatgatatattaattatataattagttaaatatctaaaaatttcttatttatatggagaaggtacaatcttttgcatggtctgtaggagcccatgtgtgcatagggtcgtggcatctatcgagtccacaggcaacgaaaaattgatgcttggatggacaaataatatttgtttggatgaaaaccaaaagttaaactcaagaaaactagaaaacaaaacaaaacatgccaaacatggtccaaaaagattttctgcatggaccgctgatgcccatgtctgcatagggtcgtgacatctactgagtccacaagaaacgaaaaaaattggcgcttgcaaggctacataggatttgtttggatgaaaaccaaa

SEQ ID NO: 299749 - DNA, 1871 bp, Cannabis indica
tccaatgaacacccctaatgcttagtaggactcttcatattttaaaactactacttctcacttgtggtattttgacagtggttgttctagacacatgacaagggaaaaagattatcttgacaacattagaccaatgcattgtggagaagttactttcagtaacggtcttgttaaaaaagtcatatgaatgggactcttaattttgaaggtcttcctagactgaagaatgtcatattggttgaaggactaaaagttaatcttcttagcattagtcaaatttgtgattagggttatactgttagctttgatggtaacgattgttatgtttataatattcttgatgaaattgtcttgcaagggctcagatctagtgacaattgttacactctcaccacttatgctatttgtcattctaccattaataatactactgatttatgacatgaaaaactttgtcatattcatttcaaaaatctaaaaagattgtcaagtgcaagaattgttcgaagattacttaaattgggtaaggaatatgtgggaaaatgtggaccatgtcagcttggtaagcaactcaaaatttctcacaaaagtgttcctaatgtgaatacttccagagtcctcgaacttcttcacatggatctaatgggtccaatccaggttgaaagcttgtatggtaagagatttatttttgtgtgtgttgatgatttttcttgtttttcatgggtagactttctaagagaaaaatctgatacttttgaggcctttaaatctgtgtttgaaattaagagttgaaagagatcgcaatattggtaagattgttcgcattaggattgatcattgaaaagactttaaaaatactgtttatgatgagttttgtaaatctaatggtatttctcatgaattttttactcttaaaactcgtgaacaaaatagagtggttgaaagaaagaatcgaactctaacagaaattgctagagtaattttctgatcttcatgttttggagatactttagtgtcttggccatccaagaaacagacagtggtttcgagattaagcacaaagtcaaagtaaagagctttagctcatgtaacagctgagattatctggcttgagtctttactcagtgagattaagtttccattatccgcaacttttgtggtttggtgtgataacatgagtgcaagtgcattagctacaaatcaagtttaccatgcttgaacaaaactgaactcgatcttcactttgtaagagacagagtacagcagaaaaagcgcaacattcaatatgtgccttcctcaaatcaaattgtcgattgcttcaccaaagaattatctcactcaagatttcagtttctagttgacaagcttggtgtaacacaatcaccctctcgcttggggggtggtgttaagaaacctgtcattaagtaatatttacttagtatactaattactctgtattttctctatattggttgtttcactttgtagctgtgtaatgtggtcccaagcatgagtgtgtgtgtccgttggacaattctgttattccatcttttcatgtatgtggtcatagagtctgtatccgagagacaagtgtcctccttctaccttttgtactctgcatctttcctattaaaggatggccaatacctcaacatattcttgagctgagttttatcacttaaagcaaaaggttatgtttctctccataagaatgtacacgttaaaggctgaagattattaactgagaaattaacgtatctcattcagggccgcccttgaggtgagacgaaggaggcagccgccttaggcccccaccgctcagggccccattttaaaaaaaaaaattaaatataattagtaataaaataaat

SEQ ID NO: 299750 - DNA, 6038 bp, Cannabis indica
tttgagctattgtgcggattggattggatccaaaaaaatgaaatctgcacttagtgcggattggatgttgtttgacccaaaaagtgcggattggatcggatgaacatccctaggcaaaaccagctgaaaacaccttgaagattaatgtaaatagctgtcatttttttcaggaactgcaacttatagctttgcaggggtgattagggatgaaactgcgcattggtggaagcttttacctgctgtcggtcaggggtgttgcaacccgaaatggtggaagctttgggtgttaaggaggcactgagttgggttaaacggaaagattggaggaaggttgtcattgaaactgatagtcttactgtggtgcaagcgttacgtagctctattcctatggtttcatactttgggagtattatttctgattgtaagatgttgttaaatgacttgcgagatgtttatgtcaattttattagacgttatgcaaatagtgttgctcatttcttagctcgagcatcctatttagttgctgatcgtgttatcaggagtagtgatgttactccagattttaatcatgtaatcactatagattgcaattaataaagatgatgaattttttcaaaaaaataaataaataaaaaatttcaaaagtgaacttaatcttgtataaaaaaaaattatctagcatagataaaattattcttaatgatataaaagagttgtaagtttctattttgaaagatgtaattaactcactttaattaatagaaattgtctttttttattaaacataatggcaagaaggtaaatataatgaaagtagcggtcaaagttgggaaaacgtcttatttcgttggcttgttgtgccacgaagttcacgaagtctgcatttgggtgccagagtgtgagagagctcgcgctcgctcgcttctctctctaaaatagtcactttctctctctaaactctcttctatatatagcgagtgtacccaccccaacatgtgatcatctgcccacttcttctgcgattttgcagcactctctctctctctctaacaatcattttcttctctctctttctctctctaatactttgagcaagacgagagctcctgcctctgcgtcgataccgtatttggatctttgagtgacaaggagaaaagagaaaatggccaagaatgttggaattctcgctatggacatttacttcccccctagctgcgttcaacaggtgatcaatctacttatacgtacatatatgtttttgttaaagatttgaatcttcctctttagttactgacggaaaatatggaactttgattcatttttcgctacgaagattcgtatatgtatatgtgtgtgtgtgcgtgcatatttgatattgtaggataggagacagaaatagctcgggttatgtattacttgaaacttgaaattgagcttctagtgataattttgtattttttgtgtaaaaatattttggttctaaatgataattgaagtttttgtcgttgtacttttcttttctgttagttgttactattagatctgaaattgccgtgagattctattagtactaggtagtagggatgctttattttgtttattttattatgattaatagattcaatttcattttttgaaaataaatttttttggagtattaataattatggtttatttcgaccataatcattttgctttcgaataaatccttgatttattatttaagcagagaatgcgaagcttagattcatgattatcctctctatttttttttttattatttttttttaaaggtaaatgttaggttctttgaattaccaaatgtgtggatggtggactatctgataaaccaaagtatttgattgttgaacggattttcattatcgttttcttgctttttgctaaaaaggaagcattggaggctcatgatggagcaagcaaagggaaatacactattggtctcggacaagattgcatggccttttgttctgaagttgaagatgtcatctcaatgaggtaggagtatgtttttgtatgagcagtcaacggtgtccggttgtcttgagaataggagagagaactgatactcctttattcagatcaagcaccgaacttttttattgtgtgcatcagtcccctttatgggcacacctacatgcgaataaatttgtgctgttgtatttattattaacgttttgaatttgtcttctcagtttgacagtggttgagagcctacttgacaagtatgaaattgacccaaaacaaattggtcggttggaagttggcagtgaaactgtgatagacaagagcaaatcgattaaaacgttcctgatgcaaatctttgaggtattctttcaaaataaattctttttcttcccttttgggtggaaatgatattcttaggtttgtggcctaagattcataatttggaaggcatgctatagcatttgaacacatgtaaaagtgtgaattttttaatattttcttttctgaaatgaaagttgttggttcaaaggttctttttactcaattgtactttcagaaactcaactgccttgtaacaatctagtttatcaacttcttatcaaataaaagagatatgtttatcagctagtgtgagtggctcaagggcttaagtagctctaactaaattgggtgttttaggccactgatccctatctgaaaatcctggctattttatctttcactaatttaagattgctttgcaattttctaggtatagtagtctttttcagttggtttctgcacttggcattgttctcagttctgtagaacatttcacctttcttcctgttctttgggccctttactaaaagctgttttctcatgctaaacgagcaggcacatggcaatacagatattgagggtgtggactcatctaatgcatgctatgggggaactgcagctttattcaactgtgtcaattgggtggagagtagctcatgggatggacgctatgcgattgttgtgtgcacagacagtgcggtacacccttcttctttaatatttgccatattggacctactttgattagtatataagatataactttgtcaaatttttcacactttaatattagtcatggttcttggtcaaactgagaaggttgtagagaaaagacaatatctaagttataggttttgatacttttagttacaagtttctgttgtatgctttagtttggatgcatatcaagatggttcttatctttttcaattagaagttagacaaattccttttttttttaacttcttggatgcttaccaggtgtatgcagaagggccagcacggccaacgggtggagcagcagcgattgctttgctgataggtccggatgctccaattgcttttgaaagcaaatacagagctagccatatgtctcatgtctatgatttttacaagcctgaccttgcaagtgaatatccggtaattattctttatccaatttgggttcatgtgtctcagatatagagcagtcacattttcagatgttgattacttctcattcagtttgtgttattctatcagtatggtctaataattccatctatcgttaaacacgggtttaatatggtgagatttcttatttattgtgtttttttttggtaggttgttgacggaaagctttcacaaacttgttatcttgtggctcttgattcttgctacaaacagctgtgcaagaagtaagttctgtttgccaaactaaatttacttagttgatctcattttaaagactgctattagtcatattatttagatatcttactatctcacttttgtaggtacgagaaattggagggcaaacccttcacaatctctgatgctgagtattttgtttttcattctccgtataacaaggtaagttacattacgaaatgaagctacggtatcaaaatttttatctcatttcaaatcataccaaaaattccaaaatatttgagctaatagtatgtattcatctgctatataaactttgcagcttgtacaaaaaagttttgctcgtttggtatacaatgattccgtgagaaatgtcaggtaacttgtttgcttcgtcacattacttgcaaattattttaattttacattttccaggtgattgattttacttgtttctggttacagctccattgatgaagctggtaaagaaaagctagcaccatttgcaaccctatccagtgacgagagctaccaaagtcgtgatcttgaaaaggtccattgacaaaactataagaatgaaatttaccaatttattataaatcgttaattttcttcagtgtgctgatgattctcttaacaaaattaattgacaggcatcccagcaagtcgcaaagcccctatatgatgcgaaggtgcaaccaactactttgatacccaagcaagttggaaatatgtacactgcatctctttacgcagcatttgcatctcttattcacaacaaaagcagtgaattggtaagtcttgaaactatgactctgttcggctaaatttataagtagaaattttgacttatttttattgtttagataactattatatgtattttttttttttttcttttatatgaaaagtgagcgtttagatatcaattagaaaagagttttacaaactatctttcaataacttgcaggacgggaaacgagttatgatgttttcatacgggagtggcttaacctctacaatgttctcattgcaattccgtgaaggtcaacatccctttagcttggcaaacattgccactgtcatgaatgttggagggaagttgaagtcaagacatgaggtacttgttttgttatttcattttcttcattttttgccatgagcaaatgcagggcccggaaaatctaataaaaagcaagaaatcaaacaaaactttaatgaacatatgtactgttattgcaggtggagccagagaaatttattgaaactttgaagctgatggagcacaggtacggaggcaaggactttgttactaacaaggactgcagtcttcttgaacccggcacatactatctcacagaagtcgattccaagtaccggaggttctatgccaagaagcctgtggaagtttctggtggtgccaccaccgtggctaatggccattaagctcgtggtatagggctctgtgtttaagtagtgtcaggcatgtaatgaatgacatttgttttgtggtgttagatgtgtgtagtttcccaaataactttgcttatcttcgatttcacatatttaagggtggggggatttgattggttttagtttttcaatttagaatgatattgtcaagaaaacttttaccttttcatgaagcaaagaaaagagtatattatcttgttttacctaccatacaaatatttattttgattgaagattatatttccctcaaaatatgtataaataatttgtgattaacaagcagtaaggaacattgtgcatgtttttgagtaaattgtggcaaaattttcaataattttattttactagcaattaactctcaaaacttcaaaattacgatacttttagcaatttacaatttcttttcaaattttactgttaactgttatattggattgtctacatggatatagtattcacgtgacaaaatttattagtccacataaaattttattatttaattatttaaatattataaaatttatttcaaaaatcattataaattaaaaattaagattttaataaatagaaaaaattaaaataaaaactaaacaatcctataattttcttaaaaaaaaaaaaaaaaaaaagaaacaactagacaaaataattctaaggagtttacatctcttccacctccttctttctgcctaagtcatggcaatcatttttgttgcaaagctttgacttccacgatcagctaccaccgcaccaagccatcttcgactacgtccaactccaaccagtccccacgcttcgttccagtcactagccactaacgacgtgtccccactggtggcatttggtactctccaatcatgattgtaggtgaatgagtctttttgaat

SEQ ID NO: 299751 - DNA, 2250 bp, Cannabis indica
attaattaaaaaaaaaactgtttaaaaaaatattgaaagtgtttttttttttgtttttaaaattttgatttctaattataaaattgaaaagtaaaaacagttttatagaacatgtttttgaaaaatattttcacttttttacttttaaaaacaaaaaactgattaaaaaagtgttactaaacggcacctaaataaataaaggaaataaaagagtcaagattttgttaccaagtcttttagtcgaaactatagagagcatgggttctctttgtgctcttcattatttcgaagcacaataaatttaaaaaatgttattctttttatttatgccataattaatttattccttaaatttaaatattaagctttaattaaataatcatattaagataattattttcataaaaatattatttagattcttattattaatttttgacaacaaaatatcagattaataataaaacccttattctctatttcttctttcttttcaccacttagtggaatattctcaaaattaataaaacaacaatgtgaatatgaattgattaaataattaactactgtaacataatgttaaatattatcttaaatactgcagggatcatgggcccataaaatctagacttccaataaaatatatatttgaaatttaataaataaatttcctaacatattaatttatcataacttcactataaatttagaattgtacacctaatttatggaacgctttatataccagataaagatatattataaaattttctattatatcaatcaatgatcctctataaatagtctataattaatagggactaaaattacaattttataatttattatttcatataattaaaatacttagttgacttaatgatatttcagtaaattaatataattaatgaaataagcactctattgttaaatacttcaacttagctcaaagaaaactgtcgtttatctttcaatataggagctataaatgttcatatttatgattaacactccaactcaattatgttaccgagtttctaagatgtaagtataagttagaccttagggtaaactggtaacgataagtcaaagaactcgaacaacacaattagcttaaaacataactatctcaggatttagatcaaattgatctacgataaattaagtgatattgactacgaatatatacaatggtaacatccattcttctttcaatatcggtccaatccgatatagataatatattcgatacaagtctattttgcctatgtcttagaatagacataacacattgtcttagtataaatacattacgttagtgtaaaatcagtgtattgataaattaagatactaattatttgaatcatgtaattataaatatttttcctgcgatgacatcacaataaatataaataactatatgttttttttatcaagaaaaaaaataattcattaatcaaccaaccaatacaccctcaaacctcaccaaaatacaaaaccaggagagctcaccaagaagctccacaaaccaaaccgaactaattacaactcaatcttgtaaaaaatgttttctcctacactgtcgtcttcctatattttacaaagtataatcagtatactctttctatgtcttttgctatacaaaaatcaacctgagaatgaccctaaaaaatacttctatttttgttcagccagaggtggtataagacagtactcctcaatgttgcaaaactcatcattcctatcaaccctgaattaatagaaagccaagtggtccaaccctgaaaatccattaaccgatctctaaacctcggccaagcaaaaattaactcaactattctttgagacaaacaacacttaaaaatatgagaatggcactcatcaagaacaccacaaattcggggtaataaagaatccagagtaatattaaatctgatcatgatgcatctagtaagaagctgagaatttataacctgccacataatgaaccgatgcttcaggatactcaaactacacaataaatatatattttaaatttaatagaatttaattattaaacatataattatataaaacaaaatgagtgaactaaataattgattatatcataaatacttttcattttattaaattaagggaaaacagcggcataagtacccaaagttccatatttatatgacttaagtatccaaactttttttttagtggcaaaagtgcacaatgttcacttctgttagtatttgttagtac

SEQ ID NO: 299752 - DNA, 5372 bp, Cannabis indica
aatgaccgagaggtctaacttttccattaatatatttgttttcttcaaaaaaaaatattactttataaattaaaatatataaaacgcaatattgaactgcaccaataataatatagcacgttaagatgctctttagcatttctcaaaccacatacactttacattattctactttctccaccacaattcccaaattctaacaattacctaagtaaagttagagactttattcattctaaattataagcccttaacttttgtcgtttaccataaagttcaaagtttgcaactttatgatttattccaaaattatataaatcatggtagaggaaagcttaaaactttgagttaaaaatggtaaaagtagagactaaattagtagggtttgttggtttcactttcatcattgtgtttctctgagctttttatgctcagaaccagagagagagagagaaagagagagaaaacccatcaaagggagccctttcaatggagaaaggaagcagtgaaaagggtactatggatatatcatcatcttctaatgctggcaatttaaggcctaatgcaaacaccgccaccgacatagactcagctagaaagagcaaagaaattgttcagtacaatgtagatgctgggttacttgctgagtttgagagttctgattttaaaggtaagatttttaactatacaaaatcagttgttaatgctcctgaaagtgtaccagacgagcaaatttcagcttatttaactagaatgcaaaggggtggtcttatccaaccttttggttgtttgattgtaattgaagaacctagttttagaatcttaagttatagtgagaattgctgtgttgttttgggtttagatactcaattagtgttgagacagaaattgggtttgattggggttgatgctaaaactctgtttactcccacttctggtgtttcacttgtcaaagctgttgattctagggagatttctttactaaatcctatttgggtttattctagagctacccagaagcctttttatgctatacttcatagaattgatgtgggaattgtgattgatttggagcctgctcagtctggtgatccagcattgtcacttgctggagctgttcaatctcagaaactcgcggttagagctatttctaggctgcaggctctccccgggggagatatcgccgcgttgtgtgatactgttgttgaagatgttcagaagctaactggttatgatagagttatggtttataagtttcatgaagatggtcatggtgaagttatgtctgagattaggaggtctgatttagaacctttcttgggattacactatccttcaaccgatattccattagctgctcggtttttgtttaagcaaaatcgcactagaatcatttgtgactgtaatgccaaaccagttaggatcatacagagtgaagagctgagacaaccggtgtcattggtgaattctacactgcgccaaccacacggttgtcacacacagtacatggctaatatgaagtcaattgcatcattggcaatggcagttgttgtaaacaataatgaagcatcaacttcaaggctttgggggttggttgtgtgccaccacactacagctcgctatgttcctttcactcttcggtatgcttgtgagtttcttatgcaagcacttggatcgcagataaacatggagcttcagttggcagctcaaatagcagagaaacaaactctcagaacacagacattgctttgtgacatgcttctccgagatgctccctttgggattgtaacccaatctcctagtataaaggatctagtgaagtgtgaaggggcagcattgtactataagggttcgtgttggttacttggggtaactccaactgaatcacaagtaaaagatattgtggaatggctcagaacaaatcatggagaatccacggggctaagtacggatagtttggcagatgctggttaccctggtgctgcattgctcggtgatgctgtttgtggcatggctactgcaagaatcaacggaaatgattacttattttggttcaggtctcacattgctgaggaaattaagtggggaggagctaagcatcatccgaaagataaggatgacggtgaaaggatgcacccgagatcttcctttaaagcttttcttgaagtagtgaaaagtaaaagtttgccttggggggcttctgaaattgatgccattcattctctacagctcataatgagagactcatttaaggatatggatgggagtggtttcaaagcgagtaatagtcagcaaattgacaatacaaagatgcaagggatgcaagaactcagttctgtggcttgtgagatggttaaattgattgaaacagcaacagttcctatttttggagttgattcatctggtttaataaatggctggaatgagaaaattgctgagttggtgagcttacaagctaatgaagctatgggaaagtccttagtcgatgaccttgttcacgaggactcacttcacgttgttcgaaatattttaagcaaaggtttgcaaggtaactgttttattgtctttgtagtgaattgaacaattcaggacttctatcatttttgcttcaatatatcttggtgaaaataattgatttaatggtttcatcgtattcaggtgtggaagaagcaaatatagagttaaagatgagaaatttcggggctgagaacgcagacaatgttgtatatattgtggccaacacttgtacaagtagggattatgcgaagaatgtagtcggtgtgacttttgtgggtcaagatgtcacccgggagaaatttgttatggatagattcattcgcttgcaaggtgattacaaggcgatcatacagagtcttaatccattgattccaccgatatttgcatcggatgagaatgctcgctgttctgaatggaatgcagcaatggaaaagttgactggttggacacgggatgaagttatcggcagagtgctccttggagaaattttcggaaatttgtgtaggctagacaatcaagattcattgaccaagtttatgataactttgtataggggaatcagtggccaagatattgaaaagtttcctttggagtttcttgaccgaaacgagaagatggtaaaagtttttttgacagcaaacaagaggaccgatgctgttggcaatccaattggttgtttctgcttcttacagactgcatctgacccatatcaagcctcaaaattaatcaggaaaaaggaaagagatgatgtttcgaaacttaaagagttagcttacttaagacaagaaatgaagaatccattaaatggtattcgatttactcacaagctcttggaaagtacaggcatttcagaacatcagaagcaatttctcgaggctagtgatgcatgtgaaagacaaatcatgatgattgttgaaggaaatttaggaagcatagaagaagggtaagttagttttttcatcttaattagtgttaacattttttatgagttcattcaatacaatatctaacatattaccttggttgtggcagtactttggagcttaatatcgaagagtttcaattgggaaatgttttagatgctgttgttagtcaagtaatgctacttttgagggaaaagaagctgaagctatatcatgagatacccgaagaaatcaaatcgttatgtctgtatggcgattatattagactacagttagtcttgtcagatttccttctcaacattgtacgttacacaccaacatcgaaaggctgggtcgaaattaaaatttcctccggtttgaagattatacaagatggcaatgaattcattcgcttgcagttcaggttcgtttatctaattatttacaaaccatgagcctttctattttttagaaaatgagctgaaaacttaacatagagtatgatcaaaagtacaaatcaaatcaatactgaaatgactccagttggtctatatatagaagccaagacccaattagcttttgctaaaaattcttgagtcactttagttagtttttatagggttgggtgtagtgttagttgaataacattttgttattacttttagttgggacatgagttagataccaaactaactttgtgattctttttaagtacacacccaaccatttgagctagctgactgaaattgtgtttttgtaaacaatgtcatgtcggtcgggtaaaaactacaacttttcatggttcaaacaaactcgaatgataattattataataattatgtcgaaattgtgtggttgtgaatgtagaatgagtcatcctggtgaaggtattcctaatgctcttatccaagacatggttgagagtggaaagcactggacttcacaagaagggctcgggttaaacctttctcgaaaacttctcagtagaatgaatggacagatcaagtacattagagagaatgacaaatgttacttccttatcgacgtagaattcaaaacgaggaaagaacgacaatggggaggaggaatgagagtagatttaagcaggatgacttgaacttgaacttttcgaggaaaaaccgaatgcttctatcacgggtttgaaacgcctgatataacccggtaaatccccagtgttactaccagttttcatggctctactactatagcttttcctttatcaatgtatgtatgtatgtatgtaaactactttgacaaacttctgtatcaaaatgtacattccattccatctttgtattttttttttctttctcacaaaactaataaaaataagttttttgtttttagttccattccataatctttcataactatcttagctactatttatgctacaaatttcagggtctcaatcaatgcatagaggttgagaaaaacacttatttctgtttttgttctcaaatttttataattttacaagagaaatggacatgaaatgacttgttttcataataaaacttgaaagaagaaaccaatatctggcaataatgttccttaaatatatgtacttatggattcaaagatctaaatacattaaataaaaatgacaaaaagaaaaaagaaaacatatttctctcctccccccatttacaatttttttcaccccatgttaaattaccaatcctctcaaaaaaaaacaaatttatccacacatccatatgaacactgaatcagcaaataagaccataaaaaaaaaaaaaaagagaccaaaaggaagattagcattatgtccccaaagcatctgacaatttcaggagaaccagagctccatgttcccccgagtccaccgacgccgcaccatcaaaacgtaccgaagctcttctgtcagatgactaacagcaaaaaaagaaaagaaaaaaaaacggaacgtaa

SEQ ID NO: 299753 - DNA, 1734 bp, Cannabis indica
gaaattgatagagggttgaaaatggaactaaacccctaaaactcgtcggttttggtggccgggaatgctccaaccgatcgggtcacggaacgagtcgcgccgatccgacatgtcgggcaaacgacatgtcgtttatctatggtgaaattgtcgttttttaagtagaaaaacgacgtgtcgtttgggctttgttagccaaacgacatgtcgtttcgacttacctggaaggctttttttgagcagcaaaatgacgggtcgtttttgacctgcgacacgtcgtcctccacaaacgacatgttgtttttgaaaaacgacatgtcgttcctgcaattaaaaaaaaatatgtatgtgattgtttaacaatgatggcatcataaaacaaagaaccaattctaaaatattttaaggtgtttaatctctccaaagaatataatctgaaaaaatatgtgaacaaattttcggttcaggatttttttcttcccctatttattttttaaattgagataacgttttaataaaaggaacaaatatcagtttttgttattcaaggaataaaaaaaagaaacaaagaaaaggaaaggttttcatcattaaattcggaaaattaactcgggacttcttcactgaactattaataatcatatctttaagaagtcatacaaatctttctaaaaatagagtaagttgattagggacagaattataaacctattaaaagttgaaattgaacaaaaaaactgtgtacaccaatactcttaacaacatcaaacttaaatatccaacaatacaaatactaaacttcaaacgatttggctgcaagtctatacttccaaattgagaaaacacaaattttcaaacaaaaacattatcgtgtatttacaatctttcaatttaatttcttgtaaaaaaatatagaaacaaaaattggattggaaaaacaacctaaaatacaattcctctttcaagtaaaatcattgtaatacttttcaatggaaatgaagatttcaagacacacgcaaaaaaagaggaaagaaaaagcaaaataggagacacacacacagatatatacagagagagaatgagaaaaacagtgaaagaaacccattcgaaacacagcgtaccttctctaggtttccagcgaactggtgttttggtgaagttgcaatattggaagatgaagaagaagaagaggaagaagaaagacgaatcttatgatcgggagagctatcacagaaggaggcagatgcagaggtttggccatttcgtaaggaagctcctgcttcgacagcaatggaatcgtctttccaaataacttaatattaacagccgagtccttaaactgtgacattctcaaacaatgcccagatatttctgctttctttatctttctctgtgaattgtgtacttgtttctatgtctctacatggaaggaaggataaaaaattgaaattggtgcttgttggacttgagttggagttgtaaggtaatggagtttttgatgaaggagaaggcagtggtgtgatggtagtaataagaaggaagaataggtaaaaagcgtggagtttttatttaataataaatgaggtgggagtaccacgtcatcgaggaagggaaatgttgtgaggcacaagtttttattttggtggggaaatagatcttgtgaggagttggattcccttacattcgttaaaaagatttggacccatttttttcttccatgtcacctaaaagtac

SEQ ID NO: 299754 - DNA, 2491 bp, Cannabis indica
agagagagagagagagctagtgtagctaagagagcggcacagaagtttatggaggaaacaacatatatgaaacagcacacatatagaatagaatatattattattattattgaatatactacacaggatataagactctttataattatatatatagacagacagcaacaacactttgtcctttttatgagggtaaattgtaattttattttgttttatttttatatataataataaaaagagtatgcattcaggaatcctataaggattattactagaggactcattatcaagagtagtgtctctcagtgtcttgctagctcagttcatatttatttgtgttttttaaaaataaatcttattgtgtcatgctacataaaaatatgaatcttgttatatcacataaggcccggtatttttgtgtcatgttttgctcgtgtcgactcgtattttttaaataggctagtctatttttataccgggcttaattttatactttattttcctatattttttacaatgattaaattatgtttatatgttacgtactttagaataataatttatagataattatataaaaaaaataattaatataaatactcaaatttttatatcacactttataaatgaattgatatataatcttagtttttcacattttaattatattaattataaaaattataatattcttgtatttaagttttattattattttaactaatttataattgataaatttatatcttattattattaataataaaaattataaaatattttaagggtaaatactattttagatcttgtatttaacaaaaattatcaattagactctctatgttgttaaatgataaaatggactatgtattttttaaaattgtacgtacaaataagactatgaactgcttttctgtcaaaataaaacttaataatatctaatctagagatctcatgacaaaattggttagatttcatatatatgttcgtgtatattaaaaaataaaattgtttaaaattgaactcttgatcatttttactattagaaaatatatggtctattttgtcatttaacaaaacaaaatgtctaattggtaacttttacaaaacataaggtccaaaatggtatttacatatatttattttaatatgtcataccgtgctttttaagcttgtcgtgtatcatgctttttgggctatagtttattcgtgcttacgtgctgtgtttttcgtgcttacatgttgtgctttttgtacttcttgtgccgtacgtgttgtgttaaaaaatatatttttcgtagcgtgtcgtgttaatttgcagcatcgtgtcgtgtcgtgcccaagactgtattttttcgggtctagtcatgctcgtgcctttccgactcgtgctagtttcgtgtcgtgtcaaaattgcccaacgtattacaacactagtcaaaaagtgcctcgtgtttcgtctctactccggcaaggtcggcctgagatggatcctgagataggtgaaacatataaaataaaaataagtagtgccctaagcacaactctgactcacttgccgaatttcggttagttaatatctatatattgggtaataaaattatatattaaaaataagatatatgtgtagtgtaggatgtggtagtagtagggatatgggatattcttacacaatatattatgatacatgatgtggtggtggtgtgtagtgtgtgtgtggttggcatattctttggcatggatgcctttcgtttactgtgtgtgtagtgtgtactacttccacccccaattttacggtccacatgcattcactatatatttaaacaatattaatgtggatacgtacaagatttcattaatatgtcaacatttttaccaaagcgatattattacgtactgttgctgcataagcattcattgtttttcttcttattaatttcactaccgccttactcttttttccttttatttatttataaaatttacattattcattaaacttatgtatatctaaccctccaaaaaatgtaatatatcttaattagtaagttagttatgtgtgttgtgatgactaaaaaatgctaaaagtgctctctagaaagatgtgtgtttaagaggtgattaagaatgctaaattaatacactctatatttccatttctttgcactttttaaaatcaatgattcacacatgtaagtcagtagtttcgtaatccgtaaagagaaatattgggtaagctgtacaatcccacatcgtctgagaaaggtcaagtgagatgatttcgaaattgtataagtatggaactacacatttgaagagggcttaaatggagtgattggtactacctatatcaacaaggtacatcttgtttttcggcagcctatcatgaaagaaccccacagttaagcgtgtttgacctggggtaattcaggatgggtgacctcttgggaagttttcccaggaagtgtgcgagtgatgacaaagcacg

SEQ ID NO: 299755 - DNA, 2366 bp, Cannabis indica
ttctttctattccgcaataataccttatgtaattatgtatataaaaaattagtaatattaaaatttgataaaattttattacataattatcattaagtaaaagatataatttatttcatatatattaaaaaaattcaaacatccgttgagaagtgccggttatttattagtttttaaatttttttaaataataatattaagtataccaatatatatatgatacgtgtataatagtatatacataagtatccatgttagtaattaactgtaaaaaattgatattatcgtaaatttggtaacagctaaatagtttggagggttttaccactaaaatttaaacttatagaatatatattaagtgcaagtataatgataattgagagatttagcaaaaaaaaaaaataaaaattatataaatatatatatgattatgtatgcataaagtttgttatccatttattttttagaaatctctaatttatattcattgttcacttatatggtcgcagatgaattagttgctcgaatggggatgtggaataaatttaataatcttttttttttttctttttttcggatggtgagtttgattatacttttttaattaatttttggtttttaaaattaaaagagtgaaaatatctttcaaaattatgttccataacactgtttttatttttcaattttttaattaagaaaaaacacttttaaaattttttaattaatattttagactctgaccctaatttagactttggaaaccgaaccccgacccgatccaagatttggacccgcttctgatcccaacctccctggacccgatgtaaataaaatcaacaaataaaaatgaaaaataatgtttacagaatatatttttgttttttttgtttttaaaatttaaaaacaaaagtggttataaaacaatttttgtttttccaaaacaaaattttaaaaacaaaagtttttatgtgattaaaaaatttaaaaacaatagtaatatcaaaggtcactactattaagtgatctgattattcttaatgaatgttcattattattgaaaaaaaattatcattatcaaaaacataacaatataatagttgtctatgtgaacatgtataaagaaaaatgttactctgtgaaccgtacattagctatcaaaacaaaaatagaaataaaggaccatatatgatgagagaagcatctagatcgagcaggtaaatccagaaaattgaatcaaaatcataatacatcgaactaagtacacatatattttatggtgtgggagtctcattaattaattaaggctaggccggccagtgtattaggcattgatattattataataggccggttaaattgatcataattagagagtaattaatgaccactcatacataattagtacatataaaagatccaaaactctacttaatgaaaagacccaccttaagaaagtaattgatatagggcagaccagttaactaaccataaagggttttagtaaagtatatattttcccacacttttcaattcataatcaaaagtaaatattatgcatgcatgcatgaacgatataatatgatataattatataactatataaaatccaaaaacaggcgcaattcctaatttcgttttcgatcgatcttgatggtcaaaatattaatgtgctgaaacaacatcagtcgaagactccaatgttacaaaatctacctcttttttggcgtttgtagtaaacgtttgtttttggtggggtttatcaaactcagcatagatttatatgtaaatgcatgcacatatatataaatatattatatgccgcgttacatagggagtcggtaaaattagacccaactgtaaatggatataggttttaattaggaataattgggcagcaatagcatcaactaataataaaattgtccattaattcatgatcagttttgatttctctggtagaaaaaaaataccgaaaagttttgtcagtatatatattatgtataggcaaggtgttcaatatcgagggtcatgtggagtggatatctggaaacaaacagattttcaaggatttagattttgttgttgctatggtgggggagacatatgattcttataaatatatatatagtctatacttttaggctttgtattttttgtccctctttttcaaatcaaaacttcgacattacgtactactaattaattagctaggtgatcttatattatttctcaccccattgatgtaaaacagctaatcatcgccatctgtttaattaattaattagtggctgtcatagtacgtgattaatatatatatatatatatatatatatatatactagacaaaactacgtgcgagccacgta

SEQ ID NO: 299756 - DNA, 3602 bp, Cannabis indica
aaaccaacacaataaaagacagagatgataaacacaaaaaaccattttcagctccaaaaagttttaaaaacaaacagcatacacaccattagaaaaatactccatgtcatgaattaccttaagacgcagtacagcatccacagcaagtttaccaaaatgttccttatcctgtgaaagaattttagagctcaaagtagtcattgcaatcttcattaagtcagatttgaatttctctgcaaaattcaacaaattcatccttagaaaatgattgcagaaaatatgccccaaaacatttacaaaacccgattccaatttaaaaagccacataagaataacaaattatttcatagagttttgaaactttaattaagaatttgattatttcatagatgatccacaaaaaacaaataataacaaaagtacaggatagaaaagatagcattaccagaatcagccttgttatcaacaaccttcttcagcaaagcactacgagcacattcagatgccatccgaaaacctaaataaccaagatacagatttctaagtcacattctacaatttatcaaaagacaagaatcatccttacgtacaataaaaatcaatattacagatgttggtgaaatctttgtattacagaattataatacatgtcacactataaaatgaattagaatgcaaggatcatccatataaatataaaaacctgatatgatggtcatagggtgaatttttgcattaaccagcttttctgcttcccttaaaagctccccagccaaaacaacaacagaggttgtcccatcaccaacttcatcatcttgtacttttgaaatgtctgactcctatattaaggatcacaatacatatatagcaactatctattttcttcagtaaagttgatccacggtgtagtaaaagagaagttataactattaactagctaactttccgacacaattttttttccttcaacgaaaaaaatcatttaacaataagaaaaccttactaagcagaaaaactactgcataaaccaaatgcaaggataccaactaggactttagcagcagcattgtcaatgtgcagagactttaaaatggtagcaccatcattggtaacagtaacttcatgtcctctaccagttgattgtaaaattttgtcctgcacatggtattttaaaacaaatattagagttgggttcgtggaaacccataattataagcattctttaattaaaaatatgtaatgataattcgcttgtgaaggaaaaaaaaaatatgcttttaccatcccctttggccccaaggttgtcttgaccaagtcagcaattgccattgcaccaataaatgatgcctaaaataaaaacataagaaaacaaaaagtaaattagtaagagaaaagattgtaaaatatttatcttcatcattaaagtccacaagtacgaagtttagaatgttaaagtgaaaaaaaaaactaaactttattcagtacatacgcatttgccacaatataactaagcataacccaagcttacacttcaaatttaagttatcagcatataaatgaccattaatatactatgaatagcaaactcaccatcctggcccgctctcctttctcttcgcttgcttcatctttgaaaattctcccgatctggaatattatcatagaaattaagtacccaagaagaagaagaagaagaagaagaagaagaagaagaagaagaaaaatagttcttaaaggaaaattaacataccgtcatggatgagcaatgtatatttgctcaactcaaacctgaaagcaatagctaattagaaaatgtataaatgatcttctatgaaaacaaaagcaagcactaataatgaacttgatctatcaactgcttcaacttccatgttttcaatttcatgaggcaggtatattttttatataacaagagcatgaaacagaatttcttgtattaaaagactcacaattttctgttttaaggaaccaacaaaagatcaataatgagtatgttctaaaaaccgattaaaaactgagctgaaactttcttttttcaattctaatccaaatcataggtcagtttgtgatttcatgtttcgcagaaagtaccatattattaatttttatcaatttagaaaacttaagcctgattttctaagatctgattttctccaatcaggattggagcagcgcactagtcctagagttcttaaggtgaacactgcaaaaggcagtctaaatatcttatctataaaagatgaaaggtctatctatgttttgtgtgcttatagtatatatagtgtattgtatctatatactatatttgtgctgatgtcatatacaactaacagaagaaaaccaaaggacctaagagcataaaaccactcatacggaatggaaattaacaacaaaatacaaatcatatgatacattcttcaagacaagtatactcttctggttgatcaacaattgttacaatataaggtaactctgccatatatttatcccgaccatcttcctgtgagtctaatagttttcatttcccatcccctcgaaaacatgaaaacatttttcactcagcttagccctatctctctctccctacggatctataggaagtggaagatcctatttgcccaaatatctagtaacaaaatgctatgtgtgtccttcatctttatcacgatcatggcagcaaatcatataaaccaacatttctctctacatcaattgttatttcttgctaaaatgcacattttaagtagaaagaagctacagaagtatttttatcttattaaactttgaactttctaaacctcgttaggataaaggtcgcacattttcaacttcactaagctctaatctccttgctgacaataatactataacatttaaaagttaaaaatgtaaactcgcagattcagttcagttcaaagacaataaatttaaagtcacagatttctcaaatcagcaacaaaaaatcaaacaacaatgcaatattccctcaaacaacactcaaactcagatctgaaatcacaggaaaataaaataaaaatcgcatccaaagaagaagaagaaacaaaaccaatgcaatacaatacaatacaatacaataaatcactcacagtaggcggttgttggccggtgctacaggggactgagccgctgcaggacggcgaggttacggagctggaaagtgcaaagctatggtggttttgcttggttgttggttcgagtgagagtgagaaaggaagtaggggtttggttttgggagaaggtcggttacaatggaaatgaaatgaattagggtttttgttttttatattttttatttttgacaaattagatttagtagtaaatatgaaaaagtttaacaaaaacatgtataaagtaacgaggtccagttataggtcgaattgcttcggcccatttcagcaacaactcaaataagttactttttcgtaattactctaaaagacagcaaatttagaagtggtttttacaaaattactggattttggacaaaaatttataattttaccgtcacataatttcttacaaaaaaaatactattaattaagttagggaaatttacatatata

SEQ ID NO: 299757 - DNA, 1575 bp, Cannabis indica
tatatatatcatatatagacatcttggtagtatgtgaaacaagggtggttgaaggaaagggcttggttgatgcattaacaagctggagagaactggctactagaatgaggtgtatggtggaatgtttgatcttatctcggatgaagtgatagtctagttcaatatgttggtgcgtttgaggaaggtggggttgttggcaatataaatggcagattgattgtcacaatagatgaagtcaggtgagtcttagggaatttgagaatctttgagtgaacattgtagccatgtgatctcacaactagtagcagccaaggcacgatactctgcttcatcagagcttctagagatggtaggttgtttcttggtgcgccaagatatgagacagtcacctaaaaatatgcaaaaccctgtggttgaatgcctagtgatgggacaggaggcccaatccaaatttgagaagccacgaagatgcaaggatgaatttgttgagtagagaagctcatgtcttgtactgccttttaataacaaagtaggtgatgtaatgcttgcatatgtggtgttcgaggatgtgccataaactgtctaaaaatatttacaacataagtgatgtcaaatctcaatagggtaagatatagtaattgtcctataagttgatgataagaagaaggcttttcaaggggactgccttgtcggtcatctagtttgacacgagagtctattggcatcttttttggttcactgctaacatatcatgtgtcttcaatgagttgagtagtatatttgtgttgtgagagacagagaccctctagtgcgcgacctattttaaaacccaagaaatactttagtggtctgagagtcttgagtttgaaatgtttttggagggaactttgcaattgctgaagaagaataaggttaggccctgtgatgatgatgtcatccacatacactaataatacaatgaatgtgttgttggagcctttggtgaacaaggtgtagtcgacttgagattaggcgaatccttcatggatgagagcatcataaagcttttttgtaccactaccacatacactaaattatgtactttgcacaccatattggtatttgcacaatcagaagggggaagagtgagtccttgtggaatggtcatgtacactaactcatggagatctccattgaggaaagtattattaatatcaagttgtagaatggggcattatttaatggctgggattgcaagaagaagcttaaatgtgaccatcttggcaattagagacaaagttttaaagaagtataagctctcttgttgtgtgtatccttgagaaacgaagcacgctttgtatctttctatggatccgtcactattgtatttgattttatatatccaatgacacctgattgcactcttgtttggaggaagttttactattgtccaggttccatttctaagtgttgctccaaaatttgcccaaaatacgtggaccagtcaagaggggacacgtggatcagataacttggaaagatttgctaagtctttttatgccaccaggaagagctattagcatgggtcccggagga

SEQ ID NO: 299758 - DNA, 2061 bp, Cannabis indica
cacacgggtttttaattttttggcttttttcggcagcaggtcggggcgggtggccgggttttcaagtttgcgggtctaaatgttcagccctacccctaattactttagaattactagagaaattgtatctttagtttttctaaggatattggtgaggaatatactttaaattttgaaaatttatttatcttaattaatttggttttgtattgatatgtctgaggcgatacatttgtaatgtaatcattgatcttaaggaatctttgaattgcataacaaaagttttctccaccctaatcaattcacaagaccttatgactttaattttgtttaactaaacctaaagtcatcctaaccccgaacatacgatataatcatctcaaatttctcattacaaagaatttttatttcaaataaataattgcgattcacataaacattctagttggctgagaaaatacaaaatacaagaatcaaaactcaaagaaattcatgcaagaaagaggaaagaagatttactcattattcaaagtcgcgaggaagccgagatgtgaagtcccaaaaactcctgggatattagcacaaagactctgagaccgctccagagaaacttgaagaacaaagaatttttctctacaaaatttgaaatgaataaagggataaatgaagtatcaggtgactgtttataatggaaagaaagactaaaattccctcacaaacccaaaagcctcatcttttcattaaaagaaacatctttggaattcgtgtaaccgttagtcacgctttcccacgtgtaattttctatgcaagtaatgatgatagctgaaagatttgaaaagacttgaggggatccgcatcagactagtacaaaaccctaaagggtggattgcatgggaaaatatacgtgtcattaggacgtacaatgaagaagccaagacgtccatgtacaactagatgctcgtacgtggacttgggggaaaatgttatcctaaaaattactcgagtgacgtggcaagcaataagatgacacatggagttaaatggaaggcgagtcgtcacatgacgaagtaggaaggataatggttggacggaatgactggaagacagggaagtacaacgtactatgttagagttgttgaatcagctggtacaagtccaactcatctttcctactaattgcttgacctagtagatccaattggcatgcattggcgggatttatcactttggttgcgcgaggcaagatattagttgaatcatttgaccaacatgtttgacttattccagattagtgatccgtgaaatcagctcccaaatcccaaaagaccatgtctttatggttgcctaaaatcaagagattgaagaaataatcaatatatcatttattcacttgtaactctataaatagtggctcatttcactatttatgaggatcccaattcctattttcaaaaaggctacgatactactacaattatcatttgtaatcccttgaggaatattgagaaactcacttgattctgattttcgtgatcttgatattccaagatataaatacacaaaaaaaaaaagtatgttattaccatataattaaagtcgaatctctataaattactagttttatttttttaccttaaatcaattttcatatactattttatgtttttatttgactcaacgtcgttgatcaaaatttgggtcaacacctacaataaacactcccataataaaaaaatatgaaactataattaatttacatacctataataattatgtcgtattcatacgaaaataaggctactctaccacataactcccctaataactatgtaaattataatgagtattcaaggtacattcgaccccacacaccccaataccctctgtaccacatagctcctctcttcattatataaattattgtactaaattaacttattgaaattcttttagagaagctagaccttagagcaactttttattttgtactcacttctaaatgaattttttaaactaaaataaatttatggagaagaaagtaactagtattttttttttttt

SEQ ID NO: 299759 - DNA, 1500 bp, Cannabis indica
ttctttgaatgcactctcatcaagagctcaagctgtttatttactactgttgctgccgctggctactactgctcctgctgctgttgctgttttttgctgcgaagtttacaccaactacaaacattttctttttatatttttatttttgatggtcttaaaatttattttggaatttggatttttttacattgggaaaaatagtctttgaaaaaagagggggagtcaagaacgcaccatattcttgtaatgtttgttatggggttttgtttgtttggttttgattggttcaattttccatttagaagtagaaaaagacttgtcgagaaggacttcagacacagcaaaagaacattgtatgtatggttcgggcattgacttcctgtttaatggacttaaattccaaagtctttatttctctatattatttattaagttgtaaaaaataaatgggtgcaccctttccgtttcacccaaatttaagtatagggtttttgttttttgtgtgtgaacttttaaacaagtaggtcagaacttgaagttaaaagactctgagtttgtgtgtgtgtgtaggcccaagaaaaattgacagttgggatgattatttgtttaattttgacataaaagtagcaatgaaaattgtggccattacttcttattcgctcttttttaagtatcttatatagtacatgttcaaaactcatcaaacattaaattgatctgcatatttgcttgacacctttcggaggcaaattaaaagctttgccttttctttctttcaaatctgattagactgaaaatggtatttagatgatttagttcgattaagttaggcttttcttggtaaaggttgatgctctacctaccatctgttcatttttcttaatgaatggttttctgagtttatctcttgccatatctgactagtttattgatttaacttatgtgctctactaccaacttttagcaagtgtactaatgatattttctttttgtttgtttcgtttaaatatatgcatggtttatttttatagttgttggcccctatatgatgcacaaagagtttaaatttatagctaaattaggctcaattacaagttcaatgtaataactttttttagtaaacattcaaaaccctagtggctagtgtgatgaaacaaagatttaatttagaaattaaattaaattaaaggatacaaaaggtcacttatgtactgcatattgatcaaattttaatagttttaataagtaggaaaaaaaaaaaacaaaaaaataaaaaaaaaaaattagtgatttgtattctctctctctctctgctagggtttctcccttaaccttaactctagtcgccaccttatctgagtttttcggccaggccctaagatcaatatcggtcccatccaatgtatactccatacatccgataatagtaaactttgccaatgccctagaaatgacataacacttatccaagctgtaagtataccttatcgctgattatca

SEQ ID NO: 299760 - DNA, 2567 bp, Cannabis indica
ttggagcgtatggtatgtgaaccttacaaaataaatgtaaagtttctttcatatgaatgtatctagtttcagtgtttccaaccctaatggctgatctttttatttaaaaaaaaaaaaaaaaatggacacgaaattaaaaaacagtagaaacagaactctgtattaaccaatggaaaaagataccaagtaattggagcgtggttaactcagagttgaaaacatgaacctaaaaaaaattggacaaaatgaactagaaaaatgattccaactatctcttctttatcttttttttttgtcaggatcttagctatttaaatacatatataggccaaggatgagttatagctaaactacacagcatagttattgagcaaaatgattcaaaactattgcaaatttgccccttcagttgcattgtattcattttgaaaaagattgctaaaatagcactaatgtgatcctaatctagcacagtagaagatatcaggcaaaatataatgcataaataacgatctaataaaaaattgtcttcattcttagagctggtgtttgtatgtttagcgcgtcaatcaactggattttggccaacttaaacaaggtaaatagacgtactgcaactaaacttgtggcaatgggccacatcagcaaattgcttgaaaaatgaacgaaatataaagggacatttgcaatgatttgtatagttcaggaatatttttttcaaaaaaaaaatcaaggagcaaaactcttaaatagtcatagttcgggagaaaaaatcctacttattcaaaaaatattgttcattcaatgtcatcccttggattttatttcaaaggttgtgaattgagattattgatcataccatacagttaactacacaatatccttgtcatatagacacatacatacatgttaaaaaaaaacttttaacttgaactaatagaaaagttctgctggcaaaatttggagaaacttcttaaaaaatacaaaaggataagttgtaatcaactacactgtagtatagttattgtgccaaaaaaaaccctcagcctatacatatataggccaaggataagatgctcttgttaattacacaacattgttattatatcaaatagttgatacaaggttggactagatattattgaccatgccatattcttctcatatatatatatatatatatatatatatccacataaaaaaaaaatcctcagctaatactaatagaaaactgttgctggcaatttttgaagaaacttctaaaaaatacaaaatcccataaaagagcatgtaccttgcgcttcctgttatcaagaggttggacttcaatagcaaggtatgtatcaacatcatccgcagtgacaagataattgggttgctttgctcctgccagaaaaatgaaccacaattcatacacaagaagaattagggggaataatataaggaaaacgagaagtaccttcaatgtaattaacagatccatcttccaaatgacgtacccactaagtgcaaaaaagtaaaacattgtgagtttatatactagtatctaaatcaaaaactttcaaaagaaaattatttattgtaaatccagagagagaacaagagttatttctttaattgcagtgaaaaaaacttcacctcaaaattgcaactggttgttccattgattgaatagccacatgcttgaagctcgtgtcctggataagcctcgcctgaaatctggaggccatctattgccggtaaggggtcatcatctgcagctgtatgttataagacactaattaaaaagtagccaaacatggtatgatctacttaatatggagtaggctagtcacacatgcttcttctgtagccaataacaacaacaagatcagatcacataaatcctagcaataattaccctctgaaaatgaggaagaaggttcttctaaaactggtggcagataaggataagaggagctggggtcctcaagtgtagtcgtgtaaggagagtttcctgaagtccaattagccgatgtttctctctcattctggcttccttcagcaccttgctcatccatctcactgtggctcacagggtcacgaaatgtgacctgtttattggtggattcttcagtatactgaggaacatatgcatcaccatgacttaatggtatttgtgttggtatatcttgagctacagaagtcctacaaaatatagaaaacacatatcaagatacccagatttacatgataaaagaaatttatacacatcgcaagtaattacttacaaccaccaaaaatctctaaataccataatatatttgtattagtattattaaaaggaagacactaaaacaacaaagagaaatttcagcacagaggaaactaagctatttgttataaaaataaaacttaggtgctgtcaacaacggcagagctaatttagctgtagtaatatgttaggaatttcttggcactttagtacaaacagtaacgaatgaaggaaatagaaaatgatatattgatattagaagatgaaggaacaatggattgctgggtattcgagagacccagtgctctcccaa

SEQ ID NO: 299761 - DNA, 3074 bp, Cannabis indica
cctaataagtttatttaattttagaagattttgttttgaaagataattttataagatttcattgccataataaaattatttgtaggagctgttttactatttatttggtatataattattaaattatagatttttttcttccacggatacggggctgagtagtattgtgagaaagaaaacaacatatgatgatgaaaaatcccagaaattaggccatatataaaaaccaaaagacctttttttttcttcattaaggaaaaacactttgagatatcaaaaaccccaacgaagagaatactacaagcggtgaaaaatctaaaattgatgtgtagcataaggaaaacctcacacacatgacatttttatataacttcaactataaattattatatgatcttcaaatgctcataggacttcgtggatcatttagggctgcgatggcagtctcaattttgatcttcaaatgctctttctcatcttcatcagcctgtaagtgtataccataaaacaattcaaatttaaaatgaaaccaatcgataaaaacacgtgtacagatataattatagagaaacaaacattgcggggccatctcgatatatgcagtgcagtggataagaacgaccaacatgtaaaattactaaaataggcgtccgaatatgttgcaatataatacaatttagataaagtcaagtcatatatttatatataacagaacaaaactcattgaggaacgtgttgtggggaacaaaaaaataaaaattataatggtgtcacccaccaccacacgtattaggcatctctaataaaatgatataaatgtgctatatatatatttttagtctattttcgtaaaattaaattttaataatatataatgtaatttatatttaaatattaaatttaacacaaaatataatataaattatacactatatataatgtagtttatttattaatataattaataattttttatatttttatttttatatattttaaatacttcaaatttttttatagttttataaagtttttacacattccaattaaaataaaatttattttattccatttacattttgaaacataaatttaaaatttaagctcaatataacattaactcattttatttaacataaaatttacaccaattatagacatcaacaaattgaaccacgtacggtgagtaaaagacaattttagcctaattgacttttgcgatcatgtatctgtaaatagctttatagataactacaaatttcatccacgaaaataagaataacaactttgtttcttcctaaaattaacatgattacttttaaaaaatcattttcatatgaatattgtgggttaaattagaaaacacgagaatgcatatatttatataatcatcatatcatgttaaattattagtgataaaagtacgaagaatcaaaggaaaaaccgcgtgaaagggacacaaatgtataataacaatagtaataattcttattgagaatttgaagcacgtttttcataataaaaaacacactattccacgagcttctcatgtgttgtttttattataattttcccaccgataatacctggaaatacacaacatgtttccttggtatttctggcctcagtggtctgaagtctgaacaatatgagaaatgtgtttttgtattttataatctaaacgtagcaaataactatttatagcttgtttcgattttagaatgtttaaggaaaacatgtatgggggtggaaaacaatgactgatgtgtactcaaaaaggaaaaaaagaattgttgtgaaagtataatttttatggctaaagttgtcaaaagtatagtatatcatatcattgaccaatgtttatacaaaaaattctgagatttattttccacaaaagaatatatattcagacaatataattttatggctaattattgttgtatcattgaccaatatttatataaaaaattctgagaattgtttttgagaaaagaacatagattcttacatttactaatgctgaaatttgataacaagtaaagttggacttattattaagcttgctattcaagtctctaactagctatcatcaattacaaattaaaaagagttaatatctcaacaatatgtattacacaaattatgagatcatatgtaattaattattttcgacatatctcttctgcttatcctaatcattcaattttgtcaaatataggtacaacaaaatgttgccattattgtttgcatataattttacttgaagcttatgattctaatattggaaagttgtatctatgtttatatcttgttattataattaatgtttattaattgccattattattaatgtatatgttaaaattaatgttaacaagattattgtttttcacattcaaatagttttaatcgttatttctttatttaagtaattttgaaagattttgataaatttaaaataatttacaaaattagaaaaaaatttcaaactagttatttcacacatgtaaaaaacaaaagaggcatatatgtaatacaacaatggacgaagccaaaaaataatattagatgaggtcaatataataataactattaattaaaatttatttcaaaaaataaaaaataaaaaagacaaccgtaacacaaaaattaagtattagtattacttttttcctaaatatttaatatttgtatacattaatttaatgtgtaataaaatgataattatgtgcctttggaaattgaataattattagaaataattagcaaagtaatatgttaattttttatgtatattatttatataataaaattattagtttatatatattttatatgtatatacaagaaaaatgaggtgaggcaatgtttacaatgtattggaactacaaatttttttaccttaaagtcgcaataaaacttgtgactaaaagtgaaaaaattgtgactaattataaattattattcttatgttgtgactaaaagatccgtgactaaatgtatttgttacaatatttataatttgttgtgactaaatatatttttagtcacaatacttgttgtgactaaaacta

SEQ ID NO: 299762 - DNA, 3166 bp, Cannabis indica
aggagtgtgtttggctagtcaataaaaaaataatatttaacctttttcttagtttaatattttccttttgatagtgttaaaccaaacatggcccttgtgtcttatacaaaagtggggtaaaaattttcagcttactttttatcccactttttatttttctaagcataaaaaatgagataaaaggttccatttcttgtagtgacaaaatcgtgttctatagttacaaattatctatttctgtactgactttattgtacactgtttaattaattgattaattaaataataaatttgtaattataaaaaatggaatttcattggtgatctcatggtgtttaggggaggaatgaggatggagtgggagaaaagtaacaattcaaaggtaggaaaattagaataagttggctataatagaagataattttgatggagagagttgagatctacgatttgagactaactttgatggacaccctaaaaaaatgtaaaaaacttttgtaaatgtatatgtttttttttcttatagtaaaataggttgtaattatttaaaatatttttcaaaattttgaaatttttttataaatttatcaactacaacatttatgattatgaatttttgaatttttaatattttatatgatattttaaataactacaacgtacactattataaaaaaattaaacaatttttttaatgtccaaaataataaaaagtagcatcaatacacatttttctgaggtgcacactaaagtattgtatgataacaaactttggtttcaatagaataagaaagtccatgagatatttatattgagaccctcatcgacctcctccatcaatgatattaactctcttttatccccctcgagttcccctagtcttatttttgcgattttcatgaggccaattttcattttctgaaaaaaaaaaaaatcacacacaagaagatattcataataattctaaaatcaaacaagtacgtatccattcaaatataaaattaattaacaatagtcaatattatatgtaaattttatttagaagataacgttggcatcatcatgactattattttatacatgaaaaactataatgttaaaattagtcaaagtaacaagattattataatgaagtgtgaaaatcaatgaaatatataggttccttcctcacccatttattttaaatttagttttgtttaccttttccacatataatgctatatataagaaaggtctaaactcatgttaattgcaaaaaaaatgaagtactcaacattctctttttggtttctttgcaaaatattagtttcacttctctcattctctatccaaacttctcgagctaatccacatgacaactttcttcaatgcttctccaaacatatcaacaacaataacaataaatcaattgtaaaagtcatacacactccaaatgatccatcatatatctctgtcctaaattcaactatacaaaaccttagattcgcttctccatcaacaccaaaaccactagttatcatcacaccttcaaatacatcccatgtccaagcctgtgttttatgctccaagaaatatggcttgcagattcgaactcgaagcggtggccatgactttgagggtgcctcctatgtgtctaaagtcccatttgtgatattagatatgagaaatctacgttcaatcactgtagacgtagataccaaaactgcatgggttgaagctggagctaccattggtgaactttattataggattgctgagaaaaatgggaatctgagttttcctgctgggtactgtcgtactgttggggtaggtgggcatttcagtggaggaggctatggagcactgttgcgaaaatatggccttgcagctgataatatcattgatgctcacttagtcaacgcagatggagaattccttgaccgaaaatctatgggagaagatttgttttgggccatacgtggtggtggtggagcaagctttggaatcattctcgcttggaaaatcagattggttgcagttccatctaaagttactatgttctctgttagtaaaaacttggagatgaatgagactgtgaagatatataacaaatggcaaaatactgcttacaagtttgacaaagatttgttactctttgttagcttcatgactattaattctaccgattcacaagggaaatacaagacaactatacaagcttcattctcttctatatttcttggtagggttgagagtctcctcatattgatgcaaaagaaatttcctgagttgggaattgaaagaaaagattgcctcgaaaagagctggattgaaactgtcgtttactttgatggtttttcaagtggggatacaccagaatctttacttaatacaacatttcaacaaaatgtatttttcaaggtgaaattagactatgtaaagaagccagttccagaagttgtgatggtaaaacttttggagaagttatatgaagaagatgtaggtgtggggtttcttatgatgtacccttatggtggtaaaatggatgagatttcagaatcagcaattccattccctcatcgagctggatttatgtacaaaattttgtacttgtctgcatgggagaaagaaggagaaagtgaaaagcatatgaattgggtccgaagtgcatataatttcatgtctccttatgtgtctcaaaatccaagagctacatatctcaattatagggaccttgatttgggaacaaataacgagaagggtcctattagttactcacaagcaagtgtttggggtaaaaagtatttcggtatgaactttaagaggttagttaatgtgaaaaccaaggtcgatccaagtaatttctttagaaacgaacaaagcatcccaccacttctgtcgcgacgcctctaaatatttgtactgatataatataataatgaaaaattctacaattcacctttttaaaagggatgcatgtatcttatctattttgatatttgaagtaatattttagttaaatttatttttttatggttatgtacattataattatttaagatatcctgcaatattttaaaaaattcaaaaaaaatttaatacgctgaaaacagggttcactcattatgttgcacgcatgattattttattttgtacgcgtgtgaaatagattggttgaacactgttt

SEQ ID NO: 299763 - DNA, 702 bp, Cannabis indica
cttttgacaatgacaaatttttagttggaaggataattataatttacagaaagaaatatcgaatggagaataatgatttgattgagattttttatatttttcttttgagtgaagttataattattggattgaatgctgtgatgaatgataaagttttaggtagaagaagtgcaagtggaaaatattattaaaagatagaagaagaaaggaaaaagaaagtatgggaaagttagatgaaaaaaataatagttttctatgtacttgtcggcaagggtacgaggtttaaaagcctttgtggtgacgtggtcgcttcccctcctttcatactaaagtttttcatcttgtttctgtccttttgcccatccttttccctttatttacaatattacccttcctatttgttttccacacgtgttgattaacctagaccacacacaaagtgctatagagtgtggtttgtaaatttatactgggtgatgttgacaccctaaattggttaaggtgaattcatatcagttgttctttttatttgcaatatcatttggtaagggaaatttgacattacatgcttaaaaacagtatgtggtgttttaatatgctaggttaaaaaaagtaaaaaaataccctctaattaactttaatcccaatattaccctccccatttcaaaattacactctccctctaactctctctctctctct

SEQ ID NO: 299764 - DNA, 1397 bp, Cannabis indica
ttaaaaaggctaattaagatttttatcctctgaattttgacatataccaaattatgcccctgaatttaaaaggccgtaaaaaagcccccctgaactattgagattgttggatataaggacttttttccaatttcagtaaaaaaaaatctaacatggatgaaagttcagaaggcataatttagtacatgtcaaaatttaagggacatgatttggtcgatatcaaagtttgggagcataatttaatacataaacaatctttgaaatagtaaaactgaatgaaatttgacaaaagtccttacttaaatctaacaatttcaatagttcaggaaacatgatttggtacatgtcaaagttcaggggtaaaaatcttaattagctttttaaaaattcagttttggacagaattcctcgtttcttccaaaaaaaaaaaaaccaaaaaaattgtcgtcgacaatcgcagtaaataatctttttcttgaaaacatgataaacatcacattaataatcttagtttaaccatgttctttaaactaatcctttttgtttctcaccaacggtttaaagttgcagatatataattagtaaatatgtttattaatactttgtttacattactacttccacaaagcggggatagctcagttgggagagcgtcagactgaagatctgaaggtcgcgtgttcgatccacgctcaccgcactattatctttttttttccctataaattaacttcacaccttcatattttgcgtgtatatttacatgggcttatgaatttacttgttactatatcatttgtttttgttcacatgtcttgatgtgtttttagagattttatgatattattcttaaaatgacaccaaacatgaaaaatggagagaatttgcagagagagaaagagaatagaaatgtagttctacttctattaatcttttccatgtcctcttctttttttctttacttataataatgtctcatttcacctaccaaaatggaaaaacaagtcacacctattcgatataggaaatttctattgtggattcttacagtattggaacattcttttgactgttgatgaagatggtttttgaatgtatgaaccaattaatttatactgacacaaaataatataaaatattgttgggttctctctttgttgttaggcttggaccaataaaagctaaagcctatttataattaaaaagaaacaaaagaaaaaaaaaattgaaaaagctaagaggttgtttggcttcataactaaaaaacaaaaacatttctgttttttaaaattgaaaacagtttttaaaaactaattggggccgtttggcaaaattttttaaaaacaattttacaaaattgagttttaaaaactaaaaaaacagaaaacatcaaaatg

SEQ ID NO: 299765 - DNA, 4139 bp, Cannabis indica
cccacatactctgtaaaatcgaaccaacaaggggtcgctcaagctcccgtgcctgcataaacacatgacgaccattgcagctatattcgctcactgtctgcgtgttctttgttcttacagcgacaaccatatctttgaaagcaacagactggtgaaaccgatcaagcaacaagatcgaatgaaagtccatatcgaacacataaacaggaagaattctaccaaaatcctcctctgggattgctgccaccctcctgaactcctcagcagagtctgaaagtatttgatgcaaacgcttcgagtccaaatactcgttcacaatcatagtatagttatcaaagaggaaccttgatgtgtatgaattagtagacctagctatggcaaatgcacaaataggacactcattgtaattcactttataagtcctaaatctcaaagattgatcagctaacaacaacccattttcattgacctcatccataaaagttctctcaatagctttccaatccaaaccatttgaatcaccattctcagccccatatatatgtataaattgaacaatcaatgaattctcaaaagggacaggaattctcaaagaaggaacaagaagaacctggtaagcactccaaaccaaagatgacaagtccgcaagcaaagccttttgcgatttgggtctaccgtgcaacgctgctaatggatgaaactcgcctctaggaagaaccccatcacctgttagagccgggccataatcaaccggtccagcacccaaatcaatccagatatacctctcttttccagtccaaacactccccaaacactttgaataagcaggtgaggaatctccatggctatagctataagcataaggcttagactgtgctcctaaatctagaaaatataaataaaccccatgaacaggtttatccttttcaaagtcctgcttaatgatctggtcaatggaagagtaaggaactgaaattaaaggcgaacgaagactcgctggggttttggcgatctcagactgaatagtttgagatagctgcgaagccaaagaaggagaatgagaaacatcgagatggagagagtgcttaacggcgagtttgtgaaggagattatcaaagggagtgatgacatgaaaatgattcgagggttgtgaggcggagagaaaagactcgaggagagtatacgaagaggaaggaaaagagttacccacgagacggacatggatggagattgaaacggagagggaaagaagagaggagatgaggttatgggtcttgtgtgaaatcggagtggagtgagagagagactttttcaggaaggaagagagagacaggaaagagtcgttggaggcttgtgggtcgagacgcgattgctgcgagaggaaggagtctagccctataattggagaggcagctgagacagagctgattacgaagctggtggcgatcagaaccaagaggaggttcgtggcggtgccggccattttttgtcgccggtgccaattttcgggagatttgagtagtgagagagatcggagagagttgcagaaatggtttttaacgatttttttgagtttgtagctgttaagtgtgactcggccgagtcaggccgattcggatctgattgtgagcacgaaatagaaacagagtacctctcatctcattttctacctctaaattagttactagttactacttctactttttcttttgccattagttactacttctacttgtttattaatttttgtacaaaattcttacatttttcgttatatttagacaaatagcaatgttcctcctcacttaatatatttgtctaattttgtccctgcctttgattttgttgcaaaatcaccccttaaattatttatttattaatttgagataaccccctaaatttatttattatttagaaaatccctcaaattattattatttattgttggacaaattgatgagcataatcacattatgataataaagatacttccaccaccggggttgtggtcaaccaagaccctttaacccaaaagacctctcaatctctttttttctcttcctaagaaatattcttaacaatagatagtctaaggcactactttatttatttgcaagaaaaatagtttacaaatttattagaattttgttttatttctcaaataaaaaatttattcttaaaattttggccttaggctctataaaagctagaaacgaccatgcttccaactaatgattaatttactattagtgacaaaacacagagttaaacaaacaatgtgagtaaaaatacaaccaacaaatagataaacgagggaaaaaaaaaagtggattaacacactaaataatagtaatagtaataagaataataatatgaaagttttttttttatatttgaataaaatatgtctaattactattttgagttggattttttaaatttgaagtttttttactaagagtgtcaccgtcaaaactaaataagttgttatgtcaaaatgttgaagttatatggcttacgagttacgaggtacaatattagtcaataaagctcctacaactatgactaagcaaattacaggtggattacacactaaaattgaaaatgataaaaaattaatactattaagagtttcaattattagaaaaatattatgtgtgtaattaaaatttattgaaaaataagtgaaaaaaaaaacgtttttgccatttttttttacataaatttaaaatttattatttgaatttaatttttgtaaattaattttttttcttggaaaaaaatgcaaaatatctgctcaactaagaatttcccatagcgctaataaccattaatacatataaattgttaaaaagaattgctcattcttttttttaagaaaaaaaaattattcattttttcttttttaagaaaaaaaaattaattctccaacctggcaaaatactcacaatttacaaaaaactttcaaaaaaaaaatatcctttgaaaaagtaagatgaaattacattattttcaatagaacaacctctacaatttattgaatagttataattaatcacatatttaatattttattcatgctattcttatgtttttatacgtacgtacgtattccaaccaaaagtttccgtcaaacttcagatattttcaacacatttaccttagctaataaaaattgaatttaacaaaaaccaacaaaaggtacataacaaataaataaacaattaaaacatccccagtctcttattttttactttattttcttcccttaattataaaataatctttatttaatgattgttcatagataattcaacagtaaataaacaattaaaacatcctcagtctcttattttcatttttatttttggaaatttcacaatctccttaaaaaagactcattgataactagagtaccaaactctgaagcctaaaaattttaatcaaatctttgatttggttcaaacattggtgaaaaagcctgataaaaatccctaaaacgcataagcccataaccatgaccataactggcagttacaatacgagttttactcacagccaaagcagaacaaccattaggagcagcattttcaccctgatcaccatattcacatagtaatgaattagtttggatgccagtatttgcctcccaaacattgacaccagcatcttttcggccagcggtaacaactttgtactgatccatgtgtagcaaatttactggtccgcggtgtccatccaactcggctactggttttgaattttgctcagtatgatttcttctcacatcccacaacaatgccctgcaacatatcaacacattacattacaatgatacaagaacatgggttactctactcgttatcaactggttttgagatggtgtttttttttttcaatcttacttgtccttgctgcctgcacagattaagtattttgaaggaagagcttcaaatgagcatagccttgattcatgagttgctgcagtaatgacttttttcattgtccttaaatcaattacagtcacagaggtaccagaagcaatcaacagcattgtttcatgacacttcatgtttacaggaataccgggaactgaagtcattcccacacagcttgatgaatttgcagccgttgataca

SEQ ID NO: 299766 - DNA, 5245 bp, Cannabis indica
tgtaaaaaaaccgaccaaaccgaccgatgctcacccctaaaacagtatgtgagaaacaatgagagcatttcttgcaactcaacaacccttttaccaacgattttgcacaaacaaacttaccaacgaagagaacccctcaacgcaaattaggaaaagatagggggataaataaggatccctcgacgaattcctctctacttggggtaattggccccaaaacattgatgagtaatgttatacgtgacagatgaaacaaattagatttagttccagaaaactgaaaatctgaaaactagtcctactcacccgacccgagttcattatttgcgttcgtccaaaataacacaatgggtaaataagtaaaaaacaatggcaatctcagcaattaacgacctttttgaacgagtactctgtgaccaattaagaatgatgtaaacacctttagtttctttttttttcaactatgtttggtgttttccgtacaacacatttattaacattaaaataaaaaacttatgattgtgataattaaaattcctgtcgaatgtaacacatctattcagccccaaaaaaattaattgtgcaccacaatacatcttttatcaattaataatttgtgcctactattttattaaaaccaagtattcataccctttagccttaccaaccgttgtttgagtatgaacttgataaagcaataaaacatatgttccataatgaagcgctttccaataattagaaatttcaatactaaaatgaaatcgaaactttgtcctggtttaacaaaacatccaattctgagcaggacctaaactaaaaaaaagaacaaacataatattgttccactgcattactttccataattctcttcaaaattcgaagctacaaataatttccttcaatacttaccccacatttgtagctctccatttggcattacgtctactgatcagattaaacctgaaaaattttcgagggaaatttaagtaaccatgtaagagaaaaccattcctgatcaaaacccaccactacaatccctgaaccaaattcgaaccacctctaattatttcaaatgacaagtttataaatttcccctaataataataacttttggcatctccattcccccacaccatccttataactaccatgaacttggtcgagtaggatatgccattgtattgggacaaaatgagtgatatgtacagcaccatttgacttaattttacctggagagcaaggcaacttacctaaagttattccacgataccaaatcaaaatcgagtgtatgttttctcataatcttctcgtctctggtgttggaactcaccgaaatttccatgagcccttgaagggtagttttctgtttggtttgggtatctgttcattggctccaccggtacattgttcccaacatagcgagaatttgcattagaaccatcgtagttggaaaatcccccctgctgtttgtaaccagaataacctgaaggagagacttgctggcgtgattgcggttgttgctgttgttgtcgtgattgtgggtgttgttgttgtcgtgattgcggtggttgttgttgttgttgtcgtgattgtggttgctgtggttgttgttgttgttgttgttgtccccgcctctgtgcatcaagttgaagaaaatcctcccactgctttgcatgaattctcctcaaattacccagcttcttcatgtagttttctctcatctccgtaatagccttatatcataccgaagagccatagtcagatataattaatacagaacacagaagggtgtttcatatcacatgtttcctaaaactcacaccggtaaaataagcttaatgatagacttgagtacaatattaaatagcctgaatgctagttagaaatagaatcaaattaataaaccttcaaaaaaaattcaagatgtccagaaacaaaagtctacaatttttttggacatgtatctttccctaaactaagaaagccacaagttcccacaagaaatacagtttagtcacaagacaagcggtaatcagaaaagattttaaaataatgtgtgccacacaagcacgtgagagagatgaacgatttaatgacaaacactaagacaatttaaatttcacacattatatatccaagcctaaaggacaagtaaataataagactgaagttcatatcataataatgaaaaagaacttcagaagttgaatttttttagttcattatgtctggctacaccacaagttagctcatacctcgcgatgcttcttattttcgtcatcttcttccttgtctcgaatcttcacaagttccattgcctcctttttaaactccatctctaactcctctaatgtagggaaagctgggtgatcatactgaggaccagattgcatgtcaggtccttttctctcagaatgccatccatcagttctataagcacccatagtttgattacggccatcgtatgaaccatatgtgttgttgctcatgtaaggggattgtctaggagattttgaatggcttgaacggcccctagctccatcattaccataagcttcacgaaatgaagagtatgtttagcacttgattcaagatgctaactcagtttgtagcttaattcaacatactattttattcatagtgaaaccatccgatgcaaaaagtcgagaaatgctttcagtaattttcggagacaatccattcaattcaaacccactcacgaaagttacttcagaactgtacacataaagcttgaacataagaacttacctcttgctgcaaacaaacaataagcaagggcagcaacacgtttatgcactcaagaaggagaaaaatacacatatgaacacagaaaaatctgcaggaacctagtaagctatgagcatggaattaccagctttctatgcacgccgaaaacatatcctatcctgtccctaccttgtggagaattccttgggtacttctgcagattatcacgtatgtggtcttccagaagtttctcttgcctgtgaaacctctgttgaaactgaggcgcacttcgagtaacagagtgggatctttgagagtcagaccgctgtaaccgtgaccccacaggacttcgatcaggtgacctcgatctcgagacctgagaactagatgaagctctgcggtctccctcctctatcactttgcgcacagcatccacacctttcgctaagattaatctatccttgccactaacaataataaacttttcatccatcttaattttgcagccaatatccctttctattttgtttatcaccttctcactgaaaagtgccttgacatgtttttctcttgcaggtaccctttcaaagaaatcttgagacttccgatttgctccgagcgtagaaggacacccctttaaatgtatagcaataaaacaaaagcaatattaattatcttttaatatcagcatattatgttgagtatgtatgaaaaatatgagaacaacatttactgatgttatcacttcccaatcaaaatataaaatgcaagttcatgtataatcttatgaaaaatgcaattcatacaatttaaaacttactaacaaatcaaacagataagataacatacaactacgtgaataaattagcaattagttttgagtgaatccaacatattgtaataccagccaggtatgaaatcattcagcagttacctgagtaaagtgaccagattctccacaaattttacagatcatttcttcttccttccttttcttccaattcctctcggtagctttagactttgcttcccaaaccttagcttctcggctagtaaaatcagttggaacagcattggggtcacgagcttcctcttcctcatcagaacctgcatgagaccttttgtttgtctttgccctttcttgtgaattggtgacatttgatcctaaaggtcccgtgtactccttgtaaatgtcactaaaatcatcatcaatatcttggtcggatcttgttgccatctagcataaactcaaatccttcacaaacaaatacatacatgaactataaactgtgcttacttggtcaaaatttcaaatctagatacaattcttttgaacaaagttccaacaaatcatcttactgtttccataccctccctttatacttttaagctatatgcaaaaaagtacaacaaagtttgcaagaacaatactaccaaccagctttttagaaccttctacagttctacttacaccccaattttcaacgagtaaggtttactttacaagttagattaacacctctggagggaccgaccattgatcatatttctttgggtcggtacagcttggtagtaatgtaatagtttcattatcaaaaatgaagagcatttcccaccaaaatatcaatccattagcgcgactctagctagagagattgtaaatcccatgtgaatgtattactttatcatcatcgtaaattagtatttgattataaattcaatgaccaatagaattcaacagactaagcaatcaaaacaaaatgaaattatggaagttaactaatagtctaatactatgacaaaatggaatcattttagcgtacgagtttgaaagaaacagaagatattgcaggtgcacagctctcgcactaggagactagcaaagaactggttaccttcgtcggcaatcgcagctgggatgggcgaacgaacaagatttcgcggagagcagaactttgtcgacagtcgcggctgagtagggctatgctgggcggacgagacctcgcagattgcggaaactcgtcggcaaaagggagtggttcagcggcggacggtagaacttggtcgggcacccgctgaggtttgtttgtaagagcgaatgggattattggtagccctagcttttaatggatgaacacgcaatgcatgtatagcctctattattattattattaatgacaaataattatatcaaatttttttatcaattaatattgaataatatccaaattttatttgcaagttaactgctaattacttaattattaaccgtattttttagtatcaaatttagttttaatagatcaataaaaagtaatttgcggcaaaattacttaaatttaattctcagttgtaaataaatacttaaatgtaatttttgatgctggaacttttataggcagggacggacccattaagattgattatagccccactaacaaaaatattgaattttaaaaatttaaatgtaaattttataattttataattataggtc

SEQ ID NO: 299767 - DNA, 6408 bp, Cannabis indica
tgggctacactcaaattgagactttggacctatttcaaaaaaaaaaaaaaaaaaaaattgaagctttggaccatattaagattaattatacatgcattaatatataatttgagttttatcatagatagtcactcgagatgaaattaagtgatagtttttgttagttttctgatttggtgcactttgaggtgtttagttcttttaattcgagatagtgtactaattttggaaatggcaatgcacgtaatttttggtatatttcgtgatttttatagaatactagtttgtgtaatgtgtataagtataattgaagatcgcatgtatatcattattattattattgtaaatattaatcattcaacaaatacataaaaattaaattgaattaatataaagttaattggttgattaaaaaaattaattgaaaaacattatcaacttgaattatttgtatgaatgtgtttaagatagaaactcttaaataattattaaaatcattgatattatcttatattatattagatatgaaaaatataattttaaaacaatgcatgcaagacattgaaataaaggaaaaaattacacgttagaaaatgacaaaataagagcatccacgtgtcattttttcagttatatttaagttaatttttaaattaaaataaaaatttaatgacatgaaccaatcaatattgtcacgtggttattgacttgacacttatggtcagatacatacaaaagttctagaaatataaattaaggattattaaagtaaaaaattaaatttaaatatttatctgcaattagatttatattacaaattacttaattaaaaattacatatacttaaatattgacataataaagagttctttcatttaaaattagatagggtagaatattgttatcccaaatttcgcattgggtgacgtgttgttcatctaagtgacacgggaagcattttgagatctggataggtgattccatctttggcatgccgtctagggtgggttattcctcgaacaacttatttgaagaataagctgaaacatccggacaaggtaaatgacaccgtccgaccaacatcaatctcgtagcaagcccgcatacaccgacaaaggtaaatgcgactgaaatatctttagtgatacttgccttatttatttatcaattaaattcttatttactgggatttccacacgttattatggtaaaataggaaacattcctagtttcctttcttatttctcatttatctgggaaacctaattgatatatttctttcctataaatagtggagtcattccattatttaggaattcaaattttggtcttcaagagagctcttatgttgtaaaaattgtaagcttttgagagagatcaagaaactcaagtgtttcttttctcataagtaatacaagtaaaataggagtaggctattaccactgtcacgagattgaacttctataaatctttgtgttcttattgcttaatttcatttaataattatcatttattcttattgctttaattgactgagcatcgttggctaaaagcaaagttaacattttggtgctttcattgagagcaaaaagtatattgtttattgctttgatcccctccaaggatggttgtaactaccgagaggttccaaactaatgaaacaacgatgactacggatcctaatgtgcaaactcctgttaataagagtgatctaatggtggcaaattctgatctaagcaccagtctacctccacaagtttcaccatcagcaagatagggagtgacaacccctttggatgagttcactccgggcacacagtaaactagaaccaatagtactcataccagatagactggccagagtactagagatccatctgtcggagaacctcgagtggtgatcactgatgatactgagttgcaaaacctttgagatgccttagggaaaatggaagaacatatcgacacttttcaccatgatcatgaggatacctaagtagctgtgaatctggcatttgaacagcaaaattgccaattctaggagtggatgaatcaatagatggagattatgagagcccaacaagcagtgattgataatcgctcgagccaggtaaccatgctgatttagcgagcttatcagttaagtggacatcaatcagtggaagatactccacacatacgagatctgaattttattattcaagagagcttttatgctgttaaaattgtaagctttcgagagagatcaagaaagttaattgtttcttttctcataagtaatacaagtaaaaggcgagcaggctattatcactatcacgagggccgaatctctataaatctccatgttcttattgcttaatttcatttaataattatcatttatccttattgctttaattgactcaacgtcattggctaaaagcgaagtcaacaaatacaaaaagagaatattagtcaacaaagattcaaaatttaaattatcttattcttcatgtaaaagacaaaatattttatatttaaatacagaagacttactaaactacaaccaccgaaattgtaatgcctacacaagaaggtacgtaggaaaagtttcaatattactaaacgaaccatttgatgaatagtagtgcttattggctctttaaacatacataagatttatatatatttatatatatatgggataattctaacgtatggccataagtcaacaatagtaacaccagcatcaatagttttaatcacggcgtcagcaatctactttcttgcccgagatttcttgcctgggctttaaattccccatgaagactatttcccttaatcttcctactatgcagagagcgggggaggccaaaaatgccttcggaatcagcctgaggaggaaaggaggattctacaaacgagagctaacatgctctcaactgtgaagagggtcaagacttctgaaggcctctttgccaccgtctccactgagccaatggtagacattgatgctctagagaagcggttgacgcccaaggtggggagagaaactacactttttgttgttgaactcttataccaagtggctagtagcgtatccaagctgtccctagagacatatatgggcaacttgtagtagtgttgatgtgtttgtcttgacccatgccgctaaacaacaagtagtgggtgtaagttttgactcttccatccttgttcccactattgtatattattttcttacattttattattgtattaggcgaccttgatgccagagagggccattaaagaagtaggcacccttatcatggagcttgagcaggataatgttaagaatcaatagctgcatgtcgttaaccctactagttgagctttgggaagcaaaatatcaggttgttgtcgaggtggacaacgctaagaaggccaccgaggagagggtcaagagtgtgctggatgaaaatgaggatttgaagagggattttgaggacgtgaaaaaggaaaaggagttattggaggtcaattatggccggaaaactctcctcatgcaaggcatccacgtaattagtgatcattgtagggagaccatagagagaatgcaaagagaagcctcccgtcagccatctaacaacactcagagatttgaggcttgagcgaccaactgaggcggtgatttccctagggctgcgatccaaaacttcctagagcttcccaaggactggcatgcatgattctcgatctcaaccaaaaagtgagtgtgagtctcctccaattaggttctcttctctttttttttttttttgctttaattatggttttgtagaaacaatcttaaccttgccaacaaaatcagggtgcattattaaatttgatttataaaatactatcgagtggtattttttgaaagaaatgcttcgggagtttaagtttcctgacaagtttgtaaagttgataatgagctgtgttcggactcctaggttctcacttatgttcaacagttcactacatggttattttgaatcacaaagagatttgcggcaatggaatccaatgtctccactcctttttgttctcggaatgaagtatctctcaagaatcttgcaaagaattagtaccaagccagaatttaagtttcatgacaggtgtgcatacttgaaaataaatcatctgtgctttgcagatgatgttattttattttgtcatggtgattataaaagtatttattaccttctttaaggcctgaagcttttttctttcacttttgggattcaaccaaatcctacaaaatcagcaatctattattgtggtatgcaagatagagaggtacaacacattgttgatgcatcaagattcagcaagaaagaaatgtctttcaggtacctaggcatttctatttgttctaaaaggatatcaagcaaggagtgttcgatattagctaagaacatgacatctagaatcaaagcttggaccactaggaatttatcatttgtgggtcgagttttccttattaatttggtattgctctctattcactcttattggagtaaaattttgattttgccaaagaaaataattaataaaatagaagctatttttcgtgcttatctttggaaaggccatgatatgtttcaagaatcgagacttattgcttgggatttactttgccaatcaaagatggatggaggggctagttttaagaagattgcgaagtggaatcttttatcccttttaaagtatgtttggacagtggccaataaggaggaaaatttatgggttcattgggtacatatcgtatatatcaaagacaaaattagtagaattaccaatctccttcccatggtagttggtactagaaaaaattgattgttgtcaaagatcaattcaagaatcttgctaaaacacaacaactttttggagggaaatatcatatttctaaaggatataagctgttatgtccaagccaaaacagagtttgttggagccaggaagtgtggggaagacttaatgttcccaaccatagttttgtactgtgaatagccatacaaaatagattaagaacaaaggatagattgctgaaatttcacattattgcttatgcaaaatgtgttttctacaatacaatattgaaacagctgagcacatttttttccaatgttctttgtcattcaactgtcttcaacaagcaaaaacatggctgtcttggaaggccgaatcaaactagctgcataaacttactcggtagattgtaaaagttaaatgcagcaagtttcgcaagcaggtttttattgctgcaatggcagctttggtttatcgactttggcgagctagaaatgagattatgtggaattcaagtaatgacagggaaactcagattgtaaataagactaaaaataatgttaaagctagaattagttgtgtttggcctaagaaagtaaaagttatagatacaagttggttttccaagtcgtatttggatatacagtataaaaatcaaaagaagaaagaagagaaagaagtcgtacatgtacaatggcttttttttataggtcttcaattgagggggctatttgtttgtaaggatatttttagagtaatgaaaatttttctaattcataaaaaaaaaatcttaaccgtgccctaaccgcggggctatttgtggtaacttttgagacaatcgttttactcatgcatgcttactctatattcatgcttattattttgcttgcttgtgccgcttgatagattgcctttaggactttgcaaagatttttggttccaacggccaaaactttataaatgagaaattaaaccaaaacacgagcaataatgtaaattgtgacaccataatttaaagaggttcggcctcagtgttggtaaatagcctacttcccttgtattttattaatctttgttgtaggacaagaacacgctcttggatgaaaggattaaaaaagacagtgtttttgctatttgagtgataatttccagatcccctccttggctatgtgtgaccccttatataggggaagggttggtgcatctacttcaggagatgcgaccttagtgctaaaatatctcaatcgtttccttaatttttggaggtggatgaggtatcattcatgcagtagtatcccgctatttttgtgggtttgtaaccacttttgagctttatgtgggattggatgatattggaagagtgttggatgcatcaggctatgtggcggtactcccctagggtgcagcctgacccaccgaccttagggagggtggtactcacctcgtggtggtaaccctgtaacatctcctccatgctcatcgtgttctcttgagtacttactagtatatagtcttgataatttgagtaagtattgttggaaatattttaccaggatttagatttactaccaagtatgtttgattaacatccta

SEQ ID NO: 299768 - DNA, 785 bp, Cannabis indica
aaaataaatatataatatttatttataatatattaggattcaacttttgaataaaatatgtataaacaagttatataacccaaaatatttatatgaatttgaaccattgatataaaaattcatttattcaaaattgtaataccatatacaacatgatcatatgcaggtccaaaaccgttcaacagttgtaattccaactcttgatcactgatcacacatccaaatacactaagactatcacaaagggatttgattttgtcaacgtagtcaaaaatgagcaagttacctttctaaatattagagagttaactctttatctgatgaggtaatcgagcttttgattgcccagaaaacttcttttctagtgcacactagacctcatagaaagtagaatacgtagcaacagaacccaaaaaaaaaaacttttggaggatcgaatccaagttaaaagttgatctcgacgtttccattaaattcatgacaagcaatttttttgttgtaatatttaaagggatatttaattaaaaaatttatgttgtaaggtaaggttgttttctttatagtgggggtttggaatctttcaatatattagagtggattgcatatatattttcacataaatgattgttgatataggtacttagcagttagcatgcaaataatggtttagtgacataatatagagtgaaaattatatacgtactttttatatgtaaggaactttttcttcacaaccattttagaaagtggaaaaagaaaaagaaaagaaaaaaaaaaaaaaacaa

SEQ ID NO: 299769 - DNA, 1477 bp, Cannabis indica
tcatgtcttggcttttgaacttatttattagctcttctttgctccattcggcttgggctttcttgtacactaccactggtttcatcgtaaagtttctgggtgtgttcacttgtataaccatttttgttatatatatacaagtatattaactttggtaactgtttgattgagtatatatttgcacaatattaaaactggcctcttatagggatttatataggaccatccagtggtaataatgagagcaaaatatattacataaaataaagagtaatattatttgagattttgtgttttgtaaaagttataaattaaaattttatgttttattaaataataatttggactttgtaatttttaaaattgtacaaaataatactctattatttgtcaaaataatatttaataataacctaaactaattacatattttgtttatatattcgtgttagaaattagcttcatgttggttgtattttaaaaaaatcgataaaaatcgaactcaaaatattattttgtatcattttaaggtagtatttatcctaaatataaaatggtgataaggattcaaaataaatataaataagaattaataaatagaagatcacaaatgcctcattatcataaatagattacactcaaaacttaacaaataaatgtctagggttcctatatgcctactttcggaatcttaattaaatagttcttacaagttagttatgtattccgtgcatgtgagtttcattttagttatgaatttaaagtaattaattagcttaataacccaaatccatatcctgcgattgagtgatggatagagaaataatataatatgcttttgtttcatatatatacaaaagtaattaagaaaattaaattataaataaataaaaattactgtgtatatagctgagaatatgaaaaattaacatcatgatatttatcgactgccaaatgttagcctatttaagactcaaccagtatatcaaatgtatattgggaatatgttcaaatttttaattaattaaattgattgacagccactactaaaggttccaaaatgagtgcaattccccccaacttgtaaattttactttgcgattgttttttttggatatattaatgataagataaatttgtgacaaattgagtttccttttggcaacattattactcatgttggaaaataactataaaaaaaactaagtactactacaactttttactcacagcataaattttttgtgactaaataataactaaaatatagtctttagatacaagctatcactaatttagttttaatcacaacaaattataatttgggtaaataccattttagaccctgtattttgtaaaagttacagattggaccctgtattttattaaatgacaaaatggaccctgtattttttaaaataataaaaataggaccctgagcttaatttttaacaacttttttttaatacaaccaact

SEQ ID NO: 299770 - DNA, 3302 bp, Cannabis indica
tcttatctaagtttaatatcggtacagtttgatgtatgctccatgcatcccatactagtatactttaccaataccttggaaaggacatgccacttatcaaaggtgtaagtaaaatttatcgttgattatcacgccagtataaatccagtgcactgataaatcatgccacaaaactttgaagcatataattacaattattttccactgtgatgacatcactgtaattgtaaattactatatatgttatggacttttatcggaaattgtatattaaactataatcatgaaaataatatgttaactcaaatgacttctaatcttctattgatagcaatttgattatattaaaatgagttttatttatttagggtatatataaaatcccaacaatgcattcatcactgcaacaaaaatactaaaaaattgaactaaagacttactcagaagttgtttcagagtaagaagcaaaatattgggacaaggccatatggatgatgagatggggtcactaaagaagaataagacttggatagtagttcaaatacaaaagggaaaaatattaattggctgcaaatagatctataaacacaaatcaggttttagagttggggaaaggccaagggttaaggctagacttgaggcaaaagttttagccaacaagaaaaggaattgattttaatgaattttttgcacatgttgtgaaatacaagaaaataaggattatgttgtcttcggttcagtatgacttagaattggagcagatggatgtcacaactacattcttgcatggagacctagaagaaacaatatacatgaaacaacctgaaagttactaggaaagatagaccaggatcaagtttgtctcttgaagaaatttttgtatgggttgaaacaggccccacaacaatggaataaaatgttcaatgcctttatcactcaacatgggttcaaaagaagcaatatgtatgacacatatttatactacaaaggcaatgaaatgttacaggatgaatatctcctactttatgtatagatgagaaaggaaaagtcaaaggttgatggaaggaaaaaaattatgaaataagaatttgacataaaggatctaggggctgctagcaaaattctaataatcaatattcaaaggaacatgagtaaaaactagcgactacctagaaaaaggtgattgataagtttcaaatgagtggttctaataaggcaacaatgcctttgttaagctaatgttaaatatcaaataaacaatgcctaaacactgataaggacaagaaatagatgaaggagaagtgccatactcaaatgttatggggtctgtgatgtatgcgaggatttgtacaatactagacctagcatatgcaataattgtattgagtgggaagtctaggaaaacttcacttggttgcaataaagtggctactcaggtacattaatgtcacaacttagcttggattttgttttaagaagaatcaagacaagattcagatggaaggctttgtagatgcagattttttgagagacaaagattcaagaaaatcaactacatcttacacatttcttgtttttggtaattgtgtaagctagaaatctcaaatacaacatgtggttgctctatatcatccattgaatctaagtatatagttgtaacgaaagaacaaaaaaggagaactatggatacaaggtgcactagaaaaaaatgaacttgttcaaggaaaaggaaaatgtctatacaaacagtcaaaatgcactatacttgtgcagtaaacttatgtttcatgatcgaacaaaacacattgaaattaaatagcatttcataagagaaaaaataactcaagaacagatgaacactgagaaggtataaagtcgaaaattcaaatgatatgggtacaaaaatagttccacttagcaaattccaacacttattagaactgctaggtattgaggaaggttaagacagttaaagatctaaacaacgatttgagaaaggtttctttcacatggttttatttagtactaaggtagaatttgttgaaaataagtcctaactaaaatcatcacattaaaatgacatgaaaaacttagaccaatgggacaatgacactttagcattgacttagacattcagttaagttagtttgttaaccaattttaatttgtaaatgcttaccaacttgtggtagcctatatagagtcctagtcttttatcacttcgtacacagaaaacagagagagaaaaagagaagggagattaatgtatggtgaggttagattacttagtttgagaaagggaaatctgagagttttgaggaaccaaatcgagaatctaagtgaagaagaagatcattcttcaaggtgattccaagggtgttcatctctggtttaagactcattccaaggggagttaaacatcttcttaattctcaaattctttaattgtccattgttttgtaatatttgtcattgccatagtaaagggaattcaaaaaaaattaggctctccaaatttgtgaaggaagttttaacctctctaaatttgtgtgttgtttaaattctatcattttgcaaaatttcttgcaaatcaattattgttgatttcaggtttggttatttgtgttttatgcttgctgaaattgttgttgaactcatcaccacatgattatatattgataggccttatttagggtgcattattagatatattctatctttttgtaattagtttagtgatttttttttacttattgtcttcaaattgctaatagtgtggctcattttttagcaagacttattctgttttttaaaggattattttgtgtggtggaattaggctacctttgtattattagctcatggcatgcagactcttattgaggcccattttcctcttgagatttgtctcattaggtttactcaagattttaagatcgttctctcaaaatatatatattaaaattatctaaatctcaaaaaaaaataaaaaaaaaataaaaaaaaaatagaacacaaaaaatgtacccgtagaaacataccctattatgtatcagtatcacatagaacatacttataatatatgtgcataattaacacatataataattagctgttatttattattattattattaataatttgcctggttttttttttttttttaggtatatatagtgaaggcattcttaaaaggggtgaccaaatttccagtgtgctctggactccaccgaacaatgggacccttgtgctggtaaaagaagcacagctctgaacatataatatatatatatagagagag

SEQ ID NO: 299771 - DNA, 1227 bp, Cannabis indica
aacaatctcgatagttcaggagaaatttttaacagcgaaaaaagtttaggggtatgatttggtacatgtcaaagttcgggagaaaaaatcctaattagcctaaataaaaagcaattcaacatgctttcaaaaaaaaaaacacaattcaatataatactatacaatataatacaatacggtgtaataagacataccaaacgaaccctaaatgttcaaaatacagcaagaaaaccattcaacgtctcaaattcaactcaaaactactgatacactaactctggaagaaaaattcaaaggagctaatgttcggaaaacacaaccaattgtctgaaactatgttgtgtaaaagaatttcattgaaactatcaacgaaacattcaaaaaatacagaaagaaatcattcaacgtcttaaattgaactgaaaactactgatccacaaactctcggagaaaaattcaaatgactaaatgttaaaacgaaaaatattgagaaactctaaccaatgatgtagctcccaatagcaaccgcaaccagagcttgatggggatgaaaagtggcggcgtgaggctgcaatggtttaagaccacgccccacatggcgtagatccagatgctgcaccgtcgtccactccataactcctcctttaagatctcaccagcctatacaacagaaaatcacacctgaatcagagacccattttcaacatatgtatttccatagattttagacctaatatggatcagaattgccatggaaatggttagatcgagcaagaaagtgacagtataaaggaggggaaagcagatcttacttgtaatgggaataattgtagggaattgaaagtattacctgaagattatggggtcaaaccgaagctcatttcaatggagaattgaatatgagaagaattatgaggaaagaagcagagacagagcgataggaaagcagaaactcgaaagaaagactcagaattgcaatggaaatggaatgaatgaagaactcgaatattgggcgcccagttttttattgggcctaaaattaccaaaactttctggcgcctatattgggccttagagtgtgctctgtctatatggggcctggagatggtccattatcaaaagtgtctgcaaggctttcccaacaaactattgagcacttttcttttctttttctttttgtttttttttttttttgaataattagctttttttagtccctgtacttat

SEQ ID NO: 299772 - DNA, 9153 bp, Cannabis indica
atttttattttagttgaatactagaaaaaaaaaaaaaaaaaaaaacatcctaattcggtttgggcgggttaacccgcccaacccgtcggtcgggtacaaaattttttttttttaaattgggcagtttgcatgcagaattttataacccgatctttatgttgggttggaaaatatatagtataaaccgactaaaccgaccgatgtacagccctactttaaacctcaactttccttggtttcatcccctttaaacctcaactttcccttgtttcatcccctataaacctcacaactttcccaaaacaaataaggaaacaacacaaaataaaaaagaaagtaaatgcatactattgtgtaaattaataatagtattactaaaagtttcccaaactatttctttcaccagactcatttaccacggttcttgcataggaaaatatctttgtcaatttcttgttgcacaacaccccaatcaatcccttgagatacaagtagattttttaattccacaggttgattgactctcgactaagcatctacaactcgaatgccaaaattatactgcattaatttttccatccaacgttgatgctctgtagcgaaaatacattgctccaacaatacgttgctccaaattttaaactctcctgaactgtgtgcactgcaaatctcattcccaataggtatggttgccacttttgaatggcaaagacaaaagtcattagctctttctcatagactgacctcaatgtagcttgtgtacccaaaacatgactgtaaaaagccaccattcgttgctcttgcatcaaaacagtccccacaccatattttgaagcattagtttccacaataaaaggtttgtcaaagtttggaagaattaacattggagcggtggtcatggcttgcttaagagcctcaaaagccaaaattgttgcatcactccaccgaaacttatctttctttaattgttctattagtggccaagctatctcactgtaacctttcacaaacatacagtaattcctcgtaagttttaagaaccctgtaattgtttaatattttttggcatcatccattcaagcatggcatgtatcttgcttcggttgactgccactccatctctagagattatgtggcccaaacagtccaattttgtccgagcataagaggcacttatttcggttggtgtaaaatttatgcttggagagaaattgtagaacaatggacaaatgttgcacatgatcgaccaaacaacgactgtatactaaaatatcataaaaaaaaataccaacagacaacgttgtattaaggacgaaatgtcattctttgctgcctgaaaagtggctgggtgttggtcaaaccaaacatcataacaaggaactcgtaacgcccgtcatgtgtacgaaaagccgtctttagaaatcttctagttgaacatgattttgtttgtataccgattttaagtcaagcttagaaaaaattgtgacaccattggggttcatccaaaaagttcatcaatcattggaatgggaaatttcttaggtatggtttcacgattcaggacccggtagtccacacaaaatctccaacttccttcttttttatgaactaacataactgggctagagaacagacttacactggattgaatgaccccaatatgttgcatttctgtcactaattgttcaatagcatctttttatgtttgggggtaccgatagggacgaacgctgatgggtgacatgcctttttaatagagtgctctcggtcgcgtacaagtggtaattccattggcatctcatatgcatggctcgcctcctctagtagtacttattcaatttcaagtggaatctcttggtctccttcagttatagatacttgccctaactcaattagcaattcatgaccttcatgcttaatgagccgcatcatggatttcagcgaaacaagtcttatgcatagctggatcactttgtaattgtacccctgtatcttccaatttatatgggtcatgcctagtgtttccaaccactgcactcccataataagatcagtatttcccatttccaacggcaaaaaatcttcaacaatctccacaccttttattgtcgtgagcacccctttactattccttgggttttagtagcctaacctgttccgactccataaggcgttgtctttatattgggcagcttcatgatattaattagcacatttgaacatttgagatgaaattatgggtcacactgctgtcaattaataccactacagcttgtgtgctgatctgtcaaactaactttaaggttttgggggctgtaagatccgccacctactggagaaagacttccagagcctgatttttcaggttcatgatgctctagctcttcttcattctcttctaaattgtcaatggagtcttcttcattatcaaagggaacatcttgcaccaatataacttgtaattctcttttcttacaatgatgccttgaagaatatttttcatcatacctgtaacacaaaccttgggcccttttttgctggagttcagtttttgaaagtctacgatatttggagtcttatcctagagaagtcgtgcaagaagtctctttcggtgtcatgttgtttgaaaatgggttaggctgctcttggttacaatttgtattcaaacgttgggcccctaatttgttttcaatcctttggccaattccatgcgctgttcaaccccatttggtccaaacacacgtgccctatctctattttgggtccattgactccaaaaccaattcagatttaccctccaatgacggtgccaacagctcaaaatttttgcgatattctcatacggtttctgaactctccgcctcagtcatacggtgaataacgaagtatcgttcagccttaagaatccagccgtccgattttgaccgtcgaaggtgggcagttttattcttctgggtctaatgtccaaccttggagccctaactttaggcttatacccaccaaaattactgctgctgctgtccccatattagtatgttctttccctcggcagaagttgtggtgcatccgttcttactggtgcttttcccgttgatgatatttgtccctttcatcaataaccgtctcattctcgttcttcctggagttatataaactgatcaaagtgatcagccaaggcagccagcacttgttcaatggcaggtaactttttgagatcgtctttgataatcccaatttcgttctgcaccccactgatcttttctttgagtgcctctactcttccctccattcgtgttatccttggtcccaattgttgctatggtaccaattgatgcactgtggtagtgtatctcaataatatcaagtaacagaaataggaaatataaaatttattcagagaaaagaggagaaactttattgaattgctcactaaaacattctcttccaggatattggagagacctggtttctctctagagttaaggcttgatttacataaaatgtgacatccccaacccctttggtttcttcccttttaaacctcacagctttcccaaaacagataaggaaacagctcaaaaacagatacaaagtaaatgcataattgtatgtagattaataataatattactaaaagtttcccaaaccattcctttgaccagacccgtcaattacctcggttcctccttgcatgggttaactgaattggaggtttatcataatgttgtctagtgtgagtgtctacgtctatagaagactaagtgaaattttccaaacaattttatggaagctatctagtttagtagtagttcattagagggtaaagcttcaatggagaagatgcctcttttaaattagttcattgctattctatttgagtttattttcttttttgctgttatagttggctttttaatcttcttgctgcttcctattatcatattttattttggttcatggttcagaccggagatggttgttgggtggtaccattcacatcctgggtttggctgttggctttctggtgtggacattaacacacagcaggtatttactttctttttatcgtttcagtatagaaattgcacaactgtttatagagtggcattatcaaatgttgaattatgatttgttcttatagatatctaaatcttcaatattcagaaaattattattctctctattaacaaagcaagttatacggacattttgtttctttagactgaatatatttgaatggattgcatttactctgctgactttatgtttgttttttttttggttaaatctacataaatttaacaatgatgagtctgataagtagcttttagatatagaatgtattttctgacctactttatgactgtaataaagctgtgttgaaaattgaacgtgtggttctgtgaattgctttagttctcatttggtcttttgtaactcttctaagcatggtataaggagtcgaataatgatgagtaggtgttagtcctacagattatttgtgtacaatgctctgatgaattctcctatattaggagtcgaatactattcctcaattgtaatttattatctagacactataattcattgacaaatcttatgtagagttttgaagcattgaatcaacgcgctgtagctgttgtggtggatccgattcaaagtgtaaaaggaaaggtggtgattgatgcttttcgcttgatcaacccacaaactatgatgcttggccaagagccacgtcaaaccacttccaatcttggccatctgaataaaccatccattcaagtgagttttaaggacaaatgactagatttattttgtacttgtaggttatagccttctgacatttcattatctctctcaggccttgatccatggtttgaatcgccactactactccatagctattaattacaggaagaatgagcttgaggagaagatgttgctgaatcttcataagaagaaatggactgatggtttaacacttaggcaatttgacactcactccaaaacaaatgagcagacagttcaggtgtgtggaaggtcgctagtgttagtagtaataatgttagtggttatcttttcaggttaaaaaaagtttcaaccatgtctctgtccagcatgttagagaaactcattatatagtgaaaaacagggtatgattaaaaaaaattctcaaattgcaaggaatatttaatgtacacggaaaaccttttcatgcctgtcttgattttttgatggcatatttactgttggtctcctggaaaagcttaccctattggaccttgatcagttttttttttttttttgtaaaggaacattgatcagaatcagatgcttgctttctttacttatgacagtcgtctgattattgttttgtgtatgttcaggaaatgctaagtttggcggttaaatacaacaaggcagtacaggaagaagacgagttgccaccagagaagcttgctattgcaaatgtgggaagacaggatgcaaagaagcacctagaagagcatgtctctaatttgatgtcttcgaacatcattcaaactttgggaacaatgctcgacactgttgtcttctagagttcctaaacagcacaaaagccttaatattccaagatgatcatgtagctctacattctgtttctgcttacatttgtcttactaaaactagtctatagacacgaggggcatgtttggagtgttggacaagaggttgttgtctctacctatgttaggtgttttattttggatataaaaggattggataatatcaattggattagtctcatgacagcattcacatcagtttttccattttatcttctaaaatatattattattatttttatcttaaaattttatatcacactttacattagcttttctatttttcttctccaaatcattgaaatattatatttttatatatattttattaattaaaataaatgagatattgacaaaaaaaaaaattaatttagagataaaaatagaaaaatgaaatgagatagtattaaaaaatgtttgaaggatttctatctcttctctacatgtaaagaatgatggaactgaagagagtgctttgagaaggggattatattaacccacccagaggatgacttaaaatagtcccacgtataaatgttatgtagattatacattttattaaaatattattttctagtttttttaaaaaacatttaaaattttgcattcttctatcagaatgcaactcatcggaaatggaagaatcttatcacgggtatatttaatagtgatatgatttgagtggagacgcctacggctattgtaagtatctttgagcaatattttggagttttgtttacatcttaccaactttttatggatactatggatggaccaggttgcttattgacttaaagttttggccaactcgctcgtaagtatagacgagatgaaagttaaaagtaactaagtaaaatagagagcacacacaagaatttatagtagttcactcactgtgtcgcgacagtattggagctacgtctacttcgagtttttattctcacgagaatgattataagaaagatagctaagtctgaaagttctaatttctagagagagatgctctgaccttatgagtatttttcttaatgtgaaaaattaactagtggagctctccttttataggaaagaaggtcttattaaaataataacaaaatatgaaaaaaaaatatgaaaaaaatacatttaggctatttttgaccattgattatgatctaacagtcaaattctttagggccgatcgccaatttctagatcttgtgttgtgtttatagggcccacttcgggtaagttgtagcttaaattcgtaactctcatgaggacaaaatttggacttgataacttcaaaattgcaattggagcgtgagacataacttgatggagcattgaaagagcttcaaaatgcaagttgagtcaaatgaatcaattttgagaattatgactgttttactgaaggatgctctgatactagcgcccaagttgacatccagggcccatgttgacatatgttttaaggaaaaaacgtgttgagggtgcactttttgacgctaagtgatattttgacatcacttagctagtttctatgttttggtgaagttattcactagttctcggagatgttgctgttccgcagtatcagaagactcgaaactacccgattcgagactaagtcactttttcgaaaaagtgaaaatatgaagttgtgaatttgacttgtttgagttcatagctctcatatactatgaaaaactagacgaacgcttgacacataatcagaatcgataagcagaacccagcgcaccaggtcacatatcaacctaggcactgatgctctaactagagcttccaggatgtcgtttgatacttccaaggttcttgaaattgaggatgaggtctccttcaccatttttgaccatgttggagagaattctcggagctgaatttgcatttggatgattgaaaccagtgcaccaggttgattgtcaacttgggggctatgcccagcactaagtcaacttgggcgttgggctcagctttcatgcccccgaaattctcattttcttcctgagctttcttgtatcttcattatttctgatgatgaaaaaaattcccttaacactttttcgggaatatgattggaaacaacccaggttgataaactgtcaacagcaccaagtgtcaacttgggtgctggatccagttttaggccaccaattggttccgtttgattctcagaaacatttgtatttaaattttttacaaaaatagagaatatgccaggaataattctcaaattagctccttggaaatggccctggttgacaaaatgtcaacttgagcgcagggctagcaccaggtgtcaacctgcgcgctgggcccgcttctagcctccaggttcgtctgtttcttcccccaaagcacttgtttcctcattttttatgaagacaaataaaatcctcaggacaattctttagtttgagcttggaagtgccccaggttgaaaaaatgtcaacctaggcgttgggtgcctggggcacctggtgctctgagtgctaaaaaatgaaagtgctccgaagctcattgtgatacctcaaatatgtttgtgacatatctaattcatgtcctagtataaagtttgatccatttgcactaagacggtcctgaaaactgaaaccctagttaggttgtcaacctaggcgtgggtgaaaccctaggcgcccaggttgacttttgaggtgttgtttcatgtattttcagttcatgggccttagacttggatgcttcatgtctttaaggtacagaatagtaaaaattagtgagtgagaaacaacttggtgcgatctaaacacccatctcggagttcttgaagttaacctgggttcagggctaaggacccctcccaggttgactgccatgactcaagactactcaacttcaagatattttctttcttgccacatgttaaacattaatgtccatgttggaaaatcttttactattatcttaatttaatactcatgtatgttgaattatgactaatctaacaccttaatatggaaaacctaaaacaataatattaacacataaggattatagaaaaccttatgttggtgcagtagaatattatgtctcattctgtctatagctgagtattatcaagatttgaacctggatcttctcttccttcgattgcgttcatcacagtcttccacaaaagcctgagtatcaacttgaatagtgtgggttgatactcaaacacctttgaacaatatttgagatagtttttttagtgaatttcaaaaataaagagaagaagaagaagtgacattaactttttcaattctcttctctttctttatataggtgttcacttagggttagctttagataaaatgagcttgaataaagacttgggcttaatctaatcctctagtccaaaatcactaatgggcgttagagttagatttttgcctttttatttcattcaaaggaaacaatgtgtcttttcctattttcccacttatctcatctaattatttaaataccaattttatttttaataattataaataattatcaaataaaataaaacttaaatatatttatt

SEQ ID NO: 299773 - DNA, 1508 bp, Cannabis indica
gtaaccatgatagttaaaaaaaaaatgtaaccattgaaaactcttccatatatatatatatttatatatatagggacaacgtgcatgttgcggaaattttgcaatgataaaattaggaagggcagattgaacaaccaaaaccacacatttactatagtagattgaacatagtatgactttgttattttaataacacaaccctatataattaattaattttcagtattttgttagaatataaatgacatgattatcaaaataatactatacatccaaaaaaaaaatgaatattcatatctagccaaacaagttgttagtccgtccgaatagcatgcgcaactaatctatgagcaacacagattagggacactcttgaaaatttagataacaaacttgtaaaaactttaacaatgatcttaaaatcattagcgtagaaaactctgaaagtaaaacaataacagttgtaagatcttggtaatagactgcaatccaatgtcatcattaacgttaagcaatttgttttgaaaactcgctatcatttctctaaaagcttgaagggacaatagcatttaaactgcaaataaataaaatatacattagtgagatgaaaaataaaataataaataaataaatattattgtaaatttataatttattttcccaataaataaacaaaaaaatatcaataaatagaaattatagagaaaactaacaatataaacaatattaagaaaatatttcctacatgaaaaaatataaaaagacttatcttgttaatcgtaattaaagtcggaagaaccagagcactaattcaaccatttaaataactataataacaactttaaattgtttaataataaaaataataaaataatagttacctcatgtaacaatacaaaatatattttaattagataatttatgaaaaaatatatcatgtaatattattaaacaaataaagattaaactaatattttttaaagactaataattaaagcaaattataagcattttgtggtaacaaccgcacaacatattagttttcatcatgaaatgagaaaaagataatattattattccatcaaaatacaaaaattgtgatgatatgatataatattataaaataactgctcaaaaataaataaaattataataataattaatattataaaactaagcaacaaaaactaaaaaatttaaaataaataaataaaataactgctgcaaatcaacagatcaaaatcaccgatacaccaaccacgacaccaccataaattccacaacctccaatgaccaccacaaaaccaccaactacaccagatctgaaaccaacacaccaccacaatgcctaaatctgaaaaactcaaccaccaccactaaccccaaacccacacaccaccacaatgcccatatcaaaagattaagggatccaaatataatatatatatatttatataactaggtgattgttacgtaccaagccacgtagtgttagttttatttaatat

SEQ ID NO: 299774 - DNA, 2040 bp, Cannabis indica
cataaatcaagtaaagaacttactaaacctttttgaggacctaaactaaaaaactagaattttgtctatcgataaatagcatggcaatgccctatatatcaagaaaagacaaaaaaatgacattacaggaaaattgcctaaaaaacggcatgccattttagtaaaaacaacaagtcatttttttgggtctctgccattaaaatggtagactgtttctacatagaaaatctaccatttttttcgccaaaaaaataaagagtttcaacattgactcaaaatgaccctaaacttcaatcttagctccagatcacctaaacataccacaataaaccatttccaagcaacaaaacaaaaaataacctcaacatgaaaatttcaccattgttgagccaagcttgagttcttgaactcaagtttgctcaactcaagaattaaccataaaaaatcaacctaaacaagcttaaaataacttaaaattaaccccaaaatcaatcccataaagctctaggtttgaacataactaaaataataaaattgcatggcttaactaactatgactttaaaagcgtaaagaagaagagctctagggcttaatctgggaattcaccaccaaaatttcttcgattcattgataaaattgacatgaaaaagggagaagaggttgctggttttctagttctttctttggactgaacaagagggagagagaaagtgtttaatgcaaaattggtttatacttttaagtaacatcaaaataatcagctgaaaagagtaaagaaaatcctaaaaaatcacaacaagacaaaactaaatgaaataaaattcacattaagtccttacttaatgcttaagaaataattaggcataggagtaaaatggtccaaaactatatccccacctaatcctaataatctaaaaataaacttatgattgtcccacttgaataaaggttccaagctaacccatccgtcttattttctattgatactgattaaaaatcataaaaataataatttccacatataggataaatacttagagtttaataaaacttcaagaattgagacattataattctaatgcctattttctaaaaatgggacacacattatatatatatatattcacatataatcataaaattaaagtatttaatcctagttgccctactaatccatattctaatcatgcggccattacatttaggtatttctagtattattttcctaaggaaaaatatttttaggtatttcttcatcatgagcaatattctctttctcaaatctaaccttcaatctggcctaggttgcttgcatctggcgagaaaattctttttatgccgctaattttagcatagtttcggcgagttctttggccctttcaatgactgcaggatatggctcgtaatcatattcatcatctttatctttcccatcatcttctggattttgtctttaggaccttcctctcgaacctcatataagggattttcatcaacttatttttcaatacgttgagtctttttcgcaggatgggtggttcctcttttggttttccattgactcctgtctctgcttgggccacaggatctacgttatctattgaagtatctccatcatgaccacctactttgcttcgggtgagtaacatggttgcagtgtacaactctcgatggtatcactaattctttcaactctcaatgaatgtaccaaaatatttttcgagtttttttggaaaccaattaaatattaagaaacgtaaagaaatatatagataacaaagagagaacacgagagtttttacatggttggggcgttaataagctagtctatgagtaaatattattacgttaagattggtaaatacttagaatttacagaagtgtttgaaccttagaaattgagaaatgagatttcaaacccttgcatgggttgttgtgttggaattaattttaccaggatcttagatctactcacaagtatgttgaattaacaacctaatatgaacttctaaaacgataaacaaaacacataaagttaa

SEQ ID NO: 299775 - DNA, 3066 bp, Cannabis indica
tttattttgctgtaataacataacttcttgaactaaaataaagaccccatttaatagctgtgtttcaaaattttagtccaatcctagttaaattggttacttcagaaataatgttaaaattaatttgacacaacgatctctagcttcttctatacatggatctcgtaagaatctcccattattgaatggatcaattacattaactctggtgatctaactaacaaaacacaggataagataattaatattatgtttacaaattaattaattctacatagtttacaggcaaaaacatggttactgatacatctcatattaatcaataataatataatgaattgaattttttcaatctcaactctttcttctggttaaagacatgaaggtagtagtgaagtggtgatgatcatgatcacgatgagagacaacaaagccaaatctttgatctgtctgcattggcatcagggcagctcgcacagcgaaccacgtcgatgaagaggctctcatcgcaaggtatgcagagcttggagtcgccggcgttgtagtcaaactcatctcgagcttgatcaagcaatgccttgaatagagggtgattaagcaagcttatttttacgacaaacctcttgtagtactcttttcctacgtaaaccaccatgtgaccctttggaacatcctttggaatttgatgatgatttttatgttgatttgagtacttttcatcattgttttgaatgaaaggccacaaactccattggcaacagtattcgcagcctagacaaggactcactttagtattaatactagtactagtacttcccatatttttcttcatcttgttcatgcatattttcacaaactttcccttcatacttttcttgtcttgacaagttttaacaactcactttagagagagaaagtagtatattaaagagagaaagagagagtgagatgagggactactattactaatgctgttcagattggtagtagtgcttgttcaaaaatgaaaggtgtgtgtgtatatatatatatgtgtgtgtgtgtgagtgtagctagaatgagagaaatggggcttttgtggcattaaatggttgatatgataggtagctaagagggggcaatggaccaatgattttttattttatttttataatattgtattatattttatgtatatatacatgatataataatggaatgtgatagttgttgcatgagcattaccgtgctgtaccgttcgttactttatagaaatgaatcttgatacgaaaactgtacgaacgtgaatgaatttacataaatggcaaatatttgaagcatttttttttctctttctcaagaagaatggcatttgatcacagatctttcgaagttatcgaagttatgaccccacaagttgagaatgcaaaaaggaaaataataataataataataataagataagatcacgaaacaaaggatgggataagcttcttggggatagtgcgatcccacttatttgtaacacctagttatggatattgtaaattatacagtctatgtagatttatatatacacacttatatgtatagcactttttctcagttgaggaaagaaaaggactctaatgtagtcattctcatctcatgtatgtaaaatataaccgcccttgatatatttaagtccaatattagtcaaccttctggctacgataagagacgcattacaacatatattgatattgcgttagtggggtaaatatataaacccaattaattacagaagtgggtttaagtttttgtcttttattaattttattaatattttctaagaataaagatcactttggtgcagttgccatttctatagtactgaattatcccagtaatgttttgagttggattggattccccaaatatttacgtagtgatgaactttcaagatataccaacaaatcctaaaacggaagatttcccaacttaatatagaactacccaacaagaagaggaactagaaatgccatttttgctcaagggtggtggattttggtgacctgtaatatgtaaaattagattataaaaccataagttttgatgacttttatcacttttgaaaaggccatttaccactattactatatatattattacatcacttatcataatgtcataagcacttcatcaactctctttttagccttttatataaaagttggtgaagtcccaactcgttgaaagtataatggtgagatggcctaattttttatttattgaataaattatttttggggttatgatcattaatttttgtagcatattctagcctagtactgtccgtacgtactaccaattgtttagtcctgttctgttgcagcagtctttgttaccgtttttccacactactgaatatggatagccttgactcaagactcaagattgagacatacagagaccaaaactgagtgagtgaagcaggagatgggctatacatatatgcctacgctgagtatatattttgagattggatcacaatatctatgctttgcagaaaacagaatgggaagtcacagttttaaatcttactacaaatatatcaagaatctattctcgaaaacagagacattctccactccttcacctaaccagatccaattcttttaaggttcatgttatataagatatacgaccaatgagaccaatatctagttcatgaatgtaagtcaattatttgtatgtactctattaaactcacctttaagggttattaatcataaacccagatgttttacaggaaagttgacattaatatgtttggcatggctacaatatttcacatttttatatgcattttcatggtgaattgtgtaattttgtactcgtcgataaactatgatctcattttttttattattattattatatgaccccgtttattatagttacatcaaacctcttatttttcattccctcaaaaaaaaaaaaacctaactattttcttactcttacttacttaaaacttaacttacacagttagtacagcataacagtgcgaaactaaatacactatgccaactttaattactacac

SEQ ID NO: 299776 - DNA, 1419 bp, Cannabis indica
tcgtataaaaaatctcttctttacattcaaaacaataaaataaattcattttttatatgcaacatgtttttcagcacaaaaaaaataaaaattcaaataggacggaaatagacaaaatgggaattgggtgtccacatagtcagatctaaaacaatattttcaatgcccagatgtgaaagtaataataatgttaaaaaagtaggacagctagcgagaataatcatacaagaaaattatgcagtaggtttattaatttttgactaacatataaatagttgattttaaaataaaattttatttattattgtttaataactgaattaggtaaagtactaatatattatattactattagaataatcaaatatatagttttatataattttaatacaataatttttataaaatatcactaagtaatactaaagtatttacctctaaataatactaggcatcgaataataatcctcatgatataataatatcacttttattatgttatgtttgacgtcttataacaatacactttacattagctaaaccttgcgcacaaaataacattaggagaaaacaactacttgtaaatgtgtattaattaaattttcaaagcagcgtggccagtgggtgcaatagtttatagtacctttattggggaagctacctataaatataaataaatataagaagaggtgaagtagacaggggtcttggaatcaatcttttatatctgtatcgaaatagctaatagtctaaagcaactaaactgaagtatggctcaactgatcttccgtttaataggcttggtaacacttgtttctgctttatttgttggaggctttgcgcagctttcaccaacattttacgaccaaacttgcccaaatttgacagccattgttggtggagtcattgaggatgctctcctcacagaccctcgcatagctgctagcctcatccgtcttcattttcacgactgctttgtaattgtaagtaaaatattgtatatgtacatatatatctgtatattaattctcacttactgctctagatagatttcctttttctgattagttactcattgattaatttcgacacatatttatatagagtaaagtagagtaatttgtagcataagtttaactcttagttactaagggtgtgcataaaatagtcgattcaattcaattcgtaaagtacggatatttgcggatttgattgaattggaaaattcaaaatccatgcttgtgtggattggatgttgattgacatgtaaaagtagcggatccaattcaatccacacatctttataaaaaaatatatataaataatattttaatgtaaagaaaatagtaatttaaacgtctgttacaaataatactattatattttaaaacataatagatcaaatatatattctattct

SEQ ID NO: 299777 - DNA, 3908 bp, Cannabis indica
aataaaaaaaaataatgagagagctatctgctacgccagaactgggggcttgggtagactttaagtaagtggagacgagattaaacttcctcttggaaaagaatgtgaaatattggcggcaaaggagtcgtgcactttagttaaaatggggagaccaaaacactaaatattttcatcataaggcctcggctcgtcgaaaataaatgagatcatgggtttaatggatagtttgggggttcagcaagatgaaatttcaattgtgaggcagattatagaagaatattatggttctcttttcacatcttctaacgggtatcttcaaagaatgactgaggttgtataggctatccagcctagggtgacagacccaatgaatgtatagcttatggagttgtaaactggaagagatgtggaaaaggttgtacatgatatgaatcctagcaaagctcctagagaagatggcctacctgccctcttttaccaaaattttgggataatacaagaccaagtgtgatcgaggtgtgtttgaatatccaaaataataatgcagatgtgggggccttaaatgagacaatcattgctttaatacctaaggttgagaaaccaaaatgggtggaggaattccagcctattagtctatgcaatatcatttataagattatttcaaaatgcttagctgaattgcttagctaataggttgtgattttctcttaataaaatcatatctgaatcccagagtgctttcgtaaaagagaagttgatccatgataactttattattgcttatgaggggctccattgtttgcagaagaataggttttaaaatggtaccaaagtggctctaaagctagacatggctaaggcttatgaccgggtgagtgggaattttgaaaagaggtcatgttgaggttggggtacagtgaagagtgggttcaaaaagtgatttgttactgtacttcggttcagttctctttcttcaatggagaggtgcaaaggaaagtttgtcctcaacggggcctacatcaaggggatcccttatccctattcttgtttctattttgtgctgaggcattttcaagtttgatctaacatggggaatgaatggagaggctaaatggcttatgttttggccgacggggtttgacaatttcacatcttttctttgcaaatgatagtttagcctttttagaagccaaggaagatgagtgtcttaatttccaagatgtgttggccaagtacacataggctttgggtcaaatgatcaattttcataagtccaaaatgtgttttgggaggggtgttccataaggagtgaggcggcggctgggtgaggtttttgaggtgaatgtagtggaaaattacagtaagtaccttagacttccatctttggtggggagaaaaaagaaacagctttttgatgttatcaaaagctgggtgtggagtaaggtgagaggatggaaaagatccatgtttttgggagcgggtaaggaagtgattataaaggctattttacgagaaattcccacttatatactatgagtgttttttgacttctgaagagcactattaaaagctttcatagtatggcaacatggttttggtagagttcatcagaaaagaacaagaagactcattggtgcaagtggtcttaattgtgcaaaccaaaggacaaagacagactgggatttcaggacttaggccttttcaatcaagttttacttgcaaaaaaaatttggcgatgtatttgaaacccatatgtgttgtgtagtagagtgctaaaggcaagttatttcctaaataaaggggttttcgaagaaaaatgtggaccccatgcgtccttttgtgttgaggagtttggtttggggaagaaaattatcctcagaaggtaccgatggaggatcagggatggaaattcagtctgtgccttgaaagatccatggttaccatgccccgttagctttcacatctttgataaacttgaactgtcagaacagatgtatgttattgatttaaaaaaggcggatgagacttgagatgaataagttattaaagaagtttttaatctgaatgatgtggaattgatcttgcaaattcttagcggcggtagagatatagaggaccaaatttgatggcagtactataagaacggtgaatattccctgcaaagtgggtatagggtggttttagatatgatcgaggcggttgaacattcttctactcaagtcatggaacattggtggaaaaagttttggaagctcaaacttcccccaaaagtcaagcatttggtctggaggttataattggttacccacaaatacaattttgactaagagaaaagtggctatggacccgatgtgttcgagatgtacttcaggtaaatgggaaggggtgttccatgcattgtggggatgcagggcattcattcctatgttgaaggctagtggtttgtgacaactaagcgaaggatacaaggggaggatgtcatcttatatctgcatagattgtctcgagtgtggtccattgaacaatttgatctatttcttggcatctctgatatattcgcaatagtgttaatcatgtggggtggcaccacgacgtggtgatatgttggatcggtgtagcaagtttttgggggagtacaaggaagcaaaaaggctggagatgggagttgcgtatcgaggtgatgttaaatggagacctcttgaagttaattgtctcaagattaatgtggatgctgatgtcaatactactatgaagggagctagcattggcttggtggttcaaaatgtagtggccagttctttttgctgctgtaaagtttttgggttatgttcattcacctcttgtagttgaaccgatggccattagagccgagttgcaagtgggtgttgaacgaagatgaccctcaatctgtgtcgaattagattgcaaagaagtaaaattaactaatgcaaaaagtttgatgggatcttaatggatattcatgagctcttgcaacatgtctctatttgtggagtgcagtttgtattcagagaagcaaattaatctacacattgtttagctaattatactcttattaatagggttggtgctatgtgaataggagttaattttccttgtgctagtcaagctttaagtttggacaagccaattcctttgtaaactgttgtttatgaattatagttcaaaaaaacaaattattaatttttaagatttattttattctaatatttaattaagcaaaatatacaaaaaaaaaaatagcaaataatgtatcaaatttaaaataagaaatgaaacaacaaccattaaataaaatataaatgacaacacaaatttttttttaaaaaaatagtgtaaatttaatttcttataaatgtaacataagtattaatatgaacatcaatatttatttattgatgatgataaaaaataatatgttatttttgggagtaaaatttgaagtggtttgattggagagaaatagtaatttgaagtagaaaaatgtgataaaataaagttaaaagttgatttaaaaaggagtagagtagtgaatggagatggtgttagcaagtgtccagcggtttatctccaccaagtggtgaggtgcagagttggctcaccagttgtatactgccacgtgttcaagttgttctctttctccatcatctcaaatgacgcgcatgttcagagctcaacatctgtccgcccactctccccgactgccaccagatgtgacgcataggacagctctcctcagctttttgtggcattttagtcactatcttaaagtatctccaataaattaatgggagaaatgaaagggaataaaatgttatgaaatcaaaataattattttaacatgttgtttactaaactgtccggaaacggaatcggaatcactttat

SEQ ID NO: 299778 - DNA, 3348 bp, Cannabis indica
ataaatatgtttatttttttttgaaataaatatgtttatagaaattacatttgattgcatatgttgatacttgagccaaagaaactgacaaatggttatgatggatttgtattgaagacctaaatagtatttttcttcttagtcccaatttggcagtttttccctttagagtagtctaaagaaaaactgttaagctctattgctgcaagaaattctgtgtttggaaaataactacccaaaaggaagaattgtgagaaaatcttcattttgtttttgtttgctagtaatcatttaatttaacatagggtggctgggaaaacgatgaaacagttgagcaagccgcagttcgtgaagccgtggaagaagctggagttagaggggatttattggtaagaatcaatgactctcttttgttttatgaatcatgattgataaattgtgtttgtgcatgttattggtgtttgttgaaatgagaattagcaaagaacttatttattgaatagtgtggttgtagtgaaacttctatatgttgaatgaaatataaatgaagaaactgaatcctatatttcaacttgttggctcaattatataaaaaggttataattggcattggctatcttttcctttttgagaattgcaagttcttacctaaataaatcttggtatgaaggtctgcatccatttaataaagtttttacctatattttttcaaaaaaataaaaataaagtttttacctatataaatcttgaaccccttcccctctgttggggtgcttatatctaggatgagtaatgatatgtgcacataaagtgtgtaccaaatgcttacacagtgacacactatcctttccaaccatcacattatgtgtttatagattttcgatattaggttgtcttcacttgtatgtaaatttttacattatattggtttgccatgtcacacaaacaggatttgcattgggcattgcactggttggagggagggagttcttttagcatactgctagttagtcagatatagttttttcacgatagctaaagttagcagaacattagtctcgggaaagtatgtcatagatcattgaaaaaagtagggttttgaatttattttaccatagctgcaaaatccttttcagtagggtatctgtaacttttcatggaaatttgcaatctctttctcttataagcattcctaacaacttgcaatgttgacttcatgcctcataattgtgaaaaaatttgaaactattactgtaataccaagatcttcttacttgtttgagcaaaaacagaagtatcggactgactccatgctttctgcaaaaggcattttccgtatcaagttttcgactgatttatttggccagtatatattttttattttattaaggctgtgtttgtttcagcactttttgggttactacagtttcaagagcaaaaccctgcaagatgagttttgccctgaaggattgtgcaaagctgccatgtttgctttgcttgtaaaggaggagctccagttttggccagagcaaagtactcgccaaagaagctggctgaccattccggaagccatggagcgatgccggcatcagtggatgagaatggcccttgaggaaggcttcttgaaatggcatgaagatacttcgaaaggagaaaataatctgatttcatcggatttatccctggagcaggactgatctcgcatgggcgtatctttcacgaactgaactttcttttcaatctcaaagttagataggccagattaaggatatcaaaacatgtgttcatcctttttaggtgttttgatttttgttgttctttcgctttgaacgtataatcagtttgttttgtaatcaagtctaaaatgacagaagagaaatgaggaaaacaaaagccaaaaaatgatccattcttttgcctaaaggaaagccatttctgggtttccagactttccaagattgagaaaggtcctcatttatttctcaaaaaacaataataatctattagcttattaccaaagagtgggtttgctcactcatttagtcattttgtcatttgtgttttgtccatcccttcatttccattcagtattattttttttaaaaaaatatttttttcagatgaatttcattttgatctttttatagttattctgttttattcatataactaggtaatattttctctcaattgttatattatttgaaagataagttttaatttataattattttagtattttatgcatattgttaagtgtgaaaattttatatttaagtagttaatattttgggtattaggggatatgaccgaccaccacatggcaccactgtggcgggcaactttgacaaccaccatggcctacggtggccatggaagccacgaagaggagcaggtgctacatggggcagagcgagataagcaacatgcgggttgattgagacccagaccctcacgagttgtgcttgcatggttcacggacgtcggacgtccggcatgcatgcatgctgctagtgtcgaacaagaaaggattgaaggtccttgtattgtgaaagtcataatggcggttgaaccaccttgctcttcaagggactcatgtcccactcgcatgcatcacatgcatggatttcttacgtgggcacggtactcgaagccactcgggtggctgtgcatggtcggggaaaaattcctgagctcgcatgcatggtcgggtttcatggttataaaccgagctcacatgcaatgaacattacattgtataattttacgttaaaaataatttaataaaataaaattacattaaaaaaatcctatgccccataatggcttacattattttattaaaaagtaaaaacaaaatctacactcaattataccatataattaacgatccatcacctctcaaaccttcacaataatattaccatccattcacgtacatatcaaatgtatatatatatttatataaatacataaaatccacacaacatttaatgtatctacattcatggaactgctcttgataccaattgttggttcttatggtactagataaggtacgcaatagaagagttcatattatctgattagcattgtaccatagtctaatagatttccagatgtgtatgctttaaatctaaatataaaatataagttaagaacatatacctcttgatgactatcaaagtatccttgaaacttctcgtatgatttatcttttaatctagatgatgaagataatgcaaattaactcacaccagtgtcttccgaatcgatccaccacacacaagaaatagtgtgggctattaagataaagtgtgtaatgtgttcttattgaattctcaacac

SEQ ID NO: 299779 - DNA, 2251 bp, Cannabis indica
gttatatgtgcatagtgcaaaagtaagagtcagaaaatattaaaaaaaatcaattacagaaagaagaaaagggtcttattgaaacttgaaatattagatctttgtagaagaattggggagtcttttcactgtccttaatggaaacataagcgaacattgcattaggagttagtagatcactaaccgttctgtttaaacaatcaaaaaagtaataggaaagtagccaaggcaagaaaaagtgtagcactaactatagcacaaaaatcatttgatttcacttcatttactcaagtgattttggtaggtggggtaccatgagtgaatcaaaaatagccttacgagcaatatagaaaaagggctaggatcatattaatataatataatatatatataatattatgatatatattcttctctaatctctatgcatatgctatatacctcacagggcccgaccaaccacgcaaaaaacaaggtagtgaagacagcaaagtactctcttgcaaatttagattgtggaagcagtgttcttatctgcaaaaatttgataatccaaataagtaatagtttccatatctcaattcaaacagaacaaaaataactaattaaacaaataaataatatagatacaaacttgccagggagaggattggcctgggaaaagctttgtcaagggcttgtatgacaagttcacgctgctttgatggaccaaagttcattgatgcagcagtagctgcctccaccaacccatcatatccactcttactatttctcagccctacagttcaataaaactatcatcattttctcatatctgaattcaaaaccaatcaaaaagatatctgtagacctgttgcagcctgaacactttgagagagatggtttatggcaatcctatcaaaccagctatcactgtagtctccaatggatacctccgcgggccttaagctgctcgattcggtcaaggctattctgttacttgcaggcggtgttagcaccgaaacaacaattgattttttcctcccaaggctgtggtttggccaacatgaagttgagctaaggttagtcctagttggtaaaagatgtgttgcttccataacaaggtaattagttttgtataaggagatgtactagtggtctgtattttttgttgatgagaagaaagagagtgcatgttgagcattttattaatagagaagatttaaagagagtgtggacagaactctgtggtttggaatcttggacatatcgaagtctcagccattctctcttggctccaaagatgccttttttggttgtttgtaattgtaatggccaattaggaatccacaaacaaagacaacccattccctttgaaagtgacacttttatagtagtgacggcaaattcataataataacgttagtaaaaatgtaattcatcacgacacgacagaatttatatcagcataatcatttctcaaatgtttattattattgcctaagttcacgcatgcgcaccaatagtgcttaacacccttaagacgtgtcgctttatgattggctagggataatccctaaaagctattatattaaactatatgaaacccgatactaaattaaaccaatagcgatattgatatgtaggagaatgctggggcatgactggtgtcttttagatttttttattagtaattacagacgtaaaattaaatgtatcattaatgtatatcaaatgtttattcaaaatataataaagttataataattcgttttttttaatttggaatgtgagctgttttttattttagcacaatgctacactcataattgaagatgctcttattaattataataattactcatttcagtctttcgctaatttaaaaaaaaaatgctacaagtttttttttcgagagaaaatgccacacgttttgttatttaaattattataaaataaaataacactagtcccaatattttgaaaaggtaaaacagtaaattagtaatctctgaatttgtattctttcttaaaattaatttgtttaaagacctacatgtcttaaaattaatattgtaacacgttttaaatgtgtattataatactagtggcaaccatttttacttttattttttgtttttaaacaaataatctatactaataagatatttcttaatattgttataaaataatataaaataatataaagtagacgagaagaaagaagaagaagatgaaaaaagaaagagaaagtgaatgagaatttctgagt

SEQ ID NO: 299780 - DNA, 5067 bp, Cannabis indica
aacttttatactagtcttttgtaacatttatgataacttttacagcattcatgtgggtctggagtgctagccgaaggtaggcttgctgacctgatacgaagagttgctacttttgggatggttctaatgaagctggacctacgccaggttagctttcattttgaagtttaatttgaaataacttacttgtaacacttttctgtattttatattacactacttgtttttaacgaaccattttaacccaagtttgcaattgtgacaggaatctgccagacacgctgagactctagatgcaattaccaattatttggatatgggtgcatatagcgagtgggatgaagagaagaaactagaatttttaacaagagaattgaaagggaagaggccactagttccccagagtataaaggtaggcgtctagatagagtgaaaagtaggatatgactcgtgatcttcacaaatattgcgagataaaaattgaaaagccgaaaattcaatcattatgttagaaatgaaatctattctttttgtcaaatgttcaaacttctattgcttgtctgttgctgtgttattttctataactgggtgactctgtagtctattaatataacatttattgtaatattgtaaaatgataagaaaatctaataatgacactacctttacaggtagttattttacctaggatcgcatactgtaggagactaagtaaccttgaatacttgaagcgatcaagctcactcgaatgtgcgcttgccgttttaggattgaccatctttgaagaattatacttctagaatgatattgactgaatttgcattgcagtttggttcaatgtgatgctctattaccttctttctatttttatctgctgcaagtaattcatgaaaatttatgtttatccatctaaaatcagaaacttgtcttggtatcgtgtctttgtagaagcataagtgaatgaattggaaatgacctcagccttgttatcttatgctccagtgtttgttggctactttaatcacagtatctggttttgtgtgctaaaagaaaatgaaactgctattgatgccgaagaaatttctatatgtttattggttttacctgaaaccattacttatatcgagtgcatttcttaaagcagcttttgctttctacctctttaatgtcttcctcttgttgtttaactttcaggttccttccgatgttaaagaagtattggacaccttccgtgttgctgccgagctagggagtgattcacttggagcatatgtgatttccatggcatcaaatgtatgatacgtgttgcaaacatgagctttttgtctctcttttgaagcttaacatttttcttgctgaatgcgttacatagagctctctatatttttaaatttactaattctttctaactacctggttctttcaggccaccgatgtccttgcagttgagcttttacagaaagatgcacgactagctgttagtggggagttaggaagaccatgtcctggtggaacgtaagtccatgaaatcccatataagttggatgtgtattattttttctttctcatttcagaatttggctattgcacattgtgatgagttgttttgggagacacggaaatcttttctttcatccattatcattttaaattccctaatgttttaagcttgtcatccttcataaggtgatagaatgactacttttagagaggggcttacattcccttactttatcaaacagaactaaactcgttatacacattcaaagtgagctgactggctgattatctcttgtcgataagttatttatggtctgtatttttgtaaataattagaactgcataatgataggataagatgctaattatcattatgaactgggtatgtaaacgtttattatcttaacatgtactgatgcacgccacttccaaattccaatgtaacaccgtatgttagatgctagtttaacaaatatatttacataggctccgggtggttccactatttgaaactgtgaaggacttaagaggagctggctccgtcatcaggaaattgttatcaattgattggtacagagagcacattattaagaaccataatgggcatcaagaggtaataatagtctagacatcctttccatttttcatagaaaatataaagtccctatcaacatatgaagcataccaagttttaataggtgatggtgggatattctgattctggtaaagatgctgggcgctttaccgctgcgtgggaactctacaaagcccaagaggatgttgtgagtgcctgcaatgattatggtataaaagtcacattgttccatgggcgtgggggaagtattgggcgtggaggtggccctacatacttagctattcagtcacaaccgcctggttctgtaatggtaattttctccaagtacatttgcaaggttttattaattaataggcttgcaactgctttttgcattttcgtattactgtaaattgcaatgtctttctttcttgggtttgatagtttttggctataagaaaccttatgattgatcatctataacttgtatggtaaattttttagggtaccctacggtcaaccgaacaaggagagatggtacaggcgaaatttgggctgccgcaaacagctgttagacagctagaaatatataccaccgccgtgctgattgcaacactacgtcctccacagccacctaaggaagaaaaatggcgtaatcttatggaagaaatctctaatatcagttgccagaattaccggagcatagtttatgaaaacccagattttcttgcctacttccatgaagctacacctcaggctgagcttggcttccttaacataggaagtcgccccacaagaagaaagagttcgaaaggaattggacaccttcgggctataccatgggtgtttgcatggactcaaacaagatttgttcttcctgcttggcttggtgttggtgcaggtttaaagggcgtttgtgagaaaggacacacagaagacttgagagcgatatacaaagaatggcctttctttcaatgtaccattgaccttatagagatggttttagggaaggctgacattcctatagccaaacactatgacgaagtccttgtatcgaaggagcggcgtgagcttggttctgatcttagaaaggagctcttggccacagagaagtttgtgttggtggtcagtggacacgagaagctatctgagaacaaccggagcttaaggaggctgattgagagcaggcttccttatcttaatcccattaacatgttacaggttgagatactaaagaggctgagatgcgacgatcataaccataagctcagagatgcactgctgatcaccataaatggaattgcagctgggatgaggaatacaggctaagcttaactaactctcttgaagctctttatatgtaaattctgagttgataaaaacctcctattctctattctaacttataggaggatgttctttcttttgaactttgaagtgtgcttacataaaatttgtatctctattgtgttgtgtgagttcaaatattggactgtgttacgctttgaatgttttatcgaagtcttgtgttgtcttattaagctattgaaaatatattctcaagttatactagtactagtagtaatttcttacacctgcaccacaagatgatttgaaatttgtgtagacttctgtttcttattcaaattaaaattaccgcttctgcttatttgatgtatccctgaattggtaagtcattaagtggtagcacatgcttataatagcatattatgcatgcagtcgtaaggaggaacatcacaacacatgaaaatgtaattattttattattataaataattacaccaagacttcaagaccttaacttgaccacaatgcatacgaaactcttattcttatattttaacttgacactcattttaactatttaaatatttacatactttaagaacactttaaagtttagacaaatttgggacactttttggatggacacttgaaactttctttttgcacctacatccatgagatcaagggtttatttatagtgcctcatgtagccatttcaatttgctagaaaattctagcaattatcataatgtattggtctaaaaactagaaaagtttagttaatttcttttcctattaatgctacatgtttgtagcaacttctagatgataattgatggctaaataatagaaacatctagaagtgtttgaagttagagtgagtgatgactctttaacacctcctcaacaccgactcttcatattgagttgttctctgagcttctgaaatcttgttgtgttgagtcttttagtgagcaagtctgctacttggtcttcgctctttacttggtgcatctctaattcttctcgtagaactttctctctaagaaaatggtaatgcaccttcacatgcttctttcgagcatgaaacactagattctctactacacagattgctgactaattatcacaataaagcgacactgcataatctgtaaattggtgtaggtccttcatcaattgcatcaatgtaacgcccgtacttttcataaattactaatttagttacaagcgttaaaaagtggaaaaactgtaatgtcgcttttatttataaacataaaatatttcatatttgagctcaatttggacttaaagacataataattaataaataaaaataactgcgacattaatttaaaaacacttaataaaataaatgtagcgtgtcctagaccaccctcagttatatggtcctcagcgagtacacacacaagcctccaaggtctcacttgccaccggctttctaagttttacaactttaatctgcacatggtaagtttgataagggtgagctactaaactcagtaaggaaatgcttgtcacgtagtcacataaaataaagaaaaacatataactaaaacttagatgcacatatttagacaaataacaatacatataagcttaatcttatcactattaactaatcactagtttctaagctaagtcacataataatggttatgccg

SEQ ID NO: 299781 - DNA, 3004 bp, Cannabis indica
aactgctccaaaagacaccaatagacgcgataatgctaactttaaagacccgaaacataggctaattataacctaacacattgtgtgcggggagtgtcagagcgagtgtatggaggctcgcatgtgaacccatgggggcacgcatgcaatccgtgcgtgagtggggggctcgcacgcgtgccgtgagtgtatgttggggagggagagcaagtcaagggtagtgtggtgtgtgcgaatggggggctcacgtgggagcccatgggggctcacacgaaagccgtgagtgcatatgtgggagggagagcaagtgagggggagtgtggtgtgtgcgagtgtggggctcgcatgggagcccatgggggctcgcacaggagctgttagtgcaagtgcgggagggagtgttatgtgagcgagaggactcgcatgcaagcccatggggggcttgcatgcgagttgtgtgttcatttgggggagttggctgtgcatgtaggggaatttgggtgtttgggagaagggagtcaaaggtaaggttttttgggtgtattttggagggatgtgcgtataaggaaagaagcgaaggcgtgtagacaaagatgacgtttgatgagagctccaaggactaggaatgcaaggaaagagcttacgaccatgccttcggaagactgagagcaaggaggtacaagtaatggcgacaaacggaccaggaaggcctgaagacccgaccaacgatgcgtagaaaccactctccaacatcctatacctggggaccaccccgcttgcagctggagaccatgcgcatgtacccgtagaccatcctcctatagcctgtaattggggactatctaacacctgacaagggtactgggcgccaggccacctccagcaccggcaactggagaccacgcccatgtacccagggaccatactcctgcagcttgcaactgggcaccatgcacatgtccttggagaccatcctcccgcagcctgcaactagggaccatgcgcatgtacctagagaccatcctcctgcagcctgtaaatggggaccatctgacactagacaagggtaccgggtgccaggccacctccagcacctgcatcatgcagccagaaagcaacgtcttgtccccatgggacaactttgtacatcaggccattagcgcctataaaaaccccccatctcagatgttaaagggggttggaaaatcatttggtatagagaggaatattcagacatctttcaccttcatctttatcttatctttatcacatttcttggtaaccttggatttttggactactaacttagttgacgagttctcaccatcaataatcaatatgcagaagccattcacacactacttcttcccatcatatactattattttctaagcaggtaaggtaatagaaaataacataaaaacttactataccatgagtcgacttgtcctcgcagcgaatgtacatcaataagtcttcaggacctttaaagctatggttgctctgataccaagttgtaaagccctattccatagggacgccatgtgtgtaattttataaacaagtttaatactaatatattaattaaatattaaaaatggcgaggataataaaacttgactaaaataaaacactaaaaacggacactataataatagtaaaaacgtgttctagggatccctgttataaaagatttacccaaaagactatatacaatagaaattcaaaatatagcagatagagccagtccaaaacaactcctagaattttagcacacaagccgattggatcaatatgtacattcctggagaagactgtcatctcatggttgttctcacttttccttgcccttacctgtaccatagagcacccgtgagtcacatagactcagcaagaaaagtaataaataaggatacattaaatagctaattatacattttactatcataaaatgattaaactataaccttcaacagtaggtaatataaccagtcatatgtatagaaatggatatgctcatatatttgcattgcctaatcaggcaagcccgtgtcataatgcaatatcattacaccacctaatcaggtgagcctatgccacaacttggcaccaatatataacatcgtctaattagacaagcccgtacctacgctcggtacttatcatatgtgaatgatgcatgtacctacgcccgatacatcgccaggagaaaacccaacaatggtttcaatctataccataaccaggaaattttcatatcactgatgcccacacatatgctcgatacgttgcaaggattatcacatcacctaatcaggtgagttcgtacctacgctcggtatgcaagatatgtcacttatgcccatacctacgccctctacgttgccagctatattgcatcacctaatcggtgatcccatatattatgtccatagtatcatcacattatcattccctaatcaaacaatcgataatttcagaacttgtcatgccatgtgctacattatacgttccttacctcaagtttcgattcaggtatgttggcggacctacttgaagaatgatcgatgatcatgggctctatgtcatagcaataataaaccaatgtttttcccaaagcacttcttaatagttgcaaaggacaacctacagtttcctaccaaaccccatatttcaattacactaaaatgaaacttatattttggctctgaaacatatagcatatggtagatctcgtcgtaagcttcaaaacagtatatagaacgtccaaaatgaagactcaagtgaaaagttatggcaaaaatacgattcccgagttctcgaggctacctgaaacagtaaaccgattggccagaaccagttgagcagtttgtcaggggccaaaaatataattttccaagtttacacactcactgaaatgcaaccggaacctgtctaaaccactccatactttatagggtacatatataccacacatactgttaggttttatgccctaaataaa

SEQ ID NO: 299782 - DNA, 4241 bp, Cannabis indica
tgctgcttgcatctgttggtgcccacacttttctttcttcacctgtttcttggcatatttttgttgaaattaatatatatcaattcttcttttggtttatttaggggctctttagtaacccttttaacatgatttgattcagttgaaccttttgtggtcttttactccaatgtccaatgatttgatatagtgtgttgactaatttgatttaattgtgttgatcttatcaacatatcatttgaattttttggatttaatctctgaaatgagttttgaatttaatctctaaaataggttttgggtttcatgagattttggtcttttggatttaatctctgaaatgattctgtttagttcctttccttaccagttctatttatctttgatgttaaaatagttggcttatgttgcaatttgcatttatagtgatgctagaaagtcatcctttgcaaatatgatattcatagctccctgtgtcagctatgtgattctggctcatctcttgcatacaaattaaatatactctcattccatcaactgtaaatggccaagagtcatggtctgttgagcttgtgctagtagaactggtagtgattcaagtgaagaattttagggtggaacataagcattgcttttcctgatttttccccataacagcttaaaggggtttgtttctacaacaaacatgtaattagttagtactaaatgtgtgatgctctagagctctttggtataatgcaagaaatctatcacgttgactctaattttgtgaccttccttggtgctctttcagcttgttctcccatgctgggctgatagataagggtctcgagatctttataagcgccgagtcagaacacttcctaaaactgaagatggagttgatcttttgggacgagcaaggcgtttgaatcaagttcgggagtttgtaaaggcaatgccttagaaactcaactcagatgtgtgggctgctcttctgagctcatctaagattacatggttatgtagagatggtctgtatagctgccggtgaacgttttaaactcaattctaatgatcggttgtgctgtcatgcgatgatgtaagtgatataagggataaaaagaatgaaggtaagtgtcgtatctaaagatactgtgtttcttagatttatgcaaagaaagtgttttcatacaaatcttcttcatttttgaattgctttgtctctgttgcataagaatgtgagggccttaatcttctattttaatagcacaatcatttaatataggctctaacaccaatgtgtgccttcaaactcattattcgaactcagcaaaagatcaaacttagttttttcaggcatcaaagatgggccaaactttttgtttcttattaaattggtgagtatgtatatgcatgtaaacattttgacttgttttcaatttttattaaattggtaatactatagagtagaggccatgacattaaaatgtaacgtaggtgtgattttgtattgtatgaagtgacatggtatatataatcattaaaatgagggtattatcatggtttaaaaagtcaaagtagacaaatgaaaacttacaaaagaacatgatagatactttaaacctaattttttgattttctttttaggtagaaaagatctatctttcaaaggagtgttactgtatggctcagaaattctacaacaagtaatgtttgaacaaatgttaattgtagcataaataatttcactcatgatgaataaacaagatctccacaacaagtgataacatggatatcctcttattggtaagaagtcaaggaacagaagagctgcacctctaatagccacattgaatctgaggtccgagatatgtagagaggaatcaagctcataaaagaactccaagagggatacaatttgcaaaaatagggggtgaagtggaattgatagttcccaactttatgtagatgtaacgatttccacaactcaaaccatggttggatttggagcagttattttctccttaaataagcatgttaaacatccctgtctaaaccactacaaggttcttatacttcttaattatagagtttttcacccaactctcaaatttaataaaatgtagagtctaaccaaaagaaacccttttggtaactgatttattacaaataatttatactgaatttaaacaagattgatgtaatggaggtgatttatgttgcagggtttatatattgtcaatctttcacggagaagttgtagttcttttgttagaattaaggtgggtctaagattttagattacctatcagggatcgtctcagatttactgtctttggttttggcattcgagtcttccacattttaccagtatatataagttgagggttatcttatttgatgttaaagttttgttgtcttcttttttgggagcatggatcggtaaacatgcccttagaatagacagtgaactttcgtggacaaatataacctttccacctttttgcctaacacttttgaattatcttatttgtaaactttaaaagagtgaattaaagttatactctaaaatctttaatgatcaacaaatgatatagaaaattcttagacaacttcagatttagattcggaatcctctcatactccaattgactgcgtgcacaatcttcttcatgatgctggcaaaaaccgaaattctagaaattcttagcttttgtaagagttatttccttaataaaaaaatcacttgagtaaaatgaaagaagaacataagaaattcatttgcgtttaaacgattgtcattggaggactaagtaaaatgacatcaatgcccctatcaaaataactctaaaacttttgattatttggacaatactcttttttgcttgttaagtgtgaattgaaaaacacgtggcgatatattattggaccacgtattaaagaaactataaagaaaagatagaactgtaacaaaatcgtataataatatatttttgcgaccactttttagattaaaatcatatgtgtaataattaaaacaaatatcccaatatatataaatatgtattgatataaaataagagatgcatgtattaataagaatataaattatattgaaaggtaggagatgggaattaagctatgcatgcatatataattaatttagacgcaaaaagcatacaagagtgatattgattcggctcgtctctccttgtattgattcatatatgtatatatatagagagacatttgaagcaatcatatatgaggtatgagccgaaccaatatcacgccatgtctacttctgcagaactataatatatatttattatttatatatatatataggttttgttttgttttgttttgttttgatgaagaggtagtggagtttggttcatgtatatataggaaggaataaaaaagatgatattatattggtactctaaattctaaaacatgtgactatatactaagtataaggataagaaaggaaccattatcatgatcactctattatattatatatatatatatatattgtaaagaatatccttcttcaaaattaacaaaacttaattaataaagtaattaaccaaacgaactccactagccaccctctttttcattttaggaaaaatgaacccaaaaattataaaaagggaatatcaactatgcagagtcaatttttctttttttttatcttttttgaaattatattataaataacaatataaaaaaaataaattaatgttgcatcaattaatgatccttcaacgcacgtgaaataataagagaaatttgtttttcatgtaaaaattaattaggtataaattagtattggatgaaattagtaatttatgttcactttttcataaacttcaaattattcttcatatttcaaattatttctccaaaactctctctgtttctctctctttcctctcgctcactcttccccttactctggttctcaccaaacaccatcactaaaaataccgtcaatcttcggtgaccaccattcacgaccctccctctctctctcttgttctctatgctgcgtgaccgagacccacgacctttcctctctctggttctagttggtgcatggttgatgacccacgacccatgaccaccaccgtcaaacggacggacaaatcgagtttgctttgtattttttgtttattgtttggtaaaaatcgagttttactgaaatttacattttttgtgattttttttgtatatggtacgatggggta

SEQ ID NO: 299783 - DNA, 2034 bp, Cannabis indica
aaaataacaaaaaactacataaaagtaacatctaaataacatcaaaacaacaataaaaaataacatacaaatgacaaaaaatcaacaagagtacaacataaaaagatcgtattttttgtaattaaaatcaaaaaatcgtaaaaatgtttaaaattccgtgaaacagtatttttgtaattatttttgttatttttgtgtatttgtgaaataatccctttatagtttgtcaggttttgtcgctctactagggttctcgaccctttcctttcatgttgaatttcctgcttgtccaatgttggttgccttctcccatgggtgggttacattctcatttcaacgaagagcctttctagtattactcttcgagagctggtacgatggaggatcttttggagcgtacaaagcatttaaacgttaatgacaaaaagggctgggaaatagacgagtctagctcgaaatcggagggcaagctatgcttccttggccagttgtgcactcagcaagagcactgtaaatccttcctaaagaatcccctgtgtcgtattcggaatttaattgagaaagattgggatttcaaatttaagggaaaaattgattctagtctctttcttactctgtctttcaacaatttgacccacctagattgagtgctggtgaaaatgacatgggtgttgcagcatggcttcttgattcttgcacaaatagaccacattttttttaattgggaagcagaattgcaatgctttcctctggaaggtcgtgttcttcatctccatatcccatccatgatgaagaacaatataatatgacttgcagggctcattggtagtgtcatctctgttcaagatttggatgttcctaaaatggcagccaacggctattttcacttcaaagttatgagctccattcattccaaaattttacaagacctcttattcctggcaaaggacggtaaaatctagctcccctttcgatgtaatcacctcccatatatatatgtgtgtttttgatgcgataaagtgggttgcgaaagtaaaaattgtaatgacccagaggaattatatcaagacgcagctaggaatatggaaaaagcatatgggacttggctggctattgattctgcaccaaaatttcagcttctctgagagccaaccactgttaatggggttcttccccgagccccttcaaaacctcttcagggtaaccctccaagttatcgacactacaacaaagggatctcagtcttctattcacgcggatcaccttaaggctgttatggttttgggaggttcttaggaatttactcaaggagaatacttggattttaaggatggggatcagtctcctgactattgtcattttatgtccttaataaaatccaatttcaatgtaatcttatttattttcaataaggatcagaaatcataccgtgacctagtcatatgctttgttcacatgttttatacatgattataggtttaatatataagttctattaaataccgaacatataattatttacaattacagtgatgtcatctcagtggaatgtaattataattatatgctttaaactatttagtctcatgatttatcaatgcactagatttacactaacgtgataatcatcgatgtggtttacttataattgtataagtataatgttttttctagggtattagaaaagtaaactagcatgggatgtatcggctatacatcggactagaccgatattgacagtagaaaagatatcataaacttaccatcatatttttttaaagtcaatgccacttagttgatcttaatcctgtgatggttaagttctatcttaattgtactatatgggttctctgacttgtttattacagcagactaataggatcggtccaatacttacgtcttgagaactcggtagttcaattaagtgagagtgttgatttgtaacgtccctgcttcaagcctccgttgggtccttacacccacggaataatggctcttatacacgagtacatcactctagctgctttctggatt

SEQ ID NO: 299784 - DNA, 1299 bp, Cannabis indica
aaaatctccggaattgagaaattataacgatctaatattcatttctaaatattggggtccacaaataattaattcataaataattataaaataacagaaattagtgctaattgtcttttactaatctaaattactaaagcagtcattacaccttgcaccctatttccaaacttaaccctatcccaatttcgatttcaccataatacaacctaagttcataaatactattgtcctaaaaaaaattgaaattgtaatcaatctatgtgctaaaaacataaaaacaaataattttgaagtttgtgcatgtaaattatttagaattttaaaaaattataagaattttttaaatagttataatgtatgttattatataaaaaaatataaattatgattttttttcaaatatcaaaaagagaaacacttttaccgatatgtgaccaaaaacatgttcctactaaagaattttccaataaatatgtatagtgggcaattgtaagtgcatgcataattatatatctcattacttttgttttgacaaaagttctcatgagaaataattatgactatgatattcatgtcattttcctttttcttttcattaaagaaaaacaagaggacaccttttgttctccaaaatccaaatgcccataaagaaattaatgagaggctcttgagaaaaagaaagaaatgatctaattaaagtagcataaagaataatttatattatattaagagctagctctttagattaattataaaaaaataaatatatatcatatattataagagtcctagaacgttcgaaaaagtaaaccaacaaagcaaaaatgtgatgtattaaaaagatattattattatgattatcactttaataataaaattattgtgtccatgattcaaactaaactgataatatatttgttaatttgctattattaagaatttaagaataatttattgcaaattaaattaacttattctaacttcgaaatcatgatcagaccattattaaaatttagtgggatagtgaacttatttaaatgagcacattttaaatgtaacctaatatatattggtgatcaataatttgttaataaatctagatatatatctactcatttatatttagagagaattactttatataatatttttttttacggtttgagttggttcggtgtttgttccggtagttgttgagtgagttacgatgtgaatttgaattgcgatttcaatggttacatcaaatatgtaaacacggtggttacatttatttttagtcattggatcattattaaa

SEQ ID NO: 299785 - DNA, 7265 bp, Cannabis indica
tttttttttttagctctaggatcaagctttccttgtttgatgtgagcattagccacacatctaaagatcttcaaatggtcatagctggtaacacggccacaccacatttgagttggaggtttgaaatttattgcagatgaaaagcatctgtttattagatagcatgctctgacagcagcctctgcctaaaaactctaaggcaaacatgagtatatcaacatgcaccttaccgtttcaagaatggttctattcattctctcagcaagacaattttgccgagagttccttggaactgttacgtgccttctaatgccaacctttctacaataatcattaaacaaatttggacaaaactctaggccattatcgattcttcatttcttaattttctttccaatttgagtttcaagcatggctcttagctccttcaactggttagaggcatcatttttatttttcagaatatgaatccacacatatctagtgtaatcatctataataattagaaagtaccttgcttcacctcttgaaagagtccttcaaggccccatagatctgagtgtaggtagtctaatctgttgcttgaggtgtgctttcatattcaaaccttgatcattgttaattttcagtaatttgatcaaacaaatccatttcagtacacacatatccatttcagtaatttgatccttctcaaacactcctttcttactcagatatttcaaacgaccaagattgatatggctaagccttctatgccaaatcattgttgatctattgtgatctgaagtggtggcattaacatggttcttggctgaaaattcattcaatttatagataccattcatactaactccaaccatgattgtcatagatccctttattacattcaacataccattttcaacctcaatagagcaaccatcttgatcatcatagtaactgagactatatttcttttaatatatggtacgtgttgaacatggcttaaatcaatatcatttcctttatctagattcagcacgacaataccaattccaagaactggacaagatcgattatccccgagttttacagtaccagttttaacagttgaataacttgaaaacaagcttctatcttgacaaatatgaaaagaacaacctgagtcaattatccaagcaccttttgatccattcttgaagattgatagaacactagcactatcatatccatcagtgccttctccacttgaaactacatcagcatcaccatctttcttggagttgtcgttctgtaggacagagcaatctcttcttagatgtgtggttttgttacatacaaagcgtcttttcttgaacttgaaattatggttgccttcatttgaattgttttgacccttactttccttctttggagtcttacctttgaccaacaaaccatccccagacctttttcttgttgttttgagtttctctttaattcctttgacataatgcattacgaacttcctctaatttcaatgaatcactaccatacatcatggtatccacaaaatgctcataactttttgtggaaagagaattcactataatgattgcatgatccttatcctcgactgtgatctccatattctccaaatcaagtatcaacttattgaaatcattaagatgatcttaaatgttcttccttgctgtcatcttaaacgaatacaatttttgcttcaagaataacctcttcgtcagtgactttgtcatgtacaaactctctagtttcaaccataatccaactgttgaatcttactttgacacttctctaagaacattgtctccaagaatcaaaatgagtgcactgtgagccttttcaagaatgtttgtcttctcttttggagttaatccttttggtagatttccttctcaaagaagtgtagcttgtagaccctattgatcaagaagaaccctcatcttgacatgccacaatccgtaatcatttttcccagtttacttctcaatgtcaaaatttcatttcccatttctttttgggccgatcttcaagaatcttgaacccttgaatctgattcttcatctctagtgctctgataccacgtgttggaaacaccaatgacaaactatcttcatacacacacatacacaacaagggaactccaatgaacacacacaaaagtacttcacagaacaaaaagcacaaccacagaaactaaagttgagaaaaattcagttttattgattttgagtaagcattacaagttgagaattacacttggttctctatctaagaaaatggagtctaatagtatttatagcaacctaaacactacggaagaccaactgtcataacggtcgagatggcaattatgacagttgtgcttacaacattaaatcagaagcctacatttgataggttagatacacatttcagggcatatgatctaataccactagtacaatatgtgttactttttgatttaatcattatattatactaccatattaaaaataaaataaaaagtaacatgcatactttgaaccttctgctggctaatttcaccttcaggcttagctagcatacaaaataggccaggctcacttttccttttctttcctttttgatacccgaccctatcttactaaagtagaataaaaattaaagtggtgcatcaagcacaagacctcttaaattccacaataatatataatcacaaaccatttcctattatcatactaaaaaacatataaagccacatggataaccaacatatattgagattaagtcatacccacttataaaaactaatagcaaacattgaactcaaatttaaagagaaatatttgttgtttttgaacagaaaagtgctagataaaatatgtacctaaaagtaaacaatctgaatacttcaaagccagcaactagccaaaccaaaccaaaaatttcagctagaacaagaaatactaaaaattatgagtaatctctctttcgactttcaagttctaatatatgaataatagttttcaattgttgaaaaaaatagaccacaaaattcacaacccaatttatactagaaaacaaaattgttaacgcaatttgtaagtgccatattttctattgtagcaaattatgtttttgtcactgtctactggcttgttagtttcatctaattctattatacgcaggtcttcatttattgacaagttagaagtatctatttttctaggttaattttatatcttgccatgtgagctttgtggtgtcattttaacaactatatcagctcaattccagatatgatgagctagttttggaaggttaagtaagttataaggttgttagtagtattaggtttctctactagggtatactttcttttcatacttggtggtacattctttgtgaagaagaagaaaagcttcaaaagttgaagtacattttaagttttgcttaattttaagggttttaagattgtgttattgaaaggattttagcagaggagaaccaaggggatcttggctataaaaaaatctaaagggacgtagatttatattcaagaattccattaaagagttagtgtaaactgatgtatgaatcttctaatgttttattttattcagacatgtataaaactggataaggtatattttgagattcatattggagttactttaccatagttctaggaaatccaagcattatccattgtaatgtattttggatgcaggggaagcttgtaaatcttaatcttcattcaactttatttttgtgtgattattttccaaagattcaattagtaacatttgattagattggtttttaaaaattcaataagttcaattagtttaaaccaatcaacttcaacattgtttcttcttgtttgaaagtaaaaagcttctatgttccataactataaacacctatgtatatatattggcatatatgagcataaaagaaaatagtagctgaacatttaaagtctctcagagttttttgaaaatgttcatgcatatatacattattcaaaattatgttgccacttcattggcatacaacattaatctagccatctcatgcaatgttcgtttttccattccaccacgacaatttgttgaggtgtctttggagactaatactcatgactattcccatcttttcacaaatttgagaaaatatcaagttttcaaactcctttccatgatcacatcaaaccatatacaccttttgtaaccttaagcaaagagcttaaaaagcaccaaatatatctaacttctcatgtagaaaatttaccaaggtaagtcttaaaaagtcatccacgcacaccatcacacacctctttcaagaaatactttcagtttgcattggttccattaaatctatatgaaaatcctctaaaaatcttcttgtcaaaagaacaataatgggaggatgggaagatcgattttgtttcccttattgacatgtactacaaaattaatttcttcctattttaaacataagaactccaagtactacttttagtgtcactatcttctccaaatctctataaattagatgatgaagtatgtaatgtgataggtcaggtttgtccaaatacacgcggtgacatttgacttgattgaaaagaacatatcaatgattaattatggtcatgtttcctataagaactaaaatccaataaaataaaactaaacactaagacttagtaaaccttacatcagaattagcatcaaaaagttgactaatgatgattacatttgccttcaacacttgaacatatagaacacttgtcaagggaaatactcctaagagtttcagatcaccttatcccatgatttatccgttatttcaatcaccaaatgtcacaaaaccttcattagtatcttgaaggttaaataaagactcaagagaaatgataaggttacatgagcaaccactatcaaaataccatttaactccttcaaagtagactaagaggtatgagaaactaaggctagattctctacattttgtttccatctcctccttcattcagtattttggacaaaagtttgctatccgtgagatatttgagtactgatgatgtttgtcaaataagttcaaagtttttaacatcatggtctgttgtgacctcttttatcatagaaatggaagataagaataaagcgcttagtgggttttcaattattctccacaactaatggattatcaaatttcactttgtgtctagtttcaactggtccttcttaagatatagcctacttgttatttttagtatcaaaaataaatgtaacctttcctaaatgaagatgaagcatgtccgtcaattgagagatcttgaccttgcttgtatagaattttgtacttaatggagcttccatcaccgtaaggtttctgaatctgaagagcttggttaagtgaaacagtccctgaagctagaaaggagagggtttgtgtaagtgccataatttctattgtggaaaattatttttttgtcactgtctattggcatgtttctgtcgttcctgctgctcttgtctcgtactcaagtagtgaatgattattatcactgatgggagatattgagaagttttgcccaacaatgatgatattttgtgtttgaaaagtgggttgtttttgtttttattttagtttttcttttagtatcaatatgtgaaccttgataatagcttgtggctggtacttgtttggcattatttttttttttgttttttgttgttgttattttgtgttgaccttagatttggccaactgacagcgaagttaaatttgatactaatgcttgccacatattacacaattagaatagaaaagtaaatagacacaagattttctagaggttagacccacatagttagtgggtaacgatttactccccttttaattgtattgataccagagataataccacttagatcattatagtaataggatctaaagatgctctcttaagattacaatctaataattgaagtttttaaatctcaagtgataatagagcaatgggcatgtgagagagggagagatgcgatacgttattaggcttagagcttaaggcttagggtttgagactttgactaatgctctttatattgtagagtttagatccctaatatcccttaaaaatacgtaaataaagctattatttacatagtaaattaataaaatacaaatgactaaattgccgcttgaaaatagggaagttgttgatattttccttctatgttcatgggatgtttaggcccaattcgttgtttgacttgctgtccatagatgaaagttgcagaccaaaataatgtcaggccaaaaattggtcggccatgcaccaatagtttgtcggcctatgctttccataggttcagctaaaggtggttagccaacccccttgaggtggttagtttgtcattccgtcatccctcctaagtactcagatgcctcgttgatggaagtgccgactaaatggcttggccttcttgttggcgagctatactcccacgttgcattgatattggccacgtggtcctgcaacattaggtgggaaaaaatcaggataacattttcccccaagtccatgtgtggacgtttgtgtgaatagggactttccaacttatttgggactgatgtagccttaacttggcaaatcatgcaatataactaggctttgaaatatttggtcatggctgtctcatcacattccttagtagtaagttaactgcattactcttctggatgttttttagttacatgatgcatgcaaagtgagaaggggtcccatagaagctatataagcttatgggagggaaatcacttttcatttcccacatttcaatctctctctacaaaaagtaactcttcaaagatcttccttctctttagaggacgacgcacataatgtcgcacctccgagatttttgcaccattttgatgattcaagcttcacatctgtaatttatatgtccaatacccttgggtccctagcaggcccttggttggattaaatgtacaacttaagactcgccacttgtctaagttggtatacttagacgatacttcattgatacccagccttgtatgatgtaatttatatgtcaagtacccttcggtgcgattggacagagttttgtctgtaccttgtcactttgtcaagttgctcacctccctttttctcttctatgcaggtgattcaaagtattgtttggggaggtgactgttggaatttattttaccaggatctgaggtctactcacaagtatgttgattaa

SEQ ID NO: 299786 - DNA, 3110 bp, Cannabis indica
agagagagagagttaaaactgaatcgtattaaatgaggaattagttacaacaatatttgattagctacttatagtagctagattacaaagtaaactaacatattaggacaaataacaactacataactaacatcctaactcaccaatcaataccaagctatatcttgatatcatgtactaagattatttgatcttgcaattttactaattatttctttaatttaattaaaagtgatcacaagtttacctccagctgatacaggacctttgagttatcatcgccttgaagaacaattatctcttgtctaaaatatattcatctattttgctttcctcaaatttcttttttagacttgatgcttcttcttcaaggtataaattctcgatatgtttattcaagttaggcgttgagtgatggcagttgggttagaacaactggaagaaaatacagatgacatatatacataaagcccgttgttctatgtgatccatgagtgccatgtcaggtgcaaatggaatgccctacatggagtacatgtatgctggatttttccctcctgattgtatggattaagactatatggttttatgtattttggtggaacagtggcaccatgttgtggtgtgttttcttcctattttagttccttttatatatcttttgttataaaaaaaacttgttctattacactgtaccggactcagacttgctgggcaaggacagctcaagagcaacaagcccaaagatccagccaagcagcatcatctgtttagaaaacgtttgacctaagagaaaaatgagtaattctgaacaatctttaaaataaacatgggtggcttcagatagaagcttatgtaagccaagcatgtgaaataattatgttatgtgaatttccaataccaacttgggtatacagtgggagctgaaattctgtgggggtagttactgattcttgcataataaaaattagcttttgattaatgtaacttagttttggtcagtctgttgggattttagaaatgtggtagaaaggaatatgatagagccatggggggcctttttcttttctttaattgtaatatataatgtaatcagatgagaaaatattgctctttacactagaggtggttctcctttgaagtagaatatattattatacaaaacaatgaggtctcatagggctgttatggcaatgatattttcttctgaatggacaatagagtgaacattgttatggaacatagtcatattttagtcacaagtgcactataagttgtcgggtggcttcataattcagttgtttaagttttatttttggctcaaatttacttcaaaaacttgattcagaatactgcagctgtcacatcttgaagttggtaggtacattgggggagagaaagagagagaaagtgagagattcttcacatgttggaggaataataatattgttatctttgtagttctgtattctaagcttggaaagacctaggagtactatatatataggctagtaatttgactgcttttgggacattcttctggctcttggtgaatgaaaaaacttgcacttgattgtgaaataaaagccccaccactaattcacttatttatttacacagttgttatatcaaaccaaaagccacaaagctaaaaaaagattcacttcatcaagctctagttgttgctctcattattactcttatatatatatatatattaatttatatatttatatttagtgttattctagtattgatatgagaataaagagaatacaaattgaaaagaaactacaacatgagagcttgacaaggccaagtagaatactaaatttggcttgaaatggacatatcccactccaactcccaagtagtggagacatcaagaaaagaaaaagaaagagaaatcatttggtgcagaataggaccaatggtacaatattcattagaaagtataattaaattattattttaaaaaatagtactaaattattatatgcatatataaacatgtcttagtcaaatttgtatgtaaatcactccttagtcaaacatgtggcgactgaaagttgatttggtgttcataatttttttgtgttaagataaaagtatatttgttagttattttaaacatgtaattcaagtaaaattgaataattaactgtcctttgcaataatttgtgtttttttataataattaattaaaattgataaaatttatatttaattatactaataataattattaaagagcacaactgagagcacaaaagaacaataaaagaaaacaaaaaaaaaacataacttgtggtaacattgttttaacctaaatgttaaaacatttattactacttcttatctagcaacatatatacttaatattttttattatgtttatttaattaaataatcgattatgtttattaaattaaataataggtaagaaatatacatactagctttcagtttatcattattgtattttcataaagcacattagaatagtgggtaaaaattcatattacaaatactattagatatccccacatatgtggcaccataaaaaaattatcacatggcaagaaggtgagattaacctaatgaaaactctttaatggtggtacgtacgtaattggttatgatttaatcattaatagaaatactattaataattatatgaaaaatactaaaacattattggtgtctagtaggtcgagtgagtcacatataaaattaaaaaaaaaaagtaatttttaaaaatattactaaaaagtgctcataataatatgttattttatattgactcattaccactatttggttgacctaaatttttctgttttttttttcttcttctacatttatcatatatgttttttatttcgtaccgcaaaattttgctagatggtctatatgagtttcttattcggtcaatagaaagaaaaaaactgaaaatatataaaaagaaaagccaatttaatattagtgtattactttctctaacatttattttttctaatctttcatgctgccttaactaaagggaaatttacaaaaatactgtaatttgggttaattttgtacaaaaatgctgtcacacggaaaagttt

SEQ ID NO: 299787 - DNA, 1968 bp, Cannabis indica
taggatgttaatgaaacatacatggtagtaaatctagatcctggtaaaatatttcgaacagattaaccatgaggttacaatcttcttcagcaatgtacgtattaacctcacgggcctacgtgccgagttgccaagagttgttttaggttgtatttattgtgtattttggttttatatttttgaggcatcattgtatagctcttttgtaaaactttttataacatgatccccaaaacacgctttttatgtcgttataatgtcaatttttagtgttttattttagtgaaatttttaatattatcacagtgtttaataattaattaatctattagtattaaactagtttataaaaatcacacaggttgcatctctatgtttagggcattagagaggaagttgagggggaatgcggttttgattcttggaagccctagtcttaatcctccccttgccattttcccgagatttcctggccttgtccatggcatctgagatctggcttctccaagacttcaacatcatggattttggtgtatctacacataaaacgacgatatgagtaaataagaggagcaattgcaagtcatacaatcataacaaaaatagcaaaagtaagaagaagaatctagtaaagaaatttgtgcatgggtgcaaccattcagtgaagtgctatagagttgtccacgagcaaaatctaaaatgccatgatgaccaatgaagctacagtactccttaaatttgggcaaagacatggccatcaaagggtctactttgaaagttatccttcatggggtgtctacggcaacttatgcctaggaaatatttgtcaaatcctccttgattcatctgggacatgtaactcaagctgggggtacaaaggatgcgaaagggtccattacctcttcccgaattactagcacctagtgtcccaacatcaggataagtagcagcaaaactctctgagatctcttcttcctcggacagaggaacgggatggcacaacacctaatcaaaattcacgacattatcatttttggctacatttgtgattataacgaccaaattagtggaaatcgcctctttcacttccctgggcgcttagcgctgccctcgaaggctgactgtgccaatactttacaattttgtgatcaagccagacctgcgaagcagtttggttgtcacaaggtccccaaccatcaattgctcttccaaaaaggtcctataccagacttctttcttgactatctcctctatcctaacactctgaggtggaagctctgctacaatcaaatatgttagtccaagtatagaaattagtatagtttaaaaagaagacaatacttaaggtatatcattagaatacctaggaagtcatgagtgcaatccttttgacagacagggcagtaacagtccaggtgcctatttagtcggaaaaaccccaactttgatatgtccatccttatgggattggccttgacactgcaaaagtaaaggatctcctccagggaaggagcctccagtttgatgatcttacagaacacataccacccagccaagagcctatatgacaaagggaaggtgagtgccacaagaaatgtgggactaactccatgcactgaattcatcaacactaatggatgcagattcacccatgacggaaagcttgtgccacattagtcaaaagacgttatggaggccacaaaattcagaatatgcatgcaacatcccgtaagatcgaaagctgttggctttctaatccatttcccagatggacttagtacgggcctgcactagcggaggaattttgacccatttgcctctcctagtctccataaggaggtccctctaagagatgagttccttttctggaatggtttccaagggctcctcaagttgagatgttaccatgggagcttgatttggtcttgtcccactaaagatcttttgatagatggaatagatccacct

SEQ ID NO: 299788 - DNA, 3153 bp, Cannabis indica
ttctttgaggcagctcaccaaggaagtaacgaatttggggtgaacctcgtaaactacctgtgtttgatttcttcttcttctcatctcttttggtttgcttttttagtcttgtacatgtgttgatcttaatttgtctttattcttaactcgttttgtatacggtttgtggagactttgaagtattactgatctttgcaattaaaattgatattagatacataatttgtaaagtaaaattaaaaacattcaagaaaagaaaatgtggcaaaatactgtgcattgaatttgataaaagtaaaggtcaaaattgaccttgaaggttgatttgtgtgtgagttgtataatgttaaaatcaatactaaaattgaccttgaagtgttcgaaactgcaccctcactatcactcttcctttctcgttctcgtcctatcatccttgccctagctttctccctcttaatttcttcctctcccaccgcatatgtgtgtgcactggggcattcattacaataatcatgctttttaaagtgtagaggaaatgaggtttttaaaagtacaatgaatgttagtatatgacaaagtatgtatgagatttcatctcaaaatcaactgacaataagaataagaagaatagtagctagtctatctatgaatctattaagtagtccattatcaatgtgactctctaacattgtataaaatagattgctttcataggcaacaaaatagtcaccatacatttagttttaaatgattttatttcatgaataaaaaaagcaagattgtatccactcacttaattagtacctttttaaattaagttaatgaacaactaatatctattggattttgtggtattgcttgtgttttcatatcatttaacacatgcaaatatatttgtggttcaaattttttttggaataataattatgatgaataattaatgttgatatatacatgatgtcttttagtatatattatgatgaattgggcacgtgataataataatgatatggtggagcgatagtaaattaataatatttgaattcacttgtttagtacgtaaattataatcattattataattaataattaaagtaacaaaaaatctcctattaatatacattttagggttaataaacttgaacaaattaacaagctatagatctttgcacccaaaattcgaaacaattattctacatgcgtattgtagctcataattatgtcattctatttctttgaccaaaatatatttatatattatggttcaatattattaattattattagtataataatgatcatagagatgaactttttttgtgtgtgtgttcttctataaattaacaacacattttttttttctcttgtttgcagaaaacacgtgatgatcataaataataaaaataaataaaaatcgtacatgataattattttcaccctaaaaaaagatatctatattttgcattgtcatgaaaagcataaacataattatgctgttatgttttatataattagcacttggatactagctaatactatatatgatcatatttagtttgtttattataattcttttgagaaggaagaaaattgagtatgaggctattttaatttaatatgaaataaatcacccaaatttatgtaatttgtcatatgtttttcacatataagatttaatattattttgtaaatatttataaaatttgtaagaagatataagattgagtattattgaaattttgttttgtggcctaaaacattagacaattttggcaaagtttatatgctctctagttacttggataaaatatatatttttttttttgtttttcttccattaaattttcttagatttaataaattaaataatgaaaagaatatttataacttaaaagaagatgaactatagtttttaataaaatacaaggtcaaatttaataataatactagtaatcctactaataataatgatattaaggtgaagagacaatggagaaaatacataatacttactttcataataatcatattaatatttacaattatgaagattaattattaaggtgcatcacataatgtgtcaaaaaaaaaaaagaatcacaattaaatttgtcaaaaccattattaaagaatatgagcaagcttcatcttataatatattcagagtcgtctttaggtaattagaccagaattgttgctaagatctttcggttcaaaaaacctcttcatttctttttttttaagattttttttaacattagcctataaaccctcaaaataaataataaatataagatttgaggtattatcatcaatttaaccaaaaaaaaaaaaacactctaaatctaatgatgtaactactgtttttaataatataatttagcatgctatatgtttgtgtattgtgtttgaagtatataattcacaagtaataaaaaaattatttattattattgtttaattttaatataaaaatatacagtgaaaatgtgggaccagctgaagaggatttgcagccacaagaggtggagaaaatgggacccccccaaaaaaaaaaactacaaatgtctaatttcccaattactttacaattatttagttatttaaagaaatttttagttttttttttttacttttgaaaattatagataaatatttaagtttagtgtttatagtaatattatttaaattatagttttaaaatttttgtagatagtcaaaatcactatccaattttcatttacttattaattaattttttatagtaataataattaaattatattttcaaaatttcagtcattttatccaagtgtcattttttattaatcatgaactgtcacgtaactattaatttgacacttaacgatcaagtactaatagaaatttcgaaaatataatttagtttagatatttatctgtaactgagagttaaatttaaatatgtataccgcaaattactctttcttatcataaacacaacaaaattataaaattaattttcagcacaattaattaattattataaattttagaaagaattacttatgactctaaataagtataccataaataatcgtatgcaattgtagtataaatatttaagtttaactctcggttgtaaataaatttttaagtttaatttttgacgat

SEQ ID NO: 299789 - DNA, 1532 bp, Cannabis indica
tctgatttcctcaaagatattgtaggtatatacacaattgagttctaaaaaagaagattgtctcatgcacacttactacttttcttacatccaacattaaaaaatccttcaacgaatcatatagaaaaaataataagtgcagacttcacacactcaaacattgatcttgatggttgtaatgcaattaacatatttatgattcctggacctattaaaaaactcaattcaaactctccatgtatgatgcaagataggtccacaaaatatttcccaaaaaaatttaatgattaaacaacaatagatatagttggcttttcagtccacaaataaaaaaaataaaggtatccacattgaatagaagtattccttggccttccctctttcgagactgtgtcaccagccctcgtctccacagaggcagtcgtggtggtaggcgcacattcgggttgttcaagttattagtaggtggtacttgaacatgggatcaactgcaattgggtcacgtggctcaacagatgttcatcttctcgtctacaccatttttcaatgtagattgtgtggattgcaaggaattttaggatcaaatttgagagtattcttagctttcaataaaaccagaaaaatattgactccatttttagtcaacgatgcgaaattatgaaatacgacaatgtgattgtaagataacaaataaaaataatattgaatgatcaacgacacaggagaatttatagaggtttggtcttagttatttagaaataacctactccccttagattgttattactctcaaaacaattaagatcatttgggttggaaaatgagtttcccaataatttttgaaagattacacatacatagtttttcccagcataagagctctcttgaatcgaaaatgaatctcatttctctaaaattagctactatttataagctaataagtaaatcaattacattaattaattacacaatatataactaataatgaatattcaccaaattcctagtctttaggcacccataataatttggtcttcaaagatttaggagctgatttcatggatctttagagtaagttgttttatctgatcgatctaaccttagagaattcgatttctttattcaagtcggcccacactgcttatctaaacgttgctaactggaaaaccattagtggtaggactgtctagctgattcaacaattctaacatagtatgttttacttccttgtctctctcgggagccatccaatcttagtatcgttcattcattaagtgccacccatatagttatttgacatgccacgtgtcactcaattttatgccacgtcatttagacgattttcgggatagcaacaaccaaaagcaccaatgcaccaaaactatgaaaagaggtaatagattgaaaaatctatggttattccacaatgaaaaaataatgacaacaataatttgtcaaaccttgtaacgacaacaataatttgacaaaaatatgctcacgatctctagaaacataacaaacacatccaaaaa

SEQ ID NO: 299790 - DNA, 4062 bp, Cannabis indica
cttcagttttgtcagtacagactccgttttaaatttattaaaggaacatttggaagtaactgatactacatgtttctgtctagacccaatgatcaaaaatctagaccttatatgtggcctatttaagaaaataacagggtttgtacggacgaaattagagaaaatttacagttttacaaacattgggtacttatgccactaaaaataaacattgagattatgccatttacaaacttaaaactttgggtacttatgccgctatttaccctttctttaaactaaatgtatttttgtaaattaattctaaaaaattaatttcatttatttcaaaattggttatgtcgttaattaattttaattaggttaaactaatataattagcctaacacaattatttaaataaagtaaatggaccttcataattggggttgttcatgtgaaagagggttaaattcagtatatcgtacctattactgccccctaactctcacacaaggcgaaaggggaggaatttaatttttcagtaaataattgttattaatggaataagcacaatactaatttggcccaaaagcaaatatataggcttacacatacaaactgatttagatgactatcatgttgctaggtttatcacaaataaaaaaaattacaaaatttaatcctgaccaacttttcttggatcctttaacctagctaacgcgctaacgacctcgccaggctctttttgagatttgtccttttctattgaaataatcttttaaggtacattgatctattcttacctggcggacatattgatagtctggttagatgctttctggaggtaatttgttgatattaatctcatgtgggatctgcccggcatgctctgcccagaggtctctgtttatgccaagtatcaactaaactaaaccacatatgggtgtcacaccaagtacgcaaactttgagataacaatattagatttgagttatatgtaaactgaattgtaccgaatagattagattaacaatcctaattctcctcgactcacccttatacccaatatattccaggatagaatcacaaataaagggatcaagagggaggtttaccatagccaatcacccatgtcaatcaaccccaccataatgacgacctaagacaacatgtagtcaacatacatatatacagaacaaaatttatatcctcacaaattgggttttttgtttcaattttctttggaaatgatatacaacaaccagttaggaaatgaataaatcatcaaaatccgcatttgtattagtttgaacatagtaagaaggacaagggggaattcacaacccccaaatagccaagctaacaaggacgttattaactggattgatcctattcagagcactcaatccaggaacaggaaggcagaatgtgcctataaagggccataaactggggcacagaaattctcttcctttgctttggccacacatacaacagcagtacatctttaaattctctcaccattcactgcttcaaacggttcgtagcgaaagaatttaatctcgtttatgcccccacaatcacaaatcggtacaacttggaaagatagtaccacaagacccctcttccaattattcaagctcacgtcacatcattacaagtacttcaccataccgcgaccctccacactaatttttgtggcctgaagccgcttcttcttcggtgcctttagctgctgcaactttttattcatctgcagtatcaaggattaaatcataaagaataaattagaagagagtagagatacacagtagcataagtagaagacacggtagcaaatgcaacatcacagcctagggccttaaaaaataatgtttctacccataaatacagttcaactagactaatttgaaagaaatacacattttccttttaccatctagataatatttattgcaaaatcatcttttatttacctttcaaaaaagctagagacatacctgacatatttaagttcaattgataattacttaagaagaagaataccaaccttcaaccgtcgctgatcctgtattccttgtttggcacgggctctaatttcatctggatcaatcttagactgtggccgtacaacaaaatccatcggagttgcttccggccttgtagtgagttgtctcgatgatgattgaccagatttgcgctcccttaaatatattttaacaattataaaaggcttagagcagattagaggttcaatttgattgtcttgagatcagaactggtgtgtcatcttacctagaaaattcatctaattccagatcaccatctctagattccattctcgctgagttattcgcaggcctgtgtgattaatacacatacatagattagaaaacaaaagaaataaagaaaaaatgcaccctctaacaatctaatatgaaaatgaaaatgacgaactacataaatgcatgcagggaaggagaagtactttttgaccataggccttcggtatggaactctctcatcttcaacatttctcatgtcctcaaacctcgtacttttattaaatattggtcgactctgcatagagaaacattctgtgagagaatgctcgggtccaaattaaagtaaaagagagctattcaggatcaacactttacccatttatcaactaattcttttgcaagctttctgtttgatgtggtttcttcatcagatttggacaagaacataatgacctgccaaaaatgaaaagtgttaaagttcactttgtttctttcaaatcatgttgacaaagttgtgtaattgattatcaagtcaaatgaaacccctcacctttcccagaccactcttcttcagttgctctcttctatcatactgctccagatcaattggaatctgcatgaaagaaataaatttcaggtacttaataagctatcaacagattaccaaacttctcaaactaaggaggtaggcaataaaacatacatcattcaaaatcttcaaaattgcagcacgaatgtttatatttggcaaacttccatccggaagaggttcaagccaggtcctaagtaaatttagcactccgtgatctaagaactcctgctgaagctgtttcctgaacacccaaaaacacataatatacattaaatacatgaaatggacacaagtccacctaacagaggatcaaatttaaacatcttactttgagagaacatcagtaagcagaggcaacttcttgagtttattaatggcaggttttccctgtctgttaagttctgcatcctcttcagctgtgacttcaagctcagccatgacattctcaactagcaatgcaatttcagcaggacttttttcatttttctttcgtttctttcccatcttaaaaagctgatcaatttcttcgtcttcatcaacctcttccgcctagcaaaataccaaacaattatagcaatacagtaacaaaaagagtagcctaacaagcaattgaaggtctatagtatcaatagttcagtaccaaacattttttgaaaataaaactgacatttaatgagtaacattcgttattatgtcattctaagaatttaacaaacccaagcccaaatagataaagagttttttcttgtttttgatggaacaaaacttcatgagagagagggatgatgatgctaaatacgatcactgagcaacagtaattaagaagatgtatgcatgtaggagtgggataaaactcaaacctcaggcgcataacgaggagagcgtcgctcattgtcactgccataccggtcagcagcatctacgccagtatcatctataaagttgtcatcatccatagttctgacaccttcttgatcatcctactccattcaagagagtaaactttaagagacattatttaacaaaagaaaagataacaagcaagtaacagataaccatttaagctgcccacaaacgctagaagagacaaggtcagcatataaagaatcatagccagcattgcctatgaattttacattggtataccaactaaatacatttttcgattttaccatataccaaacaaagtacacacttaaattg

SEQ ID NO: 299791 - DNA, 2426 bp, Cannabis indica
atattttagtcacaaataactttcttgactaaaaattacatttaatcacaaaaatttatgatataactaaacaattgctactaaaagtaattatttttttatattggagtataattaagtaattaatctaatataattttagtgttatatggtattaaataccacagtattttatagcaatgctctttatatatacactatttcaagttgccttttttatattatagaactacataattaaacctaggcatgcaaatgcaaatatagtcaatgaaacagattaggtagaaatataataagatcccaaatttttgccttctttctacttttttttaaaaaaaaaataaaaaataaaaaaataaaaataacttttgcaaaaaaggttttaactttcacaatttaagcctagcttagaaagtcatagaatatgttgagccgcccatgaataaaacagtaaatatacattaaaaaaaacctaattaattaaatttaacaacataattaattaattaattaattaattttggtagatgtgtggaaattaaggaaggggttagtaagtatataggctaattaactagaccagaatatatacggttgttacttggagataaagcatagaatctattggatgagttaattgagaataattaataagattattaattaaaattaatataataattaaagagaatgaaacatacattaaagtattagtgagggattgattattggaaaattcaagtcaatgaaatgaaatagtcaacgctcttgtaagacagcaatcctctatacttaaatgctagttgtactttacccaaaagtctacgattcctatcacttcaatgtgtatatatatattttattttaaaaaaatcatgtcttaattattaatatattaattattattcataatccaatctcttctcatagattctctcattttctctttccttttttctcgagcataaataccccatcataaccacttctccaatactacaacaacttaattttccctctcattttctctctaaccaaacacactatattatatatatataacaataaatatatattactacttttattataacaataatggtattggccactccaaacccaattcttagaggagagaaaatagattcaaatattgagcttccaaccattgatctgatgggagagagaaaaaagtttgtaaagagatagttaaggcttgtgaagagtttgggttttttaaggttataaaccatggtgtaccagttgatgtcatatcaaaaatggaagaagaaagccttagcttcttttcaaaatcagaggcacaaaagaaacaagctggcccagctaacccttatggctatggaagcaagaccattggatttaatggtgatatgggtgaagttgaatacattctccttaacaccaaccctaacaccattgctcactattctaataccatctccaataacaaccctactaaattcaggtatatataattattgtatatgttttggtttggaatatattgttatatatttacataggtctatatatagtagtagtagtgcttattatatatatataaatatataatatttgcattgaaattattttgttatatgtacttgtgtgattgtgtaattaatatagttttatatactatatgttagatgtgtatataagctttattttgtacgtgcatgttaaaatagaatgtagtactttgttgatggtgattgatcatgcagtttagtttaacttattaaaatttgataattgttttcaaataatttcatgtgctttgtgtcatattcttctgtgttctatttttattatgcactcaaataattcaaacaataaatttaagcgtagaagtttttcagaatttatacgaaaaaatagtttattagtgttttatatattatttttatttttaatgaatttattatgagtgtttatatatattttatgaatttattattattgttgttgtttttgcatggaaatatatcatgataggaaaaacaaatataacaagtccaattcatgtttaagattatattattacatgcattgtatatatagtaaggatacgatctcattaactgcaacatatgtacaaaacacataaaaatataagttatgtggatgttgttataattttttttccaacttttaagtgtatacatctaactgatgatgtttttgatatttttgatagttttaatttaaattatttttatgtataagattatataagatagttatttaaaatattttgtaaatttttgataaatttaatacgcgtgcttattttattttagggttatttgtaccatttttttttattttatacacttaatttttcttttgtttttgtgataaaactttattacgtttatttttctttataaatttgaggt

SEQ ID NO: 299792 - DNA, 6498 bp, Cannabis indica
agagagagaggttataattaggtttataattggtgaaattagattggcccatatgattattttgttagagttggttataacctcacactaatagttatttttatcgttgattttgaatgatcacttaattttattatagtcggttctcgaaataaggttatgtttggaccaactagaaagctcgttttttagagtaatacaattgcgtataattaatctcaataacacaattaaaattaatatgattatatataataatttatggtaaaaattaaatatatatatataacattacttatttaggttaccatttgtaattgtgctcaaatacacgtcttgagattcaaattagtataaaaacaaaatattattaatggtcattaataaattaaatattcaaaaattaattagtaacattattgtatataaaatatttattaatcttataattaatgattattgtcaaaaacataaacaaaaaaacaacatttatttttgtgtcaaacttagctactatattttatgttaaatttatgtgctatatttagtataacattttacaatttaacactattggaaagctttatgaaaagtgcttaattatagttttttttttattaatttatttattagaaaaatcggattcattaaaatctcaaaaataaatccagtgggaaaaacttcaagagagaaaaaagtacttaaaataaattgattaagtatcaatattaattacatcatggatacacttaggtggcatttagttgggagtaataaaaatataaaaataagagtaaaaataagaatataaatagaataaaatttaaaatgtattaaaaaattgataaaaatttattaaatcttttctcacataattgcattggaattacttttccttttaatttcaaaataaaatagtccctctactaaaatggtagaaaaataaatccaatgaaatgacaatctaatattttaaaatgcaactaaacaaagaaatgaaataaaacttgattccttttcattatattctattttattacctccaaccaaacacttacttaaaatagctaggcgacccaacataattatagacaaagatgtagctagctaaagaatgtgcaacactaaattatagctttatactactaacttggcatattatagctatattataattctcaagtaacaagcaaaattgcttcttatttatttgtttttttttaaaaaaaatcaaatactctttttgtcaaattagtgttgtaaatatggattgagatttttgacccaacacgaaactagcacgagcttgggtggcacgagtatgactaggcatgaaaaaaatatgagcttagacacgacataatacaatgctatgcattggcatgacacaacacgaaaaatatgtgtttaagcatgacactatacgacatgcccaaaaagtacaacatataagcatgaatagactagtctaaacggctaggcgcactacaaggctgatacaactaaaacataattctgaatattataattctattagaaaatgtaaaatatatattgatttatttgtagagtatgatttaaaaatttaagtatttataagtgaatactcaaattctaataattataaaaattttcttatatgattgtcaatacaatattgttgaaaattatatgcaaataactgaagctataaaaaatacatatagttaagtaattacctcaataattataaaaaagtacagtacaaattcgagcctggatatgaaaatgagctagcctaattaagaaaaataagccgacctaagtaaaatgcagcacaaatccaatgacaacgaagtaccaggtctacgggctctgtcaggcctatgctttaaaatattggtatgacacgacatgtctcatatttatttatggcatggtacaacacaacctatactttaaaaagcacaaataagtatggatcgggtcagcacgacatacacaaatttattgcactaggtcaattatagcttagtcccatgccattacactattgtattattcattgtgaaagtcaatttggctaagttatgagtagttgtattgtgggctctgttacagtataaaagatactcatttactattatttatattttaaagttatacatattattaattctaaagtcaaactttgatcaataaaatttattagtttgactagattgttactcaaaatttataccttaatcaatggcgtgttgctcaaaattcaaataatgagttgtcattcactggatacataccaggggatggagctgagcaatggatttctaaatgtcaatagcattaaggtcaatgttgatgcaggtgtgtttatcgaaacctctaattatggtgttgggtttgtggctagagactctagtgatttatttgtggaaggcagcactaaactgtttaatggctcgatttctcttgttgtggccgaagctattggaattcgagaggcattaagttggatcaaagaacatgcgtggcttcatgtgacactggaaacggactgcctctcggtaagctattcgaagcaatacagttatactttctatgtttggaaaagttattagtgattgtaagaccttgttatgtactttgcgtaatgtttcttttcattttgtaaaacgatcagcaaatgtagtggctcactcctttgtgagagcctctatatcctaccttgattgctttttcaacttggacactgttccggttagtttgttacctagttttgtaactgagttactcgtttaataaatgatgactttcgtttaaaaaaaatagttcatttaaattataactcatataattaaagatagttttcgtacggataaagttttattgatcgaattttagtgagggtaccaaatatatataattttaaaatatagagtactaaataagtatattaaaaatacaaggtactaaataagtattattgaaaatacggaataccaaaagtacatttagataaaaaaaatattatgtaggacatattcaaacttggaaaaaagagaataattgttattactgggaaaggctaagagagcttgtggagtccttgactaagagtatcctacagaaggatcctcctcgtgaccttatcaaagatagcataagaaaattcatgaaagtcaatgaacattattatcaatagtgaattgagatatactgataagatttttataaatgtcaagaacatgtaagactttatgcgagaatagattacgagaggaaacaagaatacatgatccaacagaaagaatagggagagattttccattacatatactgttagttttcttttccctttgtagtcaatcttgtcatttagcttggaaccatcagggacaacatggtgtgattctccactatccatataccaatgaggatcttcaacgttgccaacaacaattaaaagagcctgagactcatctagaaaaaattaattttgactagagctaccctctccttgatagctgagatcaaattgatgataacatttgagacaatgtgaccagctctgccacatacttgacatataggttgattgccaataagattattggggttaaaatgaccgtctctgccacgagaactaccttgccagcctcgagtacgacaattattatcagaagatgcaagtggagcttgacctttctttggtgcaaagacatagttagatgttagattgtgaagatccaatgcagtaataaaggtttgttgttcaattcacattttttgaatttggagcaagaattgaacctccaagagagtgatagtttctttggaattgagaaaaattattgcagaatcatattcacttccaagtcctccaagaatgtagaggaagagctcatcatcactgatagcgtgaccaaaagctaatgaagcatctatgagacaagatgtattcatccatatgagtggaagctttctttgttgattaaggcattccacgaagttgaagaactctggcatgatagtgattggagtagagctaaatcataatgttccataattctgtagaagaagcacatcaagcaacatgatcaagcatggctttagagatggagttaaacaaccaactcattaggaactgattcaagcgtagccaattagccaaatcaagatttagaattaatcttgagccattagttggatctgacatcattgctggagggtgagcatgaaagctagttagaaaaccttcaagttgatgtcctcaaactattgaataaacttgagatttccaatgtaattagttgctgcaatccaaacgaagtttgagaggcatgataaaatttagaatgacttaaatggcagctggagatgccagaacgccaatagcagaagtggagccatcaagcctaggaatagaggtagaagtagatgcgatggatgaaagcttcaagaagagaaaaaacaaataaaggaaaaaaatgaacctaaagctctgataccaacttgcaaaaatgaattgatcaaatgagcttgtgaattcactagagatcagtttattataaatactaaagattgaatacaagagagtggaactgaatctgttaaaaagaagaaaaaactagacgggaagagtaacaaactcttgcctaatcacacagctgtactaactaaaaaaataacagaataactaacttattaaccttcactaacaatggatctttgtagaaatcatgcatttgttgacatgattgtggactatcagtcctacactaattctaaaatctgcacccacatcaacatccaactttggaaagttcgcatgagtttgttccaagacaagttgtagcgcgagatgcttcaataccaacaacaacactcgttaggtcactcttcaagttggcttcttgatacctctggaaaaatctaaagcccacacaatcacaccatcattatcaatcaatatctattcatatactaatttgttttttatgataccacacctcccacaatattactatcaattgttcatgataggccttctttaagattggatcacactttaaaataaaagcataaaagtatgtggtaagagggaaagaacaaaaatctcttttggaactttagagataaaatgtttgagattcttacaatcccatggtgcataataagtagttccctcatcatcctcacaaagtgggcatatgcaactagaggcacccaaagtctatacatgtttttaatgtgggtaactaatataagctagctttccaaatgaacaccttcgtttaggaggaaggtttaaaacccaaagcattttccactaaaatgaatgacctttaaaacctaaggttggtcacatcctagcttactaatctcattccagtacttgctcttgattgtgtaccctctagattcattataatattaaattaacttgtctatcctattattaaggccttccttcctataaaggtataaaggcttggaaacttgctaatcaatttggtaattttgaattgtaaaatctaataaatgttttactttttcatttttttgtttttttttaatttttcgctctaatgatggaatggaaatggataagaggctcgtgaaattgacatgtggtatagagaagtcctttatggaaaaatggggtggaacctcctcacaggtaaccagtctttatgctgttgaatccttgaagctaaatatcttaaaggaaagtcctttcttggatgcacttctaaggactctaactcgtggttttgaaataatgtggttaaaaccagagccatccttcgcaaatgcgcctacaaattggtggcggatggtcaggataccaatatctgggatgatccgtggatagcacataagaaagatttcctccctctttttgagaatcctcccttatggttcgagtaaagtggtggaactgctgttagacaatggagaatggaatatccaaaaacttaacagtatgtttgattgtgaaactacgtcggccattttgaaagggggcaacccgattggccatggaaaggatggataggcttggacgttggaaagcaatgatcaattttcttacaaatcggcttatagagcccaggatgtagaaagagcgactcatggtgaggtcaccccatccaattggaggaagttatggaacagtaaaatcccagacaggctcaagattctatggttgtgtatcctgtccaaagctctccctgctcgtgtggtgattagtaaaaggtttccaattagggagtatagctgccccctcggtggaactgaggttgaatctatggaacaccctttttttcctgtaatgtgacttttaacctgtggcagtcctctccttggggtattttccctatttgtaataatgggattcagatgtgagactgggttaaattcttatgtgatctcaaaagcaaagaaatcaactctgaggatgtctggcatccctcccccccaggattggctgaaactgaattgtgatgttagagt

SEQ ID NO: 299793 - DNA, 3167 bp, Cannabis indica
ttttctttaacttttaaagtttttttttaataattgcataattatattaagaactaaagaaattagacatcacggtcgttacaaattaagtgaaccagtataaaggacggatctaccataccagtcacatcataatatcattcccattacaatttttagggatataattttatcccgtaatgtacttttacggaatgtatttcgtggtatattagatgggtctcagggtacattaaatgagtgtcagggtacgtttctactttttaaccctaattacccctagatcaatctcaaccgtcagatcaaataactcactcatctgacggcttcatatctgacggctaccgtacattacgtattacaatccgtgaaagtacaataatagaacaaaatcatatcccacaatttttattctattacactaccattcatattactgttactatcaccattcaataaactggttaatcccaaatatcccgaccaaccacccaatccacgtagcgaatgcgaaccaaccacccaatcccgacctatcaaccaacctgcatccgccacaggaatcgggtggtcgggatcctcaagacgaataagaggattcattcccattacatcaaaacaaatatcacctaaagattaacgttgtaatagaaagttgacggtatcactacacacaaattattaaataaagagagaaattaaaactactttctgttcccttctcttctctttcattttctccactgacagaggaatacctgcacactatctcacgcacgcacgcatactcaaaacacagaaaatagcatacacacacacccaccccatccctctctctctcctctctctataaaactcatatataaatataaatatatatatatctgtactgtacatgtaacagtagtgagagaaactaaaacctatatacctatgcatttttatttcaattattattattattattatacatacatatttatttaaaatttaaaaaaaaaatgaaaaacccctaaagctaaccacccaaccaaacatacccaccaacacactataataaataaaaataaaaataaaaaaaaataaactctccattcattattattattaatattcttgctcttcatatatatataaatatatagtttggtttattgtggtcatagttgaaaaaacaaactttctctctttctttttcaatggagatattttcttcatcttcttcttcttatcaccatcatcatcataatcagatggagattattaacaatggatcatcagataattcatcacatttgccacctgggtttagattccacccaactgatgaagaactcataacttattaccttcttaacaaagtactcgatagttctttcactggtagagccattgctgaagttgatctcaacaaatgcgaaccatggcaactccctggtcagtcacacacccaatcaaaactctctctcctttttttatttattttttaatttttttttatattttgaaattatatatatatgcagagaaagcgaaaatgggtgaaaaagaatggtatttttacagcttaagagatagaaaatacccaactgggttaagaactaacagagctactgaagctgggtactggaaagctactggtaaagatagagagatttacagttctaaaacttgctcacttgttggaatgaagaaactcttgttttttaccgtggtagagctcctaaaggtgaaaaaagtaactgggttatgcatgagtacagactcgaaggcaaattcgcctaccattatctctctcgaacctccaaagtaatatacatatatatatatatacatatatacacacatatatatacatattttgtcttcttttcttgtttttttatgttaatggttttttttttttttgggttgataggatgagtgggtgatttctcgggtttttcagaagaatggagcgagtaatgtaaccgggtcgggcacccgagttgtgatcgggtcgaaaaagacccgaataagctctaacagttacaataatgaaccgagttcgccttcttcggtttcgctcccgccactattggattcatcctcaccgtttcctccggttactaacagtaacgttacgattaccgaccgtgacggttgttcttatgacagccaaatcccaagggagcacgtgtcctgtttctccacctttgtcgctaccggaacccacggcagcaacgacaacaacaacaacaacaacaatggtttcaacaactgctttgatcagtttccggcgccggttttcaccagaacctccgctgtatccggtaccggtgccgccgcgtgcgacggaggagtgtcggcttttccgagtctcaggtcgcttcaggagaatcttcagcttccgtttctctttccttctccgtcgccggggatttccttctacggcagcggaggatccgtgactgtgccgtcagagttctccggctgtaactccgtcgggaattggccgtcgccggctgtggtcaacgaagacgttaagaacgtcggagcaaccgaactcgactgcatgtggtcttactgattgcggccgcgcgtggggcccactcgccgacgtggatttcaggtttttggaaaaccgcgaaatccgtacctgcttacgtgttatcttattataattattattaattaattaattaatgatgtttagtgttattaatcagtggttttaaattaaagtgagtgtgtgtgatgaggggtattatggtaaatttggtgttataggaaggtacgtacaacactacctttgtttagttcatgttagaaaacgttagatttggtctgtattaaatattagtgtgtttatgtgactttgaagaatgtttttattttattttatttaagtaattgcgaatgttttaattgttatgacgacgtcgtttccttgctttaatgattcaaattgcagtattatgtttttctattttttattttacaaaaaaatatatatatgtatattttatttatgaccagtgtaataacttgagttttttaaggtaaaatttttttaactgtcgtttcacttgtatttaatcttttaagtttaaattttggcagaaaaattctttaaattattgaatttgtaaaaaatttaaggtgtcattcggttaactgttactata

SEQ ID NO: 299794 - DNA, 5946 bp, Cannabis indica
tatacatatatatatatatatatatttagaattactttttaatagatattatccattaatgggtactaaacaaaaatatataaagaatacttctcaatgagtattacctcgatggttactaaacaatttaattataaatattaattttacaaaatattaaattattatattttgatccagtgataaataataaaaaagaaatttgaatttctatgcttaatttagatacttaattaaagaaaatatcaaaaaatatcactttttacactatattaaaagtatgtttaattatatacaaaatacttaagtcaaactcaatttttttttttgccgtaaaaactttttttttaaaattttttttcttcggccgatgaaacaatctcaactcatataatgttaaaatggaagattatttgtaattagatataaaaacttgaatttcacaatattaattacccatgaatgggtaatactcattaaaatgcaccaaaatatataattatacaacaaaaaaaatatattgtataacaaaataccccaatccataaaaaaattaatacaattgacgtaactttaaaataaaaatgaaaattttaataaaattaatataaaatatactatgatatttaagtgatatgcttttaaatcttaaaaaaaaaaaaaactatggattgaaaataaaaaatgtgagaaccataaaagtttatatgacaaaaaataatttaatagtaataaataatataaatgactcatttttctacaaatataaaaattagaatatttacctgcatagtaatataattttgagttatttattataatttctcaataatcaatacaaagttgtatatcatatgaaaaaaaaaaattatatgagtatataggcataatgaatacattttctacatttttcttttttcaaataaattatttgatatcatattcatatcacctgaattttttgtgctattattattattatatatatctagctattctaaaaaaaaaaatacatggcaaaattctcactctccttaatgggagcaaataactagaactccatattatactgtatttgatttgttcttcacttttcttcttggttcaacaatatcaactatcaagtatactaatagaaaatactgaagttcaccattttgattaattacaaataaatactctctacatctattgttttcataaagataatgctcaaagtgggattattgtttaaataaaagtaaacaaactttgtgataaaaatggttggaatccttgaagcactaagtagaaaataagcttagctactgcatatatagtggattattgttaaagctagggttcttccggactattgggatgatgacacaaaaaataaaactcttatttaaaatttagaatatctcctaaatatgatgcgtatttgataaatattcgaaatatagattcaccaaatcaatacatatatttgtttcacttccactcactcacattgtatatatacgaatgaaaacacatacaatatatataacaacaatattaatgagatgacaagttttcgcattaaccaataaccaagaatatgacatataattaatatattgatgtcatgtgtctatatataatgcatgtagtcccatgagagagtaatagtttatgggttgttccccacctatatgcatgtccaaataagcaacaaaagtagctttttgctaaaaagatgcgaaacaagcaaaaacatgtattaaaaaggtccccacccactcaattcatttttttttttttgatttaacaattcatttcactttcatttcatataaaaatcttcttctacatttttttttggcaagaacatttcacatataaatttggtgccctcttaatggttactagtattattatctattgatggtttcttgtcttgaattttacattaaatcaagatccaatgatccattttttttttattttttttagcgaaagaaaaaattccattaaaaagcacaaaactaataaagtcacagacattgcaaaatagttaaacttagagaccgagaggtaagtcaggccaccaaactttagacaaatttaaaaacaaaatgatattagctaaaaaatgagatataacattatgagcccaactacaattaaaaaaaaaattatctatgataaaaagagaagtcttttttaatgtcatgcacaatggtactaaactcatatggccgcctataattactaaaagtagcttgccacaaacagaggtaatcagagaacaccgcaagactcctataacgaagccgcaaacaaaaaagaaggccttgcaacaaagtcgtagcctccgccacacaagctgcaaagccaacactcgttggagaagccaccgaacgaaggaactcatcggtctgagtcttcaccaccgccccgaggtcaatttcaatcttgatcattaatgtcaatatccataaataaatcaacatcacccaaaactaaatcaacaatagttgtcccatgagaaggactacccacacttggagcacatggccccatatccatagcagccaaaggagacagagcatcttgatactgccaaaggaaaatcaaagaccactagctagtcatagaatccgaagtaatttatgatcatggatgaaagtgttttgtctatgccatattcgccaacaaagaacgacgaactcctccatttcatgctttgagataatatccatacagccaaacaaaagctcataaaaattagaaattaatttaagtacatcaagacctttcaactccctctctcgcataatccctttaagggaggggaaaaatcaaagagcatgcacaattatttcattattctggaagcaaataggataaaccttaggcgcgtctattccatatctagataaattagcataacaatgcaagcaattcaactttgctttccaaataaaattcttcacttgtggggggatggacaaagaccacataaatttccaccaacgaggctgctacatggccacaccccaaccttgccacggagctccaatactcactttttgcagtatattggccattctcagtgtggtgtcaaatcaaacaatcctgactagcataaaatagacacagggatagatagaacagtcttagcctcacctgcatcaaaaagaacattaatcaaagagacattccactaacccgaaaccgtcttgtgatcacaaacttattgaaatgtataactactctgaagaaaaaaagtacaacccacatgatcttttggaacccaagcatcttcatgggtacaaacctgagtcccatcattcacaagccaacgagtccctttcttccataaatcacgacctcaaagaatacttttatacttttccaaaaaaaaaaaaaacaaaccccttttagtctcctccacctcaatcaaattactcctactaaaataaaatcctttcgttaccttagccgctagagagtcaggaaaaatgtataattgtgcagcttccttgaccaataaagcttgaataaaaaggaatgtatcccgaaagcctataccactatccgacttgtaccaacagaaacgagaccatgtacacgagtgcataatttgtttatcagggtcacccacccccaccagaaatgagcaaaaagccaatgaatttcattcacaatgcccacatgaatcttaaacaacctcatagcataaattggtattgcttgaatcactgacttcaagaggacttcatggacgctagaacaaaatagcttactcttccatctaaacaacttattccacatacaatctaaaatggattgaaacaacccacttttactcttccctgcaaaacaaggcaaactaagatatttttcatagcacgaaacaagagtcacatggtagactagccaaagaaacacatagattcaaagccaactgaggagaaaaacatactacagacttgttcaaattcattaactgccttaatgaatcttcatacatagtaattaaggatattggaaaactgagtacaactttcagtcattgcttccaaaataaaaaactatcacccatgaacatgagatgaaaaaccattagtcctcgtcggccacacaccacaccaacaatattaccaatattaatctcatgcttaataatatatgataatcctttagcttaaataagaaaaaggaaagtagaaagaggatcacctcgacgaagccattgagtaggaacaatattcccaatgatgtcatcattaacattgattacatacgacattgtagcaacacatctcatgatcaacccaacctaactagaatgaaaccccagtcgctccatcatcccacgatagaagccccagtcaacccaatcattgaccttatccatgtcagccttataagaaagaaaccccttctaacctttcttgtgttgtttgataggattaatgtactcaaactcaatcattgcattgtcagaaataagcctctttggtataacactgataatgacagtctttgacattcttttggaaattgaacaggattggggtttcgttggttggatgaggttgtagtgaatagaagccatcattgaatctgtccccctttttgggaatggacacgagtttgtaaaagtataatatttttgtggggttggaaacactccaatccctaatgttatcccaatttttatcctcatgacgtgacatgcttacgtggacaaaacttgtgccacgtggcagtacaactcaataaaagaaaggccaagccgacatctgagcaaataaagaccctggcactcaaatggggatcaagtgacagatcaactcacttttagaagctgaccaacccagggacaacatcatggccagccagcctggccagcacaaagccatggccgaccaaggattgcagtgtaggccccacaagacactcctacacgtggacatcaaaggtgggctacaaattgagcctcaaaagcccaataaaatggtttaataatatctagaatctaagggcattttggtcttttgtaaatatctaactaactatgctattttcaagggatttcaattgtaaacctaggatttaaggcttcttatacaaaggccttaacctctagctgaaaagctaagttgcctaagccgcctctaagctaaaaatctcaaactctctaagtgttagactctttctctcttcttcattctctcacacgcctagcctaggctgtactacaccctaggctgttcaacacttgagttctgccagacatcgattcatacattataatcctaagggtactatagcagatcccacctatagcgatctggatagtaattctctcagtataatacaactaaaagggaagtaggtcattacccgctatcacaagggggccgaacctctataaaaaaatcttgttgtttattgctttatattcttatttgtgcacacacttgacaagcatcagatctgcacaacctcgttgtcggttgatcacttttcaaggtcaacatctaaaaacaaaaaaaagaaggctcgatagcaggtggtatccttagggaataagttggtaaggatctaatcctacaaaaactaaaaaaatcgataaaataattttagagtagtaggctagacccgaacatgagatgcatctggctctaagccccgaacccctcataattatgattaggggtcttagattcttgagctaggcaatgaaaaaccccatgttcctggggcatgatgttggaaagattttaccaggatctagatttactaccatgtatgtgtgcactcactcattcactcaaggtttgaaaatttagagaagaaaagagaagaagagggtggcagctatgtaatagaataggaggctcaactttcatctgacagagttaagtgtgaatgtgagccatcactatctatttataggtaaccacttag

SEQ ID NO: 299795 - DNA, 3830 bp, Cannabis indica
gggcgattttaggagcaacaggtaataaatgttaaaaaagattgatatgttatatgtaacacaatagtatgttttacagtatctaattctagaagagttgattttttttttttttattattatttataattatatttctgatcagaaataagattctaaaagagttgattttgcaatcgctacaccgtgtggactgatttaatttagatttgttttttgagacttttgattcttcatttttgaataatttattgcatagagatatgttgtatgtctaatatttgactcctcaaaccaatctaaactacataatcttataagcttgcaggtttatgtgcctccgtcatgtatgcttgatggcgtccattcacaacatttttttggtactggtgtagtaatatatcactcagggaacatgggattagctgcggtagacaagaacacagttgcaatatcagcatcagatgtgatgctgtcattcgcagcatttcccattgaaattccaggagaggtgaatctattaatattgaaaatgtaatcaccagcggttaatggcctgcctaagttcttttatcattctctttttctttctttttctgaaatttgcttcatttttaggtagtttttctccatcctgctcacaactatgctcttatttcatacgatccctctgctcttggacctgttggtgcctcagctgttcgtgccgctgagttacttcctggttggtttttctctttgctgtacattgtcaatttcgtgctttcgatgtaaaactagtatgtagatttcagttttctgtagctctatactctttcttgcaaaagcataatacatttccttcatctaaatcttgtcatgaataaacaactttggtggttcggttgattctaggtttagtgtgtggaaatatctgtacaagaaactttacaggttaccgtgtttaatattttgtttccctcgacccttcttgcattttcaattacattaagtttttaaaatgcttaattatggtctaaaatcctaatctagatgacaatgtatcttaaaaaaaattatatttagcatccagaaagaaaagtattcatgttggaaaaaattatctcccatatacatatttcagcaggagatctgaccactatctttcataattggtattttgttaatttatatatatatatctactctagcatagggttgtataaagtctattactattttaggtatgaaaaatatcgaagcagcctaaatgatctgattaagtcacctggttaactgaatattaatattgcttttgtgttatattttcagttatattatgtgcaaatgatgtgtgttctgtaactatttttatgcacaaaaaatgatttttgcaagctatattgacttcaaaacattacgctttgaaacagagccattacgccgtggagactcagtatatctcgtgggtttaagtagaagcctgcaagcaacatcccggaaatccattgttacgaacccatgtgctgcattaaatattggctcagctgattgcccacggtacagagcaaccaatatggaagtaattgaacttgatactggtaattgtggtttcaatactctaaatcaaaactggacctgaaaaatgacactttcgatttgggttcattctggatttacttttgttgctcctttcagattttggtagttcattttcgggtgtcctgactgatgagcagggaagggtccaagctatatggggaagcttctcaactcaggtctcctttttaaattcttttcatgtatcttcttattatcatagtcaaggttgtcaaatgaaatattcatattgtttagtttcatttcatgaacttgaattaattctattctctaagttatcaagtcctttttattttcggcatgtctgaagtacatggctttcctgccctaaaatgataaaatagatataagattcttttaaatagtaattatttatgaatatctatacgtgataatagtttctcataaatactgctggttattgggtttctaaactccctgagtcctgacttctagataagactttcttgattttctgcatgatactctgctggttattgaatttctaaactccctgagtcctgacttctagataagactttcttaattttctgcatgatactcttggatcaatttgcataatatagaaactctgttgtcctttttcggtcaggatctttggatttgtgcacgtattctagatgaggatatttttttcctccttatctttttaaaacacacattgttgcctcttttctaaagttaagcattgttgctttttttttttcttaccaaattgaaatccatattaaattactgtacacaatcctcctcatcttggatcttcatatgcccctattttcttttgggattcccaatttccacgcagcacgtatattgacgtgtctgatcctccattctttactgatgcagaaaagaaaacgcttaaggaaacaaatggtgaattcacaaccccaaggagccatccttaaacttgtcgaacccaagccgtgccgcattcttttcttatcttccttcatcctttttaatttatttaggttaataagagatgggcaagagaaagagagagggagggagatggggacacttttgggttttctgtggaagttggtagatttggtgtgattattaaagcagtattgagatgtttcatgcattacaccatgccagattgcagcattcttttgtttctatatttccaattaaaacctgtttaatagtttcattgattttaattgtggaatcagtattctgaagtaaatctcttttgtaactacattcttatatgttcttatgcttttattctcatttccagctgaagtttgggtcgaccacttcagaagatcatcaatttgttcgaggcatcccaatttccacaatcagccaagttcttgacaaaattataactggtggaagtgggcctcctcttctcataaatagtgttaaaaggccaatgcctcttgtaagaattttagaggttgagctatatccgacattgctatcaaaagccaggagttatgggctaagcgatgattgggttcaggtttgcttttttcttcttgtaaattattttcttctctctgcatattccatgtatacgctagtcactctcttgttgctctttaaaagatcttttaagaattttgtcttcagggtcatgttgactcattgaatgcaactaagaaagaaacagcttgtatcaatttgagaaatgatacagaagtagagtgagctaaacacccgcaacaacaaacaaaaaaacaattacagaaaatattgccattcctgacctaaataaggaactgaaattcctttaaactctcttacatcacatagtcatttatttatatttgatgagtgagaatcaaagatgttggagaaaagatggtatatctcatctgagttacaacctaaaatgccagtataacatactttcacctcaccccatatcaacaagacttaacacatacataataacacaaccatgatttttacagccacagctgcgaatctgaagcataggaatgaataaattcttgaattctctactcttgattatccaaaacacatagccatattgcttacctaatcaataattaactttgttccaagcctcagttgaagatttatgggaaaaagtcagattttggacagctatttgggtttacaaaactgagagatttgagcagttttcgttcttagatttgaatagagattggagattgttatgtaatgttgtttaagactagatggctggaaatgctcctttt

SEQ ID NO: 299796 - DNA, 5464 bp, Cannabis indica
aaaaaaaaaaaaacaagacaatatggcattccagtcctttaccttttcccaaatccacggttgatccaaaagggccgaaacggcattctccattaatgtgcaataaaacgacgtcgtttgcatataacaccaatcggattttaaccgccagagaaagaattgggcgagttcactttaaaaaatcgtggcctctgttcctcatttctttttcttctgttccttcttctccacccaggtgagttactcaaccccaaccccaatcccttttttccattcttagaattttcattttcgttttacgattcaatattttcaaattcagtagttgcttgctttcaaatccaacttctcaccttatcactttgaattattattttttaaatttatatctagatccacctttcttgatatgtttttaagtctgtatcttctttcatttcatgtttgctttgcaattggttcaagattcagatttcggtctctttcttcctttacccagttcattgggtttttcgtctatctcaattgtttaatataatatattgaaagtttcgttcctcaattttgaattgagttcagttgttggagattttagaaaacgtggatctgattgaggttttcgttactcgttttctagtatttatttttgctaattttgattgctttgtctgtttgcttgatcgttagacgggattagggtttcgcgtttaattttaatttgctcatttgttttaatagattctgaaaatttaagctagttctatttagatattttgccttttttcatagttaattaattgatgatcttgaaaacgtttttaactttttgtttatgggatgttgcttttcagaatttagagctaagaaaagggtgaacatacacattcagaaatggggctgacattcacgaagctcttcagcaggctctttgccaagaaagagatgcgaattctgatggtgggtcttgatgccgctggtaagaccaccatcttgtacaagctcaagcttggagaaatcgttaccaccatccccactattggtgagatactcagttcttattacgactttgaagcaactgttttgagctcttaattgtcttaagagcaaatacaattttgtcttgttattgatgccggggctgttcttgcaggatttaatgtagagacagtagagtacaagaacattagcttcacagtttgggatgttgggggtcaggacaaggtatatgttacatgctatctcttgtaatcttaatcatgtttgtgtagaacttggatgtgaaatgttactcatttcgcaacttgttactggttgatctgttgtcgagtgtctgtgttgtggtatgtcatgtgtgttttggaggcacaacttgtgtttctatcaggtatctatgattgtatagtagatctgtgcttttgctggtgctaaccatttataattgttgagcttccatttatgttgtattctttcaaatttatcttgatgttccttgaagaattaatcagaattgaagcttaatttttgttgttgtatcatgcatgttggaagaaataaaattaacccaggaacttgaaaattaatgccctttttttcttatacagatccgcccactgtggaggcactatttccagaatactcaaggtcttatttttgttgttgatagcaatgatagggatcgagttgttgaggcaagagatgagttgcaccgaatgttgaatgaggtagtttctgcctgtctccttttttagcatgattgttcatgttattatttccatattcctattcccatttatttttatttgagttaatacagagactatgagacttgattagaatatttcagttagattttggacttgttctgttctgccaattttgaatgtttttgttggtgtcaatgcttgctaattgtgtatcatctgttttattctttagtcgtgaggtcttgatttgaatgttatttgggcttcaggatgaactgagagatgctgttctgctcgtatttgccaacaaacaagatcttcctaatgcaatgaatgctgcagaaataacagacaagcttggtctccattctcttcgccaacgccattggtaactattctactattatttgccatgtaatttttatatgaggaaacattggcatgttttcacgtttattgggttgccacatccatttttttacttcgccctttgcattcgaaaaacagataaaaaatgatatgattcaacctcaaacccaattgaatctagtggttgggatatctcatttgatctcagcaaagtgaaagcaagatcttgaatctagaatcattatggaatagaaatgaatacaccaagacgcatacacattgataatttcttttattaactaaagggcctcgaatcctcatattttctagtatatatagataatttgttgacccaaatgaaccagaaatttgaaatgtctttgagttaaagtggttggcaaatgtatgccgaaaagtcttgttttgatgatgtattgagatgagaactatgacatgaactcttactgatgccatatggtgtttcttttcaggtacatccagagtacatgtgcaacctctggggaaggtctttacgaagggttggactggctctccaataacattgctagcaaggcaagtctacaaaaatgaatttgctaagaataattgtgttcagtttcttgaataccttgtttgctgtatgtgcatatactgttttctgacaagtcttcctcgtctttgcaggcataaggtttgagacagttctaagattttcgtgttttgccagccacctatgggaaggatggttttctttaattaagtgaatattgtaatagcagacagtttggctaaactttggattatgtaattcaagttcaggttttataaccatcacctttagctatactttttacttgtttagttgtaagcaaaagctgctattttataatggaattatgtgagtcgtgttcaggacaaggtacaagttcatcttgtttactcttttcatgcctgtttgcttttaaattgtttgaggctgtaaaatttctacacataggctactatctctctccttgaattataaggttctgaactgtggtgtatgcgagctttcatacataccaataatttgacataagaaggggtttgaatttctgattctcccacagattaaaccataaattttggtttgctaaaacgcagcaatatatgtttctatgtgtgattaacttctcgagtctttttaccaacttttgcaagtcacatttcctagcaaaaataaataaataaattacttttacgaagtcaggaggaggaggtatgctatagactctcatagtagttgttggaaatgcagactaaaacgccgtcgcacaattgtacccttatctatatgttagcataaatttgtggtgctcgtgaccgattgactcgtgtgtccaagctctctcaaatgatcgtgctcctcactggaaacattcttgtgtcttgttttttttttttcaatttaaacgcttgctgttgttttctcaagctctagttttgttttttctaaacaggataatttgaactttgttaatgaactggctaccaaagctagattgtctgatagctcagtttccttttgtgaaggggagggattacctctgtgaatcccagaattttcttttaattaatgaattctggtagtacgcattaaatgtaattagtagtgtttgagcactgaaacgatataacaaagtcattcataggaatgttgacaagtggcatataattagtaccaatttagtgaacaacacatgtttaatgtatatggttttatattttgtgtatttttccttttgaatgaatactttgtgtacttttagtactgagattaagtgaacatagctatatagacacaccatcaccaccacatgggagagcaagctcaaatgtttgagtgtgtctctatccacgcaccacagtggaagaattttccaccgttgattacttctctttgccagttgtggtgtatggcttgctttgtattacgaattacaagcattatattatttttcagattccatacatatattgggtttgtttttgtgtactgtgtttattttggtggctctcaaactagcttaattaaagtttcctttctcccccactaaaaataattattgtttttgtacgtggctgggattaagtagctagtagtgcttattaatatgaaaacaaaaatttattgagctgaaattacatctccatttcacatgtgcaacttgttgacctatatctgagaagacttttgctaaccacttatttattcgtcaagattttgcattatcagattatctagaatctaccagtactaattaacataatgcctgggagacctgttacatttttgtttgatatatacgatgtaccttgctagtggtgatagcaaataatatgagctttattgtgtattcaatttatgtggagcgaaaatatcaaacctaaatttcctttattatgtttctgcaaataaaactaatccaatacctaatttgattgataattgctacatcgtgatatcactgatatggtcatataagagcatatccattcattaattgtagatatgtcaaaatgtgaacctctctattctttctatcccatatcactttgagattcacatacaaatgagcacacataaaaataaaaataattggaattggaaaggtataattaggaagaaagccaagttagagaaccatggggataaatcataattaattattgtatattgacacttatgaaagatcgtattattacaaaactaagactagtttctttcgtggtacgtctagtggtcgcatgaaaatgaaatgaataaaaattaccgtctatatatctagagaagtagaaagtacatgtagtgttgttgctcttctagctctcgacctatataggttatgggcaaaaattattaatcatcacaagagagagggagcgagactaggaagataattggacgatccagatcgaacgagagccattcatcactttttttggttatattttagtgcaagattatttggctttagttcgaagcaaattggttgttacatatataattaggtgacagtacgaatcatattatatatgtactttcatacatacgtgccagtatcgatctaatgcacgaattaatttctttatgtatattgattactataataattactacattatcttttcgaataaacgacgattcattaattacattttaattaatgtaatcatacatttaatttaattgctccattagcaataattctaatattaataataaaaagaactacgtacattttaggaaagaataatgatgtatgctcttcatttacacatgggagtgtgtcttaaaagcatgtaaagatatttattattattttaaattaaataaataaataatatatatt

SEQ ID NO: 299797 - DNA, 1430 bp, Cannabis indica
gaaagtttagagtctaattgtgtacgtcactaaaatttctttctaattctttagtgaccagcacttttgtgcatgtcactaaaagtctaaattgtagtagtgattataccaggagaggtgtttggttaattgtttacaaatcctgtgataataaaggttgagatcaacctatttgactaattgtgccattgagtttgtgtaggagaaattcatattcgaatttccttcctacaatctctattactctatttcattaattaggatataatactagtacttaaagtttaaagtgagtgatgaggttacttttcaggccattaagttttctcgtgaaaataatgagagcgagagaagtgaatttgtacgttattaaaggtcacaaagggatatgagtacgagttcccatatttggaagggcaacaccaaagtgatatgttattgattagatccgtgagaaatgaaaaccttttagtttcggtcatttcaataggtcatttctttctttctttctgtcaatcaatctatactaatatatatctatatttgaattggagtagtagtgatctaaatatagcaaaccaaatgggcttccttaatttagtaaagtgctatatacacaatactactataccggttactaggtataactccttgggtttatagacttacatcttaatttgacatggatctgatatcaatccccacataaactaacagatacaataatgacccacgtcaggacttcataacctatcaaattcatattaacaatacatgaatgttgttggcatcttggctagtaaaaatctaattcaaaagtcattaattggaactatatagttgagtaagtgcaaaatcaataatgcttactatatatatttctctctatatgtgtatatcttcaattccactataccacaaaaagtaccttaaaacaatttagaagttatcatcaactcataacatatatgtcaaagagtttgtatgataatagggttattatgagtcgtgtgcgttaagagcatgcactcagagttataataactataagctaaaataaagtaagaaaaactttaaaattaatctataaatgtaataaattttaaaaattgattcattttaatattgtagtgcttttataatttcttagttagggtgtaaatataatgcccataaaccatatatcataatgtacagttaattatttttcatcaaaagtcaagtttagtcttattaattaatgagaaatgtttatgaattaatatgttcacggacataggcaatattgtacgtcaaagcattattttataaaagatacgtatggtatatgtatacattatgaccgaagcctatcaaaataatatatatatatatatatatttttggaagaaaatcatcaactttattttaactgcaatcattcatgatta

SEQ ID NO: 299798 - DNA, 1472 bp, Cannabis indica
aaccgtaaaattaaaaaaaaaaggttaaaaaataatatacgaggtaatttctttatttaataacaggttgcacataaatactaatatttataatttatcttttatctaataattgtataaatagatactgtactaaaaatatattatattattacaaaaatatactttgctaaaaaaataactaaaaaataacgaaaaattaatcccataacaactataaatcaactataaaacaataaaaaaaaatcataaaaacaaccaaaaaaaaatgtattattatttttattgaaaaagtacttttataaataaaataatttaaagagtaaaatttaaaatatgatatgataatataataataatatgatatgatttccattttccaccaagaaaaaaaaaaatgaacttacccagattactcctttgatattgtcaagggttaacccaagatttgccttgttatgatacttgagaagaacatcaaccaagtcttgctcttcttcacttttctcattattctgattaatcatatgttgtttgatgatcttttccaatatcctagaagacctctgtttgaggctttcatatttaggcctactggtccaatcaagaaatctcaaagaaggaaacaactccccaaattcaaaccctccagctacctttatatcttcctccacaatcgatatgaactcatcatgatcactgcttttttccccaaaagctgctcgagatacgatgctataagacaaatttgtgaccatttgagtaaaattgagtttggaattagcaatgatatgttgtaacgtattaaacacctctttctctctaatgggttccaaagattgaactcttttgggactaaaaagagcttgcatacaaatctttctgagctgtctccagtaatcaccatagggagcaaatgcgatgtccgtacaatcgtatccaatgatttgagcggcaagagtccgtggcctagacgcaaaaacgacgtcgtaggttctcatgatctctttagcgtactctggtgatgacactattacggttggaacttgtccgatttcgaggtacatgaagggtccatgttttttggctaagtcactgaagacctcgtaagatgaggatgatgatgaataccccaataaaagctggtggagatttcccactaagggaagtctccatggccctggaggtagttttgagtttcgagctcttttcatgagtatggtaactgccataaggagagaaaaaagaagggacaagaggactgggaaagagggtagttggagatccatgatattgttatcaatttcaattgtgttagctagcttgtttatgaaaaatcgagtcatgaacacacatttatataataataataataataataatattgtactcaaatgataggagtaattattatattatcttattttttccttctacaacaacaaatgtcttctgtctttggcttgattact

SEQ ID NO: 299799 - DNA, 3528 bp, Cannabis indica
caactcaaatttaattttctataaatatatattgcatttcgaaaaattaaagtattcaatttaagttgtgtcaagcttttctttgctttgaatatttatgatctaatgtttgattgtaatctttttagtattttgatccgcatgatagttttaggatatataatgtgtgatttcctgaagaaaaagattcaattttgaccttcattgtgattcttgactctttgagtcacgaagaacacaaagaacatgtttgagtttttaaaaacacacactttgatatgttacacaccttagttggccataggggtcttgttcaatacctagctagcgatgaaggtcttctcttgggagctagtcagccatagggggtaccctaaagtatggccggccaatgtctaggcttaaggtccctggctagcccttagttgggtaatggaaccctagccgaatctctttttgcttgggaaccctggccagccaaggcctaggttccaagcgggtggccaagtttttattctcttttgtcaaggccttataggcatatacaactataatctcatactgactcccttagaaactttgtataagacttaatggtgagtctattatagtcgaatgtacaacttaagacttgccatttgtttaagttagtatacttgagacgatacttccctgatacctagccttgtacgatgtaattggtcttgcaagtacccttaggtacgattagctagagtgttgtctgaactttatcactttgtcaagttgctcatctccccttgtctcttctatgtaggtgatttcaagtattggtctggggaggtgacaatcgtgttgttataggtttagtcattcttccctttatggactagcatccaatccattccctagcaaatttctgagtgatcttgaggctgatactgatacattatagccagaaccaatcagtcttaccatagagcgccacattttgacctttacactaccaggctagaaataatgggtatggtaagtatagtagagaagaccatgtagcctctagatgatagaaatctagaggttggccaggcagaggtgcctatggctaaccatggtgttaagagcccaaacatcgagtctgaggttaaggaggttgtacttgctaggatgaggcagtacatgacatgttctgcttttttccaatagccttctgggcttgtatgatgatgacaggtagcccttgaatatgcttggccagcctttggtgataagtgtagaccatgttctaatacaggctactgagcctcaagttcttgattttggggtgtagggagactgttgtgcctctcctccatctattattagtgctgagactcttgataaaataagagagagtggactggtgagaggcttctagtgtgaggtgtcgtcgagggaccaaggagcgcaccggttggccctcaattagatggcgtggtcagagcgtcacatttagcatgggcagtactgcctttgcacccctactttagataaatcgcaacatacttcggaatgtgcccaacacaaatcacaccgaaaggtatcaagtacctttcagcgatctttgttctttatgtcgagctaggctggttttagcctactccttatgagattggatactattttgacttaaaatctgctctgaagtagaatcgaacggggtacttctactttatccagattggatattagtggttgggtgacaccaacagtacgcctttgtcgaaggtggggggatatgtccagaagtatttcattgctgggatatctagcaggttcgacactgccattttcagagagtgcctacttatagacgctccattcctaccctccaaatgagggatagggctaaacatattctatccctcctagtagagaggagggatatactgaggttggcctttgtggccaactttcggagatacagcctgtatccccaccgactctagagttaagggggatgagggcccatcaagtggtctagatggagccatatctgctaaggaggctagcccaggaggcgggcatacacctgatatggacgacaatgttcctttatctcaaatagccaagaatttagagaagagagaaaaggccctctgccactgcttggctcacgggggcaccattggggacgccgctctactgattaggcctagagactagagttatgttagtcccacacgcccctcacctacatctagaggcaagggcaaggcaacagttcatgatttagatgactcatcttttgaggatgatggtagttgagagttgattgcaccatcttttttctagtattgaatatttgtcacttgtgttctgactttgttgctttctttttgcagatatggcttcaagactcagaggtctagttggagagccttcagacgagacttcaggtgccctagggccaaagtggcctgaaccacccattccagtgacgctgcaggaccttctcttcctcctcctcctcctcctgggcctacaccggctaggaaacccatgatcgttgaacctccattgaggaggactcaaccttcgggcaagggtgcctagagacccagccaaggggcaaatttggccaaggggcagagagccatggaagtggctcgtagatgcatggatagagtcttaccaacagtcgatgacgcacttaaggagctcagagatggtgagttgaagaggctatcatctagcagtctttaggagttggcctcgataagttacacatctaactttgctcacttttcagtgttgatgaaagttggtcggccataaggaggtgttgtgcaaggctggttggccagtgtagtgttcttgagaggatggccagccctggtagtaccatagaggggctggctggccagtgttgtctttaagcactaatcttaactttgttttattttttaagcctttatgaagctcatcttttcgcaccgcaactccaaggggtcctcgggcgctctccgagagtagctaaaggcccaagaggatgagcttctagcgaggggtgaggctcttacaaactcagaggctcttctcaaacagaagcaggacatgatttctggtttggaacgcctgctcagcaccaggaaccaagagaataccatgcttgctgctgacgtctctaggctagtggcaaaactctggaggagtaatgatgaactaaagcttacccttgatggcccgcaaggaacgagtatgttggcttgtctttggagattaactatgaaatcaagctgcgcaaccccatagttgatctttcttacatgggagctcctgtccttgagcgtacactagcccaaaggaaagagttatatgaaagcaggatggagacagaacagatcactatctaggtagaaggatcgtcatcgggccagtttgtggaggccatgaccggctaaccaactaaggaggtggccggataaggcattaacaaggtggtcgaccagcctacagaggctatggtaggccctctttggcaatctggtgttggaattattttactag

SEQ ID NO: 299800 - DNA, 6225 bp, Cannabis indica
agttgttaatccaatggggtgaacccctatttatacaaatacaagagtgagatattaagaaactaagaaaaagggaaactaaggaaaagaggaatgttgattacaattaatgacaataaataaaagatttggacatccacataattaataatatttataacagttcctacatagtaccgatgttttttatttattttttatttttaattttattgggcaaattattattaaactatataaataatattaagtgtgtcaataaatgcaaagctactccttgcttgcaatggagttgcccctactcaatatttgtgatgtactagttctggcaaatattgaaagtggattttttttctgaagaataaggatgttgcttcttaaaaaaaaaagaagaataaaaatgttgaccttattgacttttataaagtaggttataaaacctcaatctgcaaaatatagagtagattagattatgactcataattatgatgtggtcagttgtttaattttctagaatgaaattttctaaaacctcgtgcggctcgtattggagtcagcaacgttgaaatgccagagggtttgacaatgaagttgaagaaagttacaatcaaggatcaaaaaccgcaattattataacgtatggacacttccaaacctaattatattaaatccttaaggaggacatcaatgattaattagcgagctatgacttctaattgtcaccttatttgaaaaataaggtgcttgttcttcaaattctaatgcaactacgcataaaatcggccaaccttctcacttgatttcactgctcaacatgagaactagtactatcgtcagtcgatggtttacattatcttgcacacaaagaaacaaattataaactactattaatcattccaaaacttcatcacaatcctaagaagtaagatcccaccaatggatccattgtaacactctctcttctttccatagttccaaaacccgtgcttgtttagatcatgatttcacgtcccctaagttgataccgcttacagtctccaacaataggaccccaaagctaaaaacatcagactctgcagagaattttctaaacattgcgcgttcagaccacatgtaaccactgcattatcttgaatttgttctccattcaatatttgtaaccatgccaaaatctgaaaattttgggttcatgtcgtcatctaggagaggcttaattacctttgaaatctactgtagttttgcttgatattttgacttatttaattaaataaatcgtgatgatgaattaagactgtcgactgatcatttgacttaaatggcaaccaaagcttactgagatctgataaaagtattcaataaaatatattaaaagtatgacttctggcaaaaataataatacattactagtgtgcttctcatttcaaaatatttaaaagctaaaataaaccatttatctaaaattttattatttagaacttcccttccttcctatgcactctaatatagatgttctagtctagtcaagcattcttccctgcatctctctgagttgcaacattcgcatttgtacagtacagcataaaatgaaccaaacaatttacaaaaatctaatgtttgaagagaaatttacaccaataaactatattccattagtggcactactttcctagatggaacatcaaataaattaagcatttggttttgtggactgtacaaaccaacttagagtttttttctctttctcatcttccttgtagccttgtcacagttagttcagtagaagtaaatggttgattgcaagatgatgaagaatcaacctctgaagagacccttccaacataaaatccaggttgcttaggttgaggcaacgagggattttcactatccaacatgaaaagaacggctgacattaagggcctatcttcagggcgtttttggacacacaacagccccacttggatacatcgcattgcttctgattcattgacatctttcaccaaaacatcaaccacctccaacggtctcttctcattccataatttccaagcctaaaacaatccaaaacttaaattttagaaagactggatgttaacttaataaagcataacagaaaacatgaactgacaagtactctccactcacatgtcctaaaagattgaggtcatgatccgaatgttgaaatcccctgtttctcttcccacttagtatctccaaaatcataactccgaaactaaatacatcagatttcacggagaaaagtccatctattgcgtactcaggagacatataaccactacgagtgatttttgaactcagattaggattggagtataaaaccaagtgaaaacattagacaaaagttattgtacttactaagttccaactactcttttagtagttacttcattctggtcacctccaaatattcttgccaagccaaagtctgatattttgggattcatttcgttatctaagaggatgttacttgctttaagatctcgatgaatgattctcaatcttgaatctcggtgaagatagagaagccctcgagcaataccaactataatatcaaaccgcatctgccaattgagcgcagtcccttttgtttgatctgtcccattttatatttagttaatccttttcttttggttttgcttagagtgttaaagctaaagtttattttgccaatcaaaaggcacagataagaaaaataaaactgagaatacagaagatatggcttactgaataaatacaagtccaaacttttgttaggcatgtactcatagatcaacatcctctcttctctatgaatacaacaccccaacagcctaacaagattccggtgttgaagtttagcaatcaaaataacctcattcttgaactctatgactccttgtcctgaatctttggatagcctcttcactgctacttcttgcccagttgggagcacagcctgttattgcatgataaaattatgcataggataagaggaggagttaatccattcatgcaaagctctggttaagttcaaaatgttactagaagaagagtaccatgtaaacagggccaaaaccaccctctccaatcttatttccagtagaaaaattgtcagtggcactcataatagtatttagatcaaataaaggaagctctacatcctctgtcaaggcatcagaatgttgctcttcttcttgattaggtaacattctctcagctacacaaaattcacagcaagaaattgttagaaatttattagaatcacaattgtatatataagatgtgtgttgcgttatcaaataaagaagtcatatttatgtgatctgttttgaaataaagattgtgacttaaatgcatgattgttataattttaatatgtggataccaattagaaaatttctgatttgaggtaccaaattaaaaatagttaataaatattactaactgttttcgcggataatggtccctaattttgcatcttatcgtatcttttcattcttgaaaccccgtcatcaagaaacttaggttctagagaaaattttaatgcaataaattgaaaaatataccattcaaagttcgattttatgaactctggtacacttctactaatctctaatttattgtttcattctcgtgaatttaatgaattaattaaggctaaattcaaatttacactgttttaacagaaattagtagcagaaaactggtatgcaagtgtaatgtgttatcaatacaaataatttctaatcaaatgtcgtgctgactcttctaagaaactagtgttcatcaaagctatcaaacgaataatcacattataattaaaaatcgttatcctatattttaccagtattgggttatttaagtactaaagacaaacacattatgttctgtttacgaaaagaatagcttgacaacataattataaaataaaataaaattacaccatatagtcctatcatatctctttttgtgtatgagtgaaagttttcaccttggcttttgtgggagctgttcttcatgttccacaaaacatagcctccaatacaaatcaataatacaagaatcgtgattattgatactgagatacttattacagtccgtctgctatcattttctggtgctgcaacaagttttgatgaagattcttgttcaaatttactcaagtaagaaataatttgcaaaaaaaaaaaaaaaaaaattaactcaagtaagaaaaacataataataatttgtcaattagtttaagtgtaccaagttcagaagcagccatcttaatatacagatcttgtcccccaacattgtattccgtcatatcaaccaagtcttcatcaaaccacaacatgcagccactaacaccacttagagcataagccgaacacgaacaattcctcaaacaaatttctttacaatcttcaatactcaacacagttctttgagccaaaaactttagcccgtacggcaatttatagtgagaaaacttcttgaaacccttctctgagctacaattcaatttagtcttaggtacacatccactaccccagtcgaatctttcccagtctctaggcatttttggcacaaacccagttgggcaatggcaaatagatccaaattaacattgcagacaccgtttggaccacaatgctcaaaagaatcacattgatctttctgcagagtgtagaccgaaacccactcctgacgttgatagttccaactgaactgttcaattgtgctcgatgggttcaatctgaacgctgttaagctagaagcttcattgttttcataggtatagtagacatgactagtattgaaaacaaaaataggcgtaattagggggtttggtcccacagggggttctccaccgaaccggacaccgtcccaagacccgcttcggtattgtacctccgacccttttcgctgaattatttgaggaagcccacgagggtcgacctcgtacgtataatttcctgtagatggatcattggggctgttccaggagctaaggatccagttttgacgtgtttcaaggttccatcccagtttcattcctgctataagcgtatcacgtggatgatcaaaactctgccatactaatttcccacttccgccatctttaaccacgagatttcccgtgcttaagagctgtaaagtggggtttttggctgaagaatcggaagcccatatgggagtgcttgaatggttattgagaatgactacttttccagtttgagttattgatagtctcccagatgagtccttaagcggcttatctctgttcgcgacccaaagaatcatgccttggggagctttcttgtaccataatccaacgtagcggttcacagaatttgttgggctaaaaaatcccagttcgaagacttcaccggcagagatgagtgtttggccatcgtctaagagaggcttgcttggcgttacggtgtcagttgctgatgaatagttgggaaagaagatgaacaaaacgacaaacagctttactgctgtcattgctgtgcctgagaaacagagcaaagcgtttaagcaattatggacttttcctcctctcttctcctttgtttctcgtggagaactctctccatggaaattcatatagaaaaaaaaaaaaaaaaaatatttgtggaaggaagactactaagactaatactatacctgttttgaactcattgcaacagcaacttggaaactataagaaatcgtgtgaatttgggaaaaaaagtgacagttgtttttaatttgatcattacgtatttctctttcttgaaattttcacgtcatgttttttttcttttttttggtctattactcactttaatgtgaatgaataacgatgccctcctttttggtgcgagtagaaaatataattatgatcgtgcaattcaacctaaaaagacaaaagacttagtacaattggtattgttttctgttttttgtttttaaaaaattgtttttaaaaatgagaacaaaaaataatttttgaagtttttaaaaacaagtcatgtttggttagtcttttttaaaaataatattgactaaaagtgaattggtttttaaaacagaaaacaacattatattattttcaaaattcttattttttgtaactttgttttctgaaaactgttttaaaaaaacaagaccaaataagccaaattattttcaaaaaataattttctatttttaaaaacaagaaataatttttagttatgatgtcaaacatac

SEQ ID NO: 299801 - DNA, 951 bp, Cannabis indica
caaaggattgaacactcttgctgctgagtaacttgagagaacatagtttccttatctgcctccaatgttcaccataaggtgagaagttatgtcaatgttgttgtaagagagttttgtagggccagttaaagttggtctattgcaacaagccaagtcattggttttcaaaacctcttctgcagcttcagctgaagatataactatggctggtactgtcccaaaatgaagccccataatatggccatatgtttttgagagattccatagagattgatggggtagtgaaccaagttggtgtaagttacctatgattggaagttttggaggagcaggaggaagttttggcttgttttcattattggctttgatcttatttttcacaagaaaaattagagttaaaagcaaggcaagaagaagaaacaacatgttaggaaaccagatattgattaactaatctatgtgtcgtggtgagactaaaggcaaatatataaagatatttaaaacttcataacttcataactatatatagataaaataatgtggactttactattaaattaaagacttttaatatgatttcaaaaaaagacttcaaatatgaacaataatttaaaattgttgcatatgaacttttttcttatttgaacaagttacgtatgaaatgttcaaatataaaaatattaggcatattatatatacataaagaaaaattaattttttatttttaatttcaatcacattcaaagtttatccaattattatgatttggtagctataagaggatatttgttataagttgtggtctgtgtaggaatgtggggagggtaatcaaagggaacatattttgatattacccattaaaaatttgtgggacctaccacattcttacataaaaagtaaattattaagggctcgtttggaacgccgtattaagttgtattgtattgtatt

SEQ ID NO: 299802 - DNA, 1238 bp, Cannabis indica
gagagagagagaactcatagggagtagtcaaatgaaaattaattttgaatattcaatgtaatttcatatatgatgatcattatgattttattttcagtcatatttgtaacaaaattcttcccctgcttatttccgcattgtatattatgacattaacctagctaacataatgttaaggataaaagtggaaaccatgcaagctcaagtgaccatattgagagagtattagagtatgtgtttagggtgtaactcaatcgaatctcaaccatttaactcaaaaatatgatataaagagaatttaataaaaaaaatacaaaaaaaattattagataaatacactttcttaatcaagaaatctcatttattagactctactctctaggatgtttattttatgtatacattacaaattgagtaatgatagaatctcacagaatttacacacgtatatacttatgtgtaatcaattctaaccattaataattttagttgagaccacatcatttaaacttgtatggttgaaattggtttacacatgagtataggtagattttatgtctctctccagtatttatcattgtaaattattcacttttctatattaatttattatttaaaaagaaaaatctcaagcctacataaaaaacagacaaaagggagttctaatcaactcttctttttgtaccatcacaagctatatatacttggaatagaatagttgaggttaagtggaataaaggtttgctatatattttttaaaaataaataaataaaaatgtatttttaatgagatagtgaagcagaagaaaatgcgaacacgtgtatagttaagagtaatacacacaaagtcatccttgtatgtatattatagttcagaatcagagacatgaaatgtcagaagggaaatgttatgtccccacaccaatacaccatacataattcacaaagaatagaatggaatggaatagtgaattaggtggtgtttagttggaggtaatgaaatggaatgaaatagaaagaaaataattttattttatttttttgtttggttacatttaaaattaccattatttttgtagaatgactattctattttaaaatggaaagaaagaccattttaattagggatgtaaacgcggcgggaatcgctcccccacccctatacccgtttcttaaatccagtacctgccccaatacccgtttaaattaaagtaggggcggggcggggattacccacg

SEQ ID NO: 299803 - DNA, 3298 bp, Cannabis indica
tttttggtctataatagaaaaaatctcttctaaaaactataatttatgtgattatgaaaaaaaattgatatatttttttttaaataccaaaacagataaaaaatgtacggaaataattttttggggtgcacttcaaaattttctaaaatttaattcctttggaaagagggggaaattaaaaaaggaaaaaagaaaaacactttatctagtaataaagtggaatagaaagacaatgagatgaggcactttcattttatttggttgaaaaatcaaggaaaagaaaaggtgggcaaaagataatgcagcagagcagctgcttgggcatactttatttattctataaatatttcactttaaggtctgtttggaaatgaataaataaaggtgtacattatgctcaattatggaggagttagaacaaatatagaatatataggaaagtagtaagggacatgtgaatgtgaatatgaaagtgaatatggtggcatatggttaatggtacgtgttgcattattgcatcccaaaaaatgcctccgttccacaccgaggtaaaagtgtccattcatcgatcccatcccaactatatatatatagatagatagaaacaaaattaaaatgaagaaagagagaggaaagaattacgttttttttttttttttttttttttttttgatgaaaacaaagctttattgaagaaaaacaaaaggcttaacagccatggttcatagtggcaacaaagggtgccacttcccttgaagaaaagaacttgaagctactattatcagcagcccaagcagcaagattgtgagctccggagttcaaacggcgtgatatccagcggtattgacaacgcgacattcgagcgaggaggttgcgggtggcatcgaacagatcacacacataatatgttgtattttgtttttttatatacatatatattttaatatgctagatgtaaattcaaaacttaataattgttatgataatttataaatcatgataaattaggttgataattttgatacatctatattataaaggaatggatgaatgaattatagtaattaatgatattagtatatactaaattaaaaaaattataagagatgggtttttttatagtcatgttacaaattgagtacaaggagcccatatggtaataatttttaaatttatttataatattcatcaaacatgctcataagactagcaaaacgggtcagatatgataacacgattcgaaatttgtacgaaaattagtgagtttggatttgccttaacgagttcgagtcgtatttagattgactggtctaacccgtttaataaacgggctgtgtttgggttgatacagctaactcgaaactgactcgttaatgacctatttaaaattattttagtgctttgatgggtcataaacgttattggttgacatgtttaaacaaaatatatttataaacgagttacacggatcgtatcgtattaacatgtttataacgggtcatgttcgaattttattttctaacacgattattaaatagaccgtattcgaatcaagtatatacttgttatacatggatctcgacacaacatgaattgtcacccctacaagctcaccaaaagtatccacaaaagaatagatgtggaatgtcattataaaaaaacgataaaaacaacgctattaccatggtccgtcctaacatatttagcacctgagacgacgaaattaaattttaagactctatacaaatagtttaattttgataaattgttccaatattaaattctctataaacacacttttaatatttctaaaagtgtaaagattggaaattgaatcattaacctctcttaatacaaaatgatattttatcactatactaaagattattttactaaaaaattttgtgctccctcacctcaaacccaactctgaccactactagcttagaggattaaaaccacctctaaagacaaatacacgtacataaattacatatacaaattactttgatgacactcgagtccctcacttcttttacgaagaagaggtggacacaccacaccgccacacccgtcaagtgttgtgtgtaccataagagatgaaaggtaaattgcgaattaatggaatggttgtgtgggcgttgtcaagtttagattatgtgagatatagaccgttcttcttcttactttacaaatcacctcaaactttagctacgacaatgttattatcattgagtgttgcaagacaaaatttttctatccaactcagttccagtgcaaaagctaattctatggttgtatatattgccttttttagtattgaaatctacttaagtagctaagttgctcatactaattctaaataggtgtttagttcccaaacaaagtaaggtattggaagtggatactatgtggtgatcacagtttatatttgatattgttattttttaaaacataaataaataaatcaataaaaaattcataagtgtatccaataactcagttgttttttttttttaacaaatttaaagtttcattagaaaaaaataagtacaaagctaacaagttttacaaagaaagtaaagatccattctaaattaactttttatccagtactagacctaacttagctagattatgagctgtaatattcaagtccctgctaacataagcaatctcaagtttaagactaaaggataaaacactgagaagcaaatcatcaagaatattattatttcaattacaacaattaagcttatctactaaaattttacaatcaattctaacaacattaacatgcaacttaaccatctgaatccaattcaccacaagaaggactgccttcactttagcaatagcaagatgaacaatactaatgaaggttctaacaacgcctgcaataatctgattggaatcattaagcaccactatacccagactatatttcttccttttggaatcgatggccgcatctgtgaaaacctgaaaacatcctgctgaacaatccaatcaacatagagtcatgatacaaagtctcgttttccagtttcaaaatggaaactataacctagtctatccaaaatagatacggagatcaaattcctcctaatagagggtaaataagtaacatcacgcaactcaaaaaatgccagtattcagttgtaaattaacagtcccaaaaagttcaactctgactttagtatcgtctcccatgtacacatactcctccaacctactcagtcttcttcgacttgtcactgcctgtaaagattagtaacatgaattgtagcaccagtat

SEQ ID NO: 299804 - DNA, 1086 bp, Cannabis indica
aaataaattttttttctatggcccactaaaagtcagggcccgccctgcctccacgtcctgaagccctcacacaccaaatttgaacaagcaacacagagacccatagtctggatccaagcccaatctcggccacaccctcctcccacatcccagaaaccaaacacaatctccttccctgccagaattgagaatcaacctaacccataaccatcaaaccgtcttcgctagactgacagatctgggtcaatcactaccgccccatagcacacgagaccaaaaaatgcacaacaaccactgaataaacagattgaaactaggagaaacaaaggagagacgagattaaggtgaactatccacttaccccaacatgccaaataaggatcccaaccagagccacacccaagcccgaagagggccgacgggcctggccagaagaagaatttagactagctgtgactaggttttttgagaaaatcctagcagaccgagagagaaataacaagttttaaatctacaatttctatcaatataaaatactatttaaaataagagtatttgggcactatagaatactatttagtatttttcttttttcaaagaagatatttgatattgtatcctcaaggtaaattctttgagaattattattatgtaaagaaattaaaaaataataagaagaatactatatttaaagcaaggtttgggtaagtaacttaagtagtatttttcttcttgttgtcttaagtcctaacatagtttttagtttatttagagttggtgagattagaaaaatatttaaattcttatagaaaatttgaggatttatgcctaccaacacccattatttgcaaattataccacacttaaaaaattggaaaacctagcctcaaaagtcctaagtcctaacataatttttagaatgcaaggaagtattggagtcagtgacggactcaggatttttactttgtggggaattatttatcataaaaaaatatttatagctacattataatcactcttattaaatttatctaattttgtgggggcttttctactattttggcctataattattaaattaaaaaa

SEQ ID NO: 299805 - DNA, 2812 bp, Cannabis indica
attatttttttattttttaaaaccattcattcattcaacaataatgacataggccataattctggtttctggcgtaaattttggcacttgaagatcccacctaaagtgtcaaatttccaatggcgtgctattactgattccctacccacgtgtgtgaaccttgttacaaaacatgtgcctatttcagcccaatatccagatgcacaccccgagactgcaatccatgctctcctacattgcaattttgcaaaatcctactggtttatgtttggagtgtcgattaatatagctgcttcatctactgttggcagctggttcgaaaatctgcaacaaaccagtgatacggatcaggtttatagggctacaatgctatgttgggctatatcgaaatctcgaaatcatactgtttggaacaagcaaaaatctaccacaaatgatgttttagcctcagcttctgtcactcttgatcattggcgaaaagctcaggataaatttgctctatcatctctatctttcaataatagtgatgatggggccgagctttggactaaacccgctgaaaattacatcaagattaatatagatgttgcactttttcatcatgaaaattcttatggtttcggtattgtagcaagagataatttgggcaagcttattgaagctaaaacatgttacaaagctagcacttactctgctgaactcatggaaactttgggaattagagctcttagttggattaagagcaacaactggcaaaatgttgatcttgagactgatagtctccttattgtccaggaaatgtcctccacttttggcttgattactcaagattgtcatgatttattgttgtctctaattgatgttaagttacgttttattaaacgattagcaaatcgagtttctcatgctattgctaggcatgctcgattttcttctggttgtagcattttcgaacataacgttaggcctaatttaaaggctctcttgtattcataatgcttttaattaagttgatatttcatttaaaaaaaatactatttttatggtgaaaataacaaaatattactttttgactaattaatagttacatatgagtataaatgttctattttttgataatttcatcacaaaaaaaattatgatatatttagttttaaatatacacaaagtatatatgtattttacgtggaaataaaaaaaattaagtatattaatcgtaaatttttttatattaatttaaactattaatctagtcaaaagtggaacttaacgattaatataaaaatttaaaagaaagtagaattatggtacctttcgcttattttttttatatatattgcagtataacaagtgaaaagttaatttttttttttatatatattatattttccaaaatattatataaaaaaaatgatgttgcaaaggaaagtgaacattacactagacagtggagtaaattaggcaaaatctacaattaattaaatatcttttgaacttgttccttatccttacaattgttgttacatgtaaaaattataagtaattgttatatatttagtattagagtattgtaattaaaaattaaaaatgcttaatataacattatgagattatattttaggagtataattaataattgagataattacataatatattatttttttatatttttacatttaaagatttttttttcacagtttaaaggttttctataaaaacaacaccaaaattacataaaagtaacaaaaaaataatatcaaaataacaacagaacaacaactaaaaaataacgaaaaatcaacaacaaattaataagagtacaataaaaaaatgcatcaaaagaccatattttctgtaaataaaatcataaaaatatttaaaattctgtacaactgtatttttatttatttattattgtatttgtgtatttgtaaaataatatcttaattattttttgttgaagtaattaaattaaaatatatgagatttatcacgtcaagaaaaatatatatatataagatttatcataaaaaacaccaactcccatatatatgatacctccgactaggcatcattgatttcaaaattttcttaccaaaaaaatgctatttttaaattttaattactaactgtggtatccaaaaaaaaggtctacaggagctattttttatttttggaaagttgtgaactcgcgaaagcaggtccagaaggctttcttgtcctttgagaagggccttcaggaatgctagtcctcctctaaataggagtttcggatggctagctgttcctcctagaagatagtcccagatagtagactcagctggctctctttcaagtccttcagtgagtcccttgaaccgtgtctccgaaggccctcatactcgttcctggatgcactcctacttatgttgatgtggagacctcgctcaaaagagagttggttaagttagttaggcatagtattgcctaactaacttaacaacctaacttcttgtagccaccgactttgggatcttgatcctaagcttataaataccacccacacttattatttttagtagaaggatcaaattgagttttgaaagatatacatatatatatagagagagagataagattgagaggtagaaagagagaggtacagagaaaagagagagattgagtgtgggtgttataagaagaatcttctgttgatgaataatatttttcagtaagagtgtgagagttaaaacactttgagagaagtcatcagagaatcgatctcgactgtattgtacctatttttgctcaattaataaagaggatttgg

SEQ ID NO: 299806 - DNA, 2863 bp, Cannabis indica
aaaatattaaaattttataaaaatgcaatatgtattttataaaaattacaaatttgatatggtgtacgtattttagctgcttcctagtacaactgcgtacaaagtgactagaggtgaataatgtatgttttgtctttagggaagaacatgaggaaacaatcctccattgtttagttacttgtggtgtgatccaagctcgttggaataggtcggtataggcacaactacattgtttggggattcatttttgaattgatgtactgttgcctttcaaagagtgaacacagatctgaagtgtacaatgacagtagtttgttgcgccatttaggggcacagaacgatctagtttagaaaaaaatgtaaagcttgttgacaggattttatttgtaaaaaactaccttgatcattggaggaatgctaaaaaattcaacatgaatcatcatgatctgtttttcagatgggtgatgaaagtgagcattggacactaccacaagttaataatatcaagatcaatgtagatacaactttagttgatggaagtcaaagttgggacctaggctttgtggcacgagacacaaacgacatgcttattgaatgacatgatatcttttctcatggttcggttgaaccggttctagctgaagctataataatttgagaaaatctcagttagataaaagaaatgaaatgacaccggataatttgtctttgttcagtgcaagctttacggagttctataattatgatttttttatttgatttaatcattcaagattgtaagaatttgtttgttgcttaaaaaatatttctttctttttattaaactaatgggcatatttaattttttttcaaggtgaataatcattcattaaataggcaaaaggttgaaaaagataacaaagagaacaatacaatatcatcatgcccataagcaggaaggaagttcagaccaccaaacttgagaattatgtagcgagccaaggaataagcaatggcattattttttctcttagaaagaaagtcaaatattagaaatatctattgtccttactattactactactcggcactttttggacaactcggagatagagaataagcatatttatttatattttgtaatatagacgtggtttttaaaattgttcttttgtttaaaaataaatttttaattagcaattcatacataaactatccaagaggcttattattataattttttttttaatataataacattaacataaatggaaacattgtacaagaaaaacgatacattgtgtggtggtggtagtaacataaactacaattttttttttatttttgataaaatttattataattattgtgattgttaagatatttttattaacgtttcgtcaaaaagtaacaaaatattttaatttatcctctatttagtataaagatagaaaacagattttgacaaggtacacgaacacaaacagaatatgaattttacaggttaggatcagaaaaattaggtacagttaaaaaaaataggcgcaagttgaaaatgactcaccatgatatggcacaaaataaaaataggtcaaacaaattggtgatgagtataattcaatacttttacatttaatctatgtaggacaatattctccaatatccgccctcaagatggtggctaattttgctcactaatcttgaatcaccttatcacaagccatgtcatttgctcgtttatttttgtttgaatctcaagcgtctttacactatctggatcttgtacggctggctaacaacctggagaagtgtggatcgaaagcctgttatgaatatggctctgataccatgacaagaatcataaagtttcatctcaaaactaattggtgatgagtgaagtagcccatgttcttatatatgactcaatacttttacatttaattcatgtgtgataatgttctccaatagactttaaattatcttatgttgcatcaagaggcccaatcccatggccttaatagtgctctggcatgtgtcttcagggatggtgttgcttgtagaaatccaattggggcaattcaatctgttcgtggatactggtgctcgaacggaagcaggaacagtgggactcggggctatactgtttgatgtcgctgagtccgttttgttctcggcagctgttgcattaatttgccattttgaacttctcttgttgctgaagcgactgctttactctatgatttctgactttgtcttcaaatgggttatcgtcatgtaaagataatctcgaactgtcttcattttgtgcaaagtgtgggtagtaaaagaacattgtttttttttttagtttaatattgtgtttcatgacattttttgtgtttagtcttgtgcaaagtgtgagattctttttgagtttagtattcttttttgagtttagtgaattaataatgctaatgctcatttacttgcacaactagctttctcacttgagtcgctacgtgtttggtagctgtgtttgtttagctatttagagtgatgtgcgtcttttgtttaaataattgtttgacaatttaccttataatattaactaactttctttcaaaaaataataaaaaagagaaattaaaatttttaatttttattataaatatgaaaggaactttatatacattgatgtgcataaattttctaatagaattctaaattaatctttttgtctacaagtttaactttatggcacgtttagtatacaacattcaaaatcggaataaatcaatagaaaaatgtaacgaaataaataaaaaataatcggaatcaatatttgtaatatgttgtttactaattttttttttggaaatagaatagtagtgatttatcttgttta

SEQ ID NO: 299807 - DNA, 2685 bp, Cannabis indica
gaagtggtccggaggaactctctttgagagctcctcacaggcctgaagggtaccactcgccaggtccaacggcccagagggttgtctctaagaagaaggggtccgagaggacctaaccctccaggtacctctacgagagaggtgaaccccatctgtcagcgcatttaaagggaaagcattgtagcttgacccttctgtactaatggcaaaactagtttcccacaaagcaaaataatcattgggatttacacactacctttttgacatagatctttcccatgcgcctataagcaactcctaccaacacctaacacatcaccaatggacaagtcctgtcctcgctcacccaccactgggtttgggcttggactttgagcccaaaggaaggtaattccccattttaacaagtaaatataccctaaaggaaggatctttaggtcattttcttgagagcaagcgtctttccaaggaggcccctctctacttctataaataagagagtcattatcatcgtaaagggattcgagattttgatattgttgtaactttcaacataaatacaatcaactcgtagactaagacttgttaacgactgaaccacacaaaaatacttctctaaacacttatttatcatccttaaccttaatattaattagttgtcaaaagcaacagtcaacacaagaaataccacaaccttcactcagattaaaacattgatccaatcaatgttggaaatggaagtgttaacaccctctttagatgaggtttccttcactaaatgtctataactttaaataacttcatgctaactagcatgtatctatccaaccataagccattactgttaatatttactagtactatttagctacagtccaaatggtacattacaagcctcaaaaattgcaattcttacgaggaactagcaacaatagagtaaaaaaattggttaaacttgtatattaatcagtataacctgtaataaacttggtaagtaactaaagataaatacaattgctcagacctcagagacaacaaaaatcttaagagcatcttcaaccatgttagctatacattgatcttacttctttttttttttctttgaaagccattgttcttacttcttagacaaaatagctaatgattatcttccaaatccaacagctctctacatcgataaaaattttagagcttggtttctcttgctcaaaattactagctaaaatagtttcgtggctaaattaactaattgtgtgtcgagcttccatcgtataaaagtacatcaatcaaacttattttaaatcaactataaaacaaagcaaacctaggtaaagtaaatcctcaacatgtataagactaacaaaagtacctttaagcgttgtgaaagatccttgaaaccatgaacaagctgaggccataaccgttctcgatctgtactttccataccctcgagctttctcatagcctctgcccacataatctggcatagcaaactattgtccggaattagtcggaaaagaaagataaaaccatagaagtatataccatcaagcataaaataacacattttcgcagagacaagagagaaagaaaaaactcacatccgatacaccagcaggcttcactctaaactgggcaccggttacactgaacagcaaatgctgcaaacattaaatacgaggattaaagcatcacaacagagaatgtaagtctaaattggaagctaatactactgaatatagaacgatatacataacagggaaaatgtaaacggaccttaaaagaatatttagggttcccaggatcctccttgtaggcctcaacaattgcctgatattcaaaaaaaaaaaaaaaaaaaataagaaatcacacaggtttagggtttcgaacaaagatagatagatagatagatacagtacttgaatgtcacgatcagcgagagagaacgggataggagcaacaggagccatttgagtagtcaattgcgaattaggaaaaaaagaagtctgaggcgtcgagaaaggagtctgaaaaccaaaaccaccggccgactgtgtctgctgctgaaacaacggggtctgctgttgaaacaatgagctctgcggtgcctgagtttgcgaagaaaacggagtcgagagcaacgaaccgaagccagtgttgaaagaaggcgtcgacgaagacccaaaagctggagccgaagacgcggtaccgaaaagcgaacccgatgatggtgttccaaaagccggagtcgaagatggagtgccgaaggccggggttgaagatggagtaccgaaggctggggttgaagacggagtggcgaaggctggagttgaagactgagcgccgaaggccggagctgaagacggagtgccaaaggccggcgttgaagactgagatccgaacattgtggaagatgaaaatgttggtctgaatttcgcagagaattgaaatgcgaaacccttttgcttttggtgtattcaactttcgagcgggaggcaccgttttgagaaatgttttcttggactcatttacactgtcctatcctaagctcttcttctccttttcggtatatgggctttttcagcccacttacaagttacaagaggttgtaaatccaattagaggaaattacacttagtatgggattttaaaagttcttatgataaatatggcacatttaagttt

SEQ ID NO: 299808 - DNA, 1222 bp, Cannabis indica
acaatatttataataataaattattgataaaacctgcatctttatatatcttcacacataaagaacagaataaaacaataaataaataaaaatcaaaagagagagactttacatgggcaggattgacattgacataattgttgcttagcagcttgattgtcgtcatcgcaaaaatcctccaattgtttacaactcctacaactcttgagaacttttttgagccgcttatactcaatatgggaacaattattaatagatccttcttgctccttcagcaaatactctttgaatgtctccccaaatttcattgtcttctaaattattatttaaataaacaatttaatcaaattaacagcaaaccctaaaaaaaaataacctttggaatgaacgaataaataatactaataatggtagacttatatatagttttaaaaggtttaataataatctaggtttagattctctgatattcttgaaattttctcgagaaccaaacaaggggtgttggggaaaggtagaatggagtggtagtttgggatttggtttgttgtgattgtgaaagccaaaatggtaatggtgtacagattttaaaggtatccaaaaagggaggtgatggagtcaccgcaatattcggatacacattggcgttaataatcatcatctgcattaatttttattatttatataataaactttattttatttttatatttttaaaataggaacaaattacgaggctttgccacgtgtctcattggctgaaagtaagtggccgccactgagtcactgagagagagtgactccgcccacccctaggacgagcgggaaggcgtaattcccgtccccatctcaacaacccattcattcactaaattaaagcctttctatttggctaaagcatatctaaagtacttcaaaaataatatataatttataatattactagtttaattaaaatagtaaacggtgagagaagatatgggttcatacccaaaatttagcggtaatcatacttaagttataattctggatcaatcaagaattgtcatgtggtaatttacttcatacttaacagagaatcggcgaagagttctctcctcatccccattctatttgggataaaatgaatccatctcaaaatcaattgacaatgaaaagagtagtccattcatcttatatatgacaatttatttctacacattatcaatgtgggactaactct

SEQ ID NO: 299809 - DNA, 4977 bp, Cannabis indica
gtagggaagttatgaagtctgttaagtttagatttgtgggattgagtttgaacaggctcagggggttgatttgtatatttcttatgttgttctcattggtagttttttctggttgaggggctgcagttagtcagctgccttttgtttgtttttcttgtgtgtgatttgtttaaataaattattcctttgttctaaaataataataaagaaaagggatagtttattattttaaatttttaatgagtaaaattagaaaagtatttctttggttaaaatagtgacaaaatacaagaataggggaaatttctgtaactttattattattattttttttttattttattatttttttaaatatctattagtttttggtgtttaagaaagaaagaattatttccaaaataaaaaaggaaagaaagaaagaagccacttcacggacgaacgggttgtttgatgattgacatcctcacgggaagcacatgaggtaacgcgcatgctatcactggcaaccgggttattttgactcacaactccattgacagagccggaaaacctgccaacaccactgctgctccgcctgccggagactccacactcaacccatcaccaaatcaattcatatctccttcacttttctcattcttcaaaacccatctaagggttcattacctgtcaaatctccaaattcaaatttttggtgtcaaaggttttgtttttcctcatctgggcatctcagatttaactcgggaagctttgaaaaccaaaagatttaggcccttcacagacaaagatgagaacaccagcaaagggtcaccacgaagaggaagagtatgaggacgatgagtatggctccaagaaagaaggcccttcttcaaataataactccaatagcaaaggtatcccttttgtttttaccaattttcgattcccatggtagagctacatatagatccgagttttcatataaatatatatatatatatatatatatttcttctcggagtatacaagataatgcagtttttttatgtatcctttgtcccaattttttttttgggtcgaattcaattgtatatgttgtaagtttgagtttgctcgaattttgggcacaaaacaaacactttgcatgtatacgctacgcgtgtacattatattgaaatttagaattctcttgggataacaagacttttctttcgtatttaataagaaaaaaacacgacttttcttgtgttatagaatggggaaattttagacctaagtaatggggtatttatctgatgcatagttttgccggattctttttccattttctttttcgtgattctggtttttgatcatgaaaagcagatgctaagaataatgataaggctagtgctgtacgatcaaaacattcagtgacagagcagcggaggaggagcaagataaatgagaggtatgcactccaatgggttattagaccttgcttaatttttagatgttgtttgaatagctttcttccgaattatttgtgtacacatacttgcacttgagaacatgtacataataatgttaatagttgtgagttttacgtgttgaacttctgtatttatatgtatatttgtaggagaatataataccctgccggcctctctaataacttcatcatttctgacactatgatttaattaacaaggatacaaatgataattagccatctttaccttgtctggtggattctgggtcgttgattttcggtgataatgaatcttagttttggttgagtgtgagttgtaatgagaatttggagtttacattgttgtgggggtggttatagtaacttgataagtacatgcagattagtcatattttcaatttgataggtgttacaggtcagtagcaacaggttaccaatgaaactggtttccattagaaaatggtatgttcaatagatttaatgaatcttatgataaattctacctaaaaaaaaaatatgttgagcttataagagctaacctttgcttctccctttcagattccagatattgagagatctcgtacctcacagtgaccaaaaaagagacacggctcatttctactagaggtatttttttcgtgtacaataagctataacatagctgttagtgttcataaaatcattatactctttgacataattgattgactatttggttttgtgtgcaggtgattgagtatgttcaatttttacaggaaaaggtacacaagtttgagggttcataccaaggatggagtgcagagcccacaaagttgataccttgggtagatttctgatttgtatcttttatacattgttctattcgaatgtttgctaacatgcttgcttgaatgatcattggaatttgtagacttagttctttgcaaatacatgagcttagcatctttttattcattaaaaataaatggtgtattcattaatttcgatcctcatttttataatatagtgcattttcagccagtaaaatttgctttgattttcatctgacatgacaactttcttaattgaatggtagaatttataattatgaggcaaacaattgcagaatttccatttaagcattttgcctcaaattgttaattgggctataatgtcatgggcttaatttataactgttgcaactgttagtttgatagatcatatgttgtaatggggtttgtttggaagagttaactgactgctcaaaatacttatgagtgtaccttgtttatttaacacagagaaacagtcattggcgtgttcagaattttgttggtcatcctcctcaaaacataaaaaatggaccagcagcagcatttccgggaaaatttgatgagagtcacatctcaatctccccaactatgctcacaagtccacaaaatttggtggagtcggatcctagcagggatgttgcttgcaagaccttggatcgtcagccagaggcagcaaacaagggagtttctctaccaatacctacattagcctgtatgtctacacgcacaagtgatggtatgctgacacagcctcttcagataccagtagaatcacaatcaactcagtgtcctacaacaagcgatgggcagaaccaaccagatgaatttatggttgaaggggggacaattagtgtcacaagtgcttactctcaagggtgggtgtgtcttttacaaactcagtttcttggtcggtatatagagaaagatgaattactcaatcttatgagatatttagagaactagttttatgttatgtcaagtttgcagacatttagtcttttgaatggttctaaacaggttgttaaacactctggcccaagcgttgcagaacgcaggtttagacctgtcacaggccagcatctcagtgcaaattgatcttggcaagcgtgctaacaaattactatcttctgggacatctgtttccaaggtatatataggcctttgagcattgattttcttattgcacctctctttaaattatccaatgcgtttattatggcttaagtagtattgtcattttgggtcttcattccaggattatgaaaatgtcccctctagcaatcaaactattgggcatcgtagagatgcaggtgttggggaagattcagatcaaggccaaaagcggctcaaaacatagaagagtatttttttctgggacctcattgttctttttggcttataatttactggctgcttcttgttttttcttgttttgaacctccttgggtcatctcgagtgggtgcggttgctctagtctgctatatgggttgtagaatacgtagattattctgaatgtatcaaaatgagcttgttaagtggttcattttctggtaaataagttggttcctgttctctggctcatttaggctttagttgttcaatgctacaagtctgaagttatttgtactgccatctaacattaatttcttctggggtgctaaatttatgttaacaaagtttgatttgttaaaattttcaaggattataagctgctgcacaaattatgatgtttgagattctatggttcagaattaagtggtgtttgaacaaaggttttgcactatatcaatatcattatgatttctaagtgaaataatgcaacgatcaaaatttctgcaaaaagcggagtatatacaaatggttcaaaaccacttggaatgagtctataacaagacaaatacaagctaaactctcttcattgtataatagttgtatataacatggaagtcttaagaagttgcatatcattttctgtaaaaactatgatgactgcacacaatattacactattgaatatgactttagtagtagtctatgatgatttttgagtaaatgggggcaaacactcgtatggattactgtaaaagcactgttcctcctttggtttgccaggaatctccagtctaagagttgggctaccgaatttacctgcatggccgcttttcactgcttgggaaaattcattccagctcaggcttccattcctatactggtctattagataaaccagaagccttttgtttggaatgatagtgggcttgaaacccaagtatctgcataaatatatatatgagaagggtaataactaatgaaccttctttttctgttaatagaagtacgtacctgcgatggccttcaacgactaaggccatgtttcctctatgagttggaatgaaaatatcactttccaatgatacaatgtaatccagagcagccatctggttggaatgattacggaatgggtcaagctccgagggctctagcaatgtctcctttttaatctatcgcacaaagtagatttgattattcaatatgagtaaataacactagataaattcaatagctacgttgtctcattttcaatctgtacaagtactaaccaaatgaggaaatgctaattttaagtcagccattctcctttgccccccatagatgttaccagcagcaatgtagatttgcatagcaggatcaatgtccaatgctctcaatgt

SEQ ID NO: 299810 - DNA, 5279 bp, Cannabis indica
ttaatatatattatatattaaattctcgtagtgcttgttagggaggcttatccatatattaatttatcatgatttatttttcacttcctaacacgttcatgaattctggacttcatttgaattgcttattctaatattgtatattagtataaacttttacaataattcttgctgttatgcaaataaatatcaaatagtccatcaaaataaacatatatatatcagagaatagaagtaacattgtttcctctctatggaataaaaaagtacctgtacttggctttcagagaggatagaaggacatattcattagagtgattaaaaagttgtgtttctaactttctactgtgctcaatctcaagaactctctttgcttacacttgttataatttgcaggttgttaatgcggtacaaacatatataaacgcattataatcgcaaaaatccttttttttttcttcttattttaagctaacgcgcgcgcgtatgcaccagcagtactattgctataatgcatgtgataatgtttttttttttttgtttcaacggtgggtcttaccttaattaattagatgtaactttttttgacgtaattaattagatgtaattatatggtgttgcatatattttgtatgcaaatatcactactcagctatttcatgtacctggataacaagatataatccaaaaattcaatatatatatatttatatatatctgactgtgtgtgtttattcatcctaataattagcacaggatataaatatatatataattaaataagctataaattaagtatggacttttgtagggactccgtcgatgacgatgatcaattgtttcttcacaataatttttggtaatgaagtatatgaccggtcaagaaaagcgaaaaaaaaataataaattcccagacaaatatataatcctaataaggtttgcaagagaaaaataaaataaaagtaatcctatcccacagttaatatctcatgtaataacaaagacaaaatattatatatattgccgaagtcacatgatattatcacaaatatttggtgattggtactaataaggtgcctttagcctcatatatatatactctctaacttaataaacagttttcctcttggattctacccaccatctcaaacacagaagctgcaatctcattcactgtgcttagctgagaatcatcttcaacctgtaataattaataaaaatcatcaaactaattaataactgaataattaattaaggaattattgattaattaaattaaataccttgacgctgaatgagtaaagaaccatattatcaactgttgtgacattgaggtgaagaaccacaaggcgcaaaagctgcaagcctactaccatcttcaaaagctgattatggtgacttttctgaagcacttttatattggcatgactctccaccattgttacttccacgtcagccacggccgatcgtttctctgccgttgattttgtttgatgatgatcattaatattcaccttattattattattattattggaggatgatgaacacgttgagtattgagggaagataaaaaaatcagagaagagatcggaattattattagaggaatgatcggaatctgatgaatctgatggtgatgattctttctttgttgttgttgttgttgttgatgatgtactacttcgtttttgggcttctaagaactggagaagttgctcaagctctttcacgaaatttatggctcctcccacaatcgatgcttggtctccctacattattttaattaatttcatcctgagatcgattaatttatacagatccaaaattaaaccctaagtatgcttaaagtggagttcattaacctaattaaaattaagattagggtcatcagattggttaaaacctaattaattaaataacaaaaacaattttttttaaaaaaatgataaatatattataatgagaagaagaagaagaataatactctttggacgtaagaagaaggcatcatggatcggagaacggcgaggtaatcgttcatctgttttctccggttgcgctccaccgcaatgtgtgtcatccgctgattctcaacctcttccttattcttcacgcttctaatacggcgtcgttttcgccggacggtggtggttgcttgagttgtttcggcggccggagaaaacacgtggctgctaggtggccgtcctccatcaagagtggtcgtactactagtatactttccggtgaaataatcggcggctgagtctgtggaggaaaatttattggttgagtaatgattgttgttgttgttgttgttgttgttgtggagttccatggaagagggtgaagttatacaatattccaaatccatgagaagattattgttgaaaccatgccccacaaacctgttgtcgtttgttaggtcatttgggtggatattaatgtcgttttcttgaaaaaagtatccatagttccaaggtccaccaccactaccactaccaccaccactactactaccaccacctatgatggcggcgtgaaaatccttattgagaccactgctcataatatagccaaaagggtcttgttgaaaaagctctgtttctaatgccatatatttaagcacactacaacacactcacttttttctctctcttaatttgtatttaagaaggctttttttaagctattctcagaaggttaagcgtatatatatgtctataaatatatgtatgtgagcatcaagcacaaccacaaaaactagctttatgaagaagcaagtatgtctttgtctttgaaaaaaaaaaaagaacaatatatataaagctaatattatgtacaaaaagcgcaagtggggatccaatcatgtgtgttttttaatttccaagttgtctcaaataaattgtactgtgatatattagcggagagagatagatattaactcatataaacgcgttaattaaacattcattattatgtataaatgtatatttgtattattttattttcttataataacaagtatacatattataataatagtgaaaagatcttaatatttctacatttggaatcaaagctccagtacttactactctctatactactatttgatgatgagtcaatctgtcaaattttgcttgtgactcctcgtggccctaattctttcgtttgtttcgaaaagagaggctttcacttggaatatcaaagtttaagagaaaatatatagaaattaattatatattagtaatatataatcgaacatcaaagttgttgtacatggttgttgtgtatatatatgattaattataaataaataaaagtcaattaattattagcagcatctattccaaatttatctttattttttaattttaagaattgaattatatctacatattttggaaactacgctttattctttagcatgaatatatgatattttgtataattggtttcaatttatttaattaataacaattatatcatagatctttcaaaaaccaaaacacgtatatgtctcatagaacactttgaaacagaaattattttaaatttttaaaaactaataatttgacaaaaggaataattgagaacgaactaaggaagatgaattaagtaataagtattcccatggagattatgtctctataatgttaatgaaaatggtgaaattacgagtgggggatatttttagcttttccataagtatttagtttgccatttaagtatttggggattacaatttgttctaacaggattactgcattggaatgtcaatgtatggtggaaaaaatagtttagcaaatggagcactcacaatttattctttgcgagtagggtaactcttatcaatttagtctgatggcaatacactcttattggactcagattttgattttgccaaaaaaaatttgaaagaagtggaatcaatttgtagatcccttctttagaaatgtgtacgttattgggtcagggcaaatactagcttagactcaatatgtacttccaaatctttgggtagtagtctgaaatttcagaatgttttgaattggaatgtggaggatatgggaaaatatatttggacaatttagataaatctatagtatatatctccataataatgattggttgagctatgttgctccacaagatagttgttggtattggaagctatcaaaattttttttttgactgtgcacatatagtgcaaattgccttaccaaattgaaaatgtggcttggatatggaatgctaatgctcataggttggatagttttatttgttggattcgtaaagccaaatgaataagttatttcaaaaaacaagttttttttgctgctttgaggaagatgaaaaattacattttttggtctcaaaaaaggtgaaaaattgctcatacttttcagaaaattcttattaatgttaaatacaaagttttttgtgttatgcctagctaaaagaataaagctaaaaagttacgatttatttggtttgatttgtaatggagtttagaataagtttggtatatgggtatactttatgcgatatactggggtttagatttgtacattgtaattaattataatttgttgcaatgaaataattatttcccaataataataataataataataagtattcgtaattattaaaggcgcatttcccccaaacttagatgtttcagaattaagtatagtataaaaatttaatgttgtaatcccaagagcttagcataaaaactactatagagatgcatttgtagctaacggtaattaaaactattcattacaataccatcaatagtgcagtttccacgttcaattttttatggtttttacaataccatcaacagtgcagtttaaatccaaattcgattattttttttttggcttaactgtacattcagtttttgaaattgacaaaaattcattttcagttatatatattaaaaaaaaaaaccagatctaaatttatttaaaactaattaaataaaagaaaaaagaaaacagcactcttacttataattaatgatttgctgtgatacactcttattgctgagtcaagttaattaattgtaagtttgacataacttgataagatcatattaactcaaaaataattttaattaaataatattattattataaaataaatatctaaaaatcaaacacaaataagtataaatatacaaaaaaaaaaaaaaaaaaacaactccgtacaagaaatgtcacttttgccagcacatttttgtgttggcaaaagttggtattgcg

SEQ ID NO: 299811 - DNA, 6120 bp, Cannabis indica
ttttttttaaaattttaaaaaaaaaaaaatttgaaatgctgaaattctatatcgatagagtagtatacatgtcaaaaatctatttcattaaaaaaatcttttcataaaaaattgaagctagtttacaaaatatctctgttaataatactttataaacatgagatacatgccaaaaaaaacccaaaacaaaaagagtagtaaacattttctgaaaaggtggtcaatattatgtataaagataattgatcagcaaagcaaaagaaataactaataaaagtagctaatttctcacgatgataattcaatttttttttattttttattttttttttttgaaagaagaggatgataattcaattaatatactgctggcactcctactttatattgttacttttcctaactgtacgggaaaataaaaacatggacaaaatgattaaagaacgatatcaacgagtggcgtatattgaattgtaaattaaccaaaggccaagggtctaaatcattgcattattgggggtcaccatatatatatttacgagtcacaaaaccctagctaaaaacccacctcaaattattatttgagactcgtattgataacatcagcaaaagtaatgaagcaaatttaagcaacccttttttttttacacccctgtttagcctctttatgagagaataatggtcgatatatgcaccaccacaacacctacgtacgaaaagaagcaaaattcaaaacaatcaatgtcacatcatacattgatgattatgatgatgatgatgatgatacattaattatttgaaaagaaaaagaaaatatatattcagtagaaatcttcttaccgaattcaaaattaaacaaccaaccaatatacttgtagaatacaaacaaagaacacataaccaaacccattatcgttttctattactcacacttttattttggtatagtcctttccccattgtgtaactaaagaaagactactcatcaaccctaccaaaaataaaaagactcattatcgatttcttcatgcatgtcagatatgtatatgtatacatgatagatatgaatatacatatgtacatgtccaaatacacaaagaagaagaaggtgtgtggtttcaatatgaaaatgcaattaataaagtgtagatttcctctgtcgcacgaaatccatatagtttcatttattgctaagtaaaaaacaaaattttaaaaataatggaatgctacacacatttcgagaacaagctcgttacacattagctagcaattggatctaattaaatcagattagataatattgcattcactaaattatgttagaatttcaatttcactaatttgataaatattatgtttggtaattttataaaataaataaataaagtttgtttaacaaatacccattaaatttttattatgaggcttgagcaattaaattagtaatatattttcaagaaaaacttctttttattttacacttaaaaggaaagaaaatcaaggggatagaaaaaaaaaataaaggtgataggaaagaaaatatatttcacttatgttgtttggtaaagtgcaaactagtgagaaaggaaataggagtagaagtacttacaaaaaaaaaaataataggagtagaagtaaaattacttttttaaatttctatttaaagtattttaattatttaattaaaaataaaaataaataagtaatttaattttatatgtgttttaaaagttttctcaaattttctctccgaattggaagggaattaataatattagcggacctattcaatttctttttctctccaattttctttaatttcctttctctttcctgtcttaccaaacaaacaatttttatttttatccttccacttttctctagtagcttttctttcaaatttaagatagaaggagaacaaggtggtgcaagtgacaacgtggagctgacgaagcgggacgtgtttcgtttagggcacaaaccacaataacaacaacaacatacggcttagttaacttaaactactttaaggtcacgtgaatcgagctctctattaattaataattctaaactcatcaagcctgatctctccataactaaatcaagagtataacgtaaaaaaatctctcatcccaatcaaataaaactcgtaatgtttttccaagttaagttggtgtgtaatggcgcgtgggtcctcttgaaattacaataatggccccatagaaactactcgagtccacccaagtccctactagagattagtagtgaacggtgtacacctctctggcccttttggacatttgcaatggagaagttttttacacgcgaagatgaaggcacgtgagcctcagatttttggttttgagtgaaatgaatgaatttatggtacactacctactaaagctccacctgtcatgccacaagaatgagtttaataccactctcccaagcttagctaaaatccaattatttaattattttctcttattgggtctactactaccgcgtatatgaaattttgtgtgtatatatatagagggttgcatacgcctaatattaaccatccacatttgcataccattttttgcatgacaacttcaaaggagttagcttagagagagctagggcttctcaactactgaagaccagctttttctggccacctcccagagctagagagcaagagagaaaaagagaaagcagagacataaacattattattattattagtattagtattcattttccagcatatactatatagcttgtattattcctacatatattttttccttttgtaatatcaagatatggccatcttcaacgttcaccacccttggacatttacttttgggatcttaggtatacatataatctttatgatcgctagctatcattggttatatattgttttctctttttcattcttttgaaactcattagccaagctcttctaatcatgaacatcttagtatattagggctgatgattcatgatgatcatcactatagtattacatactcatcaagatggcatgacttaatattttacatatactggatcattattttttcttttatataaatataaatatatatatgtgaggtccacacttttgttactgtcatagtcttctccaccccatcagctatggcacttttatatttattattattgtatttgccctgcatattaagctgaatgtcttcatccttcccttcttatttgcttagctacattaatatttttaaaccgaaataaatatatatatatatatggtagcatataataaagaggcccccaacttgctacttacttataaattaaattaaatctactcatttcttgtcattaattactactttttacggtttaaattaataactaatcaactaattaattactttttctttctatgatcatatatgacgtacaggcaacattatttccttcctcgtgtacttagcccctttgtaagtattattatattatattatataatttcacctataatttgttttttttttttccttataccatgtaaagttggttaaatattaattaattttttttttttttgtggtgtttttatagaacaacattttatcgagtgtacagaaagaaatcaacggaagggttccattcactgccttatcttgtagcattgtttagctcaatgctatggttgtactacgcattagtgaaaaaggatgctatgcttctcatcaccattaactcatttggatgtgttatagagatgatctacatcaccatctacatcatctatgcaccaactcatgctagaatcttaaccataaaactatttgctttcatgaacatagccatgttctcttccatctttcttcttacccaattcgccgtaaaacatcctaaccaagtccaagttctcggttggatttgtgtcgccatttccgttagtgttttcgctgcgcccttaagcattgtggtgagtaattaaaaatagggactttttcaattttacacattaaaataattttttttttttatatttttacggaattctacataaaaattcctattgcaactagcagtgcaacctaaatcaccacaaaaaatcgtatgacaatccacatagaaactaccgtagaaaccactttaaaaactcaaactgtaatttttttttttaaaaaaaaaagtttaaaaaagggataattccccttaaaaatatacatatatattttgtaattgaaggtcaaccaaatctcaagttcgaccttaagttttcttttttttttgtaaaaaaaaatctattttgccaattatttgaacatataattagtttgctaggattctttttagtgatttttgaaaaataatacatatttttaaggcctaccaaatctcaagctctgccctgtcaacaccttaagttttctttctaaaaaaagtaataatagtaataataataatatattttgggtaattattctaaaataattaatttgctatttacttttaccaggcacaagttattcgaacaagaagtgtggaatttatgccattcaacttgtcatttttcctaacgttgagtgctgtaatgtggtttgcttatggcgtgttactcaaggacatatgcattgctgtaagtttattaatttaattaattactgtaaataatttgacacagtaataatattattaacatatatgggctttttgtgtacatatgatgcagattccaaacgtagtgggcttcgtattgggccttgtgcagatgttactgtatggaatctacagaaacaggaaaaatgttagtgttgatgaggagaagaataaggctcatgatcaacaccttaagagcattgtaatcttaagctctttagccacttgtgaagttcatcctgtggatgttgaaacttgtgaccaagtgactactgttgaggttaataataataacactaatgatgataatgatcatcaaaacgggactactgccactactgaacatcatcatgatcaagacaagaacaagcaagagaatgcagttaattaattaatatttcccccatagttaattattaattaaatccctattttgtaatcttcatcatcatcatttgcagcatatatatctatttaagaaattagagtcgtaaacaaagccaagaaagagtagtactagtgcattatgagtgtctttgtaatgaagctctatttatttttataatactttttcctttttttaactgttttttttttttcactctgcgcatgtaatatttaatacgaaaatgtactttgtttataacaagaatgaagtaatcgaattaattattaattgtgttttttgttagtcattttcgtacacctaacccttaaccacacttgttacagaatgaaaaggaaatatgattttcaaaggacaaaaataatgcacacacatcacataaatataaagacaaagatatatatacatatatttatattgattttggtacgttaaataaatgtagtagtacgtagtactagctagtaatagtagtgttcatatacagttgagcttaaaaatagaagaattgaaatatgaggtggtgatgttcataaaataccccatctaatttaatacgcacaattcaattcaatcaaatccgtaaattacactacatatatttatatatatttaaaataaattgtatatgtaattaatattttaatacaaaaaatattaatttaagaatctaatacatatgatataaatatattttaaaatttaataaattaaatttatattccattattatatagtaaaaagtataatttaaagcaaaataagttatttttttacatataatttttttcctttaaatttatttatttatttattttaatttgttgtttgaaaataaaaaagaataataatttatttgttttgttgttagttatatatataagaaatattttttaataaaaataaataacaatattaaaaaataataaattcaaaataacttatttaatttatattttatagattgaattaaatttaaattattgtataaataaattagatcgattcaaactataaaatttctacttcgtaggaatggaatgtactttaaataaaatattaaaaatttg

SEQ ID NO: 299812 - DNA, 2196 bp, Cannabis indica
ataaatgtatttaaacaactgcacgcagatgaaattccagtcggctagaaaattatgaaaattttcatgtttttctgaataatgtagacattttagagcaacagagaaggatttatttaaaggaacattaatagtttgtacagaaaattctcatagcgtgtaacctgtttttgttcacttttgcattgtccatgctactgcttcataaactttattaagtttacatttcatttatcctaaatcttaatatagcattttttggtttctattcaggtcagcaaggcactctttgcagaatatctaagctgtaacagaaaaaaaataaccatttaaaggtttaggattagaacacatgaacaaggcctgccctgtaattccatctcagctcacaagctctactctgaggagtagccaattccaggtactaaatagtttatgtaaccattgtatttagatgtcagattcctaatggaggcttgtaatacatatttttcgactattgtctacaccagatggatgtcttctgcttaagagagcgaggtctactgaatcgttttgctttagaggtgtcgcagcatctgaaacaggggcaaagcaaagagtattcgtttattctggtaagacatttctattcaccaaaattaccctacatcttgatctgcctctctttctgatcttaccctttcctggaacagagttatcagcttgcagaggatcttggtagaggcttctcagatcgtgcaatattgcaaacttttcttgatgctgaggctactttaccagttggttccttgaaggtaactctgtcgtttagcttattttcctccaatagagtcggaagctactctattggagatcatatgggcttcttgagatattgttgattaaaagaaagaaatattatgattgtaacatgtcaacttcaatttatccaatgcaggaagtcttggggctgttaaggtctatgtatgcattgatttgcctggaagagatgcagctttcctccgatatggatacttatcaactgagaatgctgccgcggtgaggaaggaagtgacaaaattatgcagtgaattgcgaccccatgcactcaacttggtgagttccttcggtatccctgatgcatttttgagccccattgcttttgattggattgattcaaattcatggccgtctactcagcaataaagctcagggagattaattctccattgtatttgaagaacatatgttctaatcgtgcataactttaatctagcttcataagaaagctagaatgtctttacttgtattgtaataatgcttgtcagcccttcaaaacaaataataatgataataatgtttaccagcaggaaaattaagctaatgtataatggatgtaattcatttaattataagaatataaattctgtattttcttttttctccatcagcaaaataaaatagttacaagttattacatacatttgggtcatatggatagggctttatattaaagaagttttactaaattattcagaatgtgtatgggatatgttttgaactaccactttttattacacatttaattaatatctttgtcctttcggcactacttaattttgcttcttaaaatatatggcttgttaagaattccttttaaaatataacagttacataattatgtcctttctgttaagttttattcttttaccatcaaaaattagtatttttatcttttgaacattgaccaatacaaaactttgcttccttttattaaaataaataaattttaaaatttacagtattttattaattatgaagagaataattagcaattctgtttaaatattgacgtatctttgtaaattagtaattttgtcccttaaactttaataattatcaaattgtacactctcaaaataaaaataagaaagattcaacatttttctagtaaattttaaaaaattaatttaggtaaaatgattaagaaaattaaaaaaagaaattaaaattttaaaataattaagcgatttaaaaaatatttatttttcattaaaaatttcatttagatattaaaaagatatattaaaaatttaattgtagaaaaaaaaattttacgagaacaaacttgagccttatttttttcaaaaaaaatataaatttgtttaagtaaacataatatttttttagtttaatttctaactttttttttaa

SEQ ID NO: 299813 - DNA, 3426 bp, Cannabis indica
tttgatacttctgatatatctctgattgtacaactagaagaaggcttggattgtctatcgactattacaaagtgattatccaagtcgacagtgagatcaaagattttgttatcccagtgcgcactaatgcgttgttgtttttgagcttttttcctggtattgcgtttgaatgatgttggttggacactgaagcttgagcttgcagttactttcgttggccttcctcttcttcgggattgaggtttagtcgctgaaggagagttattggagctttggcttatgggtgctggctttgcaatgggcagcctgccccttttcctcttagtcgatccagagcttccagaccaaggggagaagctatgcgattccagggtgagatgaggggagtccacttcagaaggaggggcgatatatggagtgggagaagactggagagtattagtcgactcttgacacatagtccccactgggtactgttcagaagacttaggcccaattaaaattccatccagggcctttctttttttgggcccactatctgagcttatggatctgaaatcttcaatttgcattagaggattaaagatggaaagctctctcatgaatttgtctactgtgcccagcccagtaagggtcttaaagcccatattccaaaggtcattggatggccatgggatggtgtgggcttggctgcctaagagacttgagtaatcatcttttttcctagggcccaagggagggtggcccgaaaccattggagagtggaccttatctcccaaaatggtttgctctgtttcaattgctgagtcgctttgaactttatccttcaaagaggcaacgacatggctctgtggcagggaggtactctgagcctgcgccactacggctttcaggttgacaggagggttgatttcagagttgaggtttgccgttgtagcctctgttaacatgagcacgccattggatgggtcgctgtcactctgtacgtccgagtttacagaaagggtaagatgatcagggactttcttgatcaccagattgtcggtgtcttcgaatgggcaaacttccccgatcccaggtaaggtcaccgtcgggtatctgcagactctttcctctcccgtctccggtaggtcctccaccacttgttctaccatcctccgttttccaggcagctcacgacgattttcgcgagcctcccactcatctgttgttttaatggaatttttgattctccattgttgtttgaaggtctcgtccatcattaatcgctgctggataatccactcttcaaaccattttgggagagtaggagagaacggccatttggcttcttcctcatatttcatccagacaccatacatggggaagaaagcgccattaggatctttaataactgtaggaggcttgaagcaaaacttttgatcatgagagattatgccacatttgaggcaaagtttaggtaatttctcgtatttgtattggatccagaggtcctttagaggcttcctcttcatgaaaaaacctgagaacaatgctttatctatgtcaatagtggctcgtaatctaactgttcccattccaaaagagcctctttcaaagtcaatatatttgggcagtttaaagattggcgagacttttgcagcaagttcctctatattggtttgttccaatagaaaggagggatgccacttagtctgacccagaaaggggaacgatcaaactgaacctcggacggggctagccacggaggccatggcataactactagcagggcaccacagatgatccatggtcgccggttaagtacattccaagcatcttctttagtggcaaaggagaagtggaggatgccctcgtcatcttccttccagctccaccctttgaaagacgcccatgctcttttcaaggcactggcgatagtattgcgacccaacttaccattgcttattactttccccagtagaattttccctggcggttcttgggcatcaatctcgcctgggtctagcctatgagtcaaatcattaatagaaacttgtattgtatccttgaagagatggcttaaactgctgtcagccatttggatcaatgagaacgttcgcacaggcaagaaagcaaaaacctcacgattttactgagtggaatacgaaagagctactcgcgaaggctagtactcttaatttccttcatggaaaacgctcctagagagcatgtgtagtgcacgtactagtactactctaaaaaacataatataggtatgtgtagtgcacgtaccactagtactactctaaaaaatatatttgtatgaaaggtagatcatagattaaagaatattcaattttagtacttcggatgatgttgataattaggatttatccgatattgatttttatttttatttttatttttttatctattcaatctaattagtatttaaatttaaaaaaattattatctccaattaaactttaaaatcttatctaatctaataattaatttacttggatcatttttgtgattgaatatcaaattactactaattattttatataaacttaaaaacatgaagagaaatatataaaacctaattgatattaaaaatgatgtaagagaaaaggaaggagctactagattttctcctaggaatttaagactatacacaaacacagtgagtcaagtgtgttattcatttagttttagatttagttttagatgaagttaaactattttttttaagaaaattaattaattaatgtatttataaataaagagacaacttaaaaattataattaaattatatactgtatatttttattaaataaaaataatattttaatatatattagttgtaattaaattggattgatttttaattaaactagtcggaagcacacgtgctccgcacgtatatacatgattttttattttgaatggacttatttattataaaaatatgaaaaattttatttgcatcccataaattaactacaaaaaatgtcatttttgcaagcacatttttgtgctggtaaaagtttagtattacgctggtaaaataaaatttacttcagatgcattggcaaaagaaattggcaaatcaacattggtattagaatttttaccagcataaaatgaaaagcgctgacaaaaataacttttcgcagtgcgtaaatgcattgaaaaagttagattttagccactacaaatatgcactggtaaaattttgacctttttgccagtatagtttgcgaaatgcgctagtaaaaattacttttaccaacgcagtagcgaattgtgttggtaaaagtgacatttcttctagtgtataataagtatataaaaaataaatttaaaataaattttcaaaaatcactcttaatatttttttgaattaatttttcgcacattattttgtgttaattttagta

SEQ ID NO: 299814 - DNA, 3420 bp, Cannabis indica
tcagttactatgaaaaactagatgaaagctcaatccagaatcagaatcagataaggaaaacccagcgcattaggtcacctgttagcctgggcgttgggtgatctttctggagcttctaggaagttgttttgatacttccaaggttcttgaaattgggggagaggtctcttataccctgttttaaaccatgctggagagaatgctcggagcataattcgcatttgagtgatcgaaactagcacactaggttaattgtcaacctgggcgcagttttcatgcccctagaattcttgttttctcctcgagattacttttcattatttctgatgaaaaaaaaaattcccaaaacacttttcaaaaacatgattggaaacagcccaagttgacaaaatgtcaacctaggtgctaggcccagcaccaagtgtcaacttgggcgctgggtccagtttcaagctgctagatggttccctctgattcccaaaaatacttgtatcttatctttgatgaaaatagagaatatgcccagaagacttctaaaaaaaactccttggaatcgacccaatttgacaaaatatcacatgggcgttgagccctctttttggctcccatgttagtttatttcttccctaaaagtacttgtttcctcatttttgatgaagatgaagaaaattcatgtgatagatcttcaatttgatgcttggaagtggcccaagttgacaatatgtcaacctgggcattgggtgcctcaggcacttggtgctcagagtgctaaaaaacgaaaaagctttgaatctaattctaatgcctcaaatatgtttgtgacatgtctaattcatgtcccaataaaaattttgacctattttcactaagacggtccgaaaaatgaaaccctagttgggttgtcaacctgggcgctaggtgaaactctagcccaagttgatttacatggtgttgtttcatgtattttcagctcctgaaccttggacttagatgcttcatgtcttcatagtacgaaatactgaaagatagtgagttgaaaacaacttggcgggatccaaacacccattctggagttcccatttgaacgcagggctagggacccctcctaggtcgactgctatgactcaggactactcaactccaaactgttttctttcttaacattgatgtccatgtcactaggataattttctgggttaacactaatcgtgttgattcttggattcttttgaaatgtttaaaagatgttgtgcctctctttttgtggctagccattggagattttaaggaaatcttgtttaatggtaacaagtctagtggctctctccaaaatgagtcataaatggatgccttcagaaaagtttttgaccattgtctcttataggaacaactttatgagggtgatgctttgacctaagttaaaaatagatcaagtttgaatactgttaaagaatgattggactggtgtttagttaatcaacattgggagactttgtttgacttaccacatggatattttttagttaaaaccttcttgtgttagcagcttccttcaatccaaaaaatgtcaagatttagtaagaatgaagaacaacaagttattggtttgaaaaactctggttatcagaccctaaaagtcaagatatcatctctaggtgttgggtatcttcgcctaccgctgaccctatctctttaatgctgacaaaccttgacttttttgctgcaaatctctaacagtggaaaattggataatatggtagaatgaagaagaacattttagaagctcatataagggtcgcagacattaacaatgtttcttcacgctcagctgatcaagtgggtggcagaccttaacaatgttttttcacgctaaactgatcaagtggctgctcttcaacactttgaagtgattcctgatgaccttttagaataaaaagaaatgtattggcaacatcgatcaaaagttgattagttgggtctgggtgatcgaaatataaaatttttccacgctaaagcttctgtaaggaaggcagacaacaaaattaaatttttaatttctgattcagatgcaaaagttttttctaaacatgagatggttggtgttatccaaggttattttgttgatatttttcaggttgtacacttgatgaatttaccatacatgatactttagcaatcgttcattacattgtctcaaattatatgaattatgtgctcttacaatcttttattgcctctgaagttaaggcaaccttgttttcaatgggatctgataaaagtctaggaatttacgatatgtcgctatattttaccaaaacaattgcatattgtgggcacggaggtcataagagcaatgttggatgttttaaataatggttctgatccatcaccaatgaaccgaaccatcatcacagttattccaaaaatgaaaaatcctaaatgaatggcggattacaggcctttgtaatctcaactctaagctcgtctccaaggtcttagtagctcattttaaacatgttctcccgattgttatttctgaaacacaaagtgtcttcctgccaaataaactcattgaagataacatcttggtgtcttttgaattagttcatgccatcaagcacaggacaaatggtcgaaatggtattgtggccctcaagctagatatgagtaagacttttgatcgtgtggagtggcgatttattgaggaaattatgcataaaatggggtttgctgaaaaatggatctctctaattatggaatgcttaacaacgactaccttcttactagtgcccacgagagggctccgtcaaggatgtccactgtctccctatcaatttttgatatttttagaaggtttctcgcgcctgcttcaacatcaggagcatcttagttctcttaatggtttttcactaactcacagagccataccaatctctagtctcttttttttttgcagatgatagtctgttgttctatcatgcaaatgagagctcatgtcttgtcattaatagaattttggatatttatcatagtgctttaggtcaagtactcaatccagacaagtcagtcatgtctttctctctaaatacaactttggcagcttaagtctttttccataggcaattccctatgcccatttgtgagtatcatgaaaatatcttggtttgcctgcacatttgggaagagataaaatgcaactgtttagtggtgtcaaagagaagaattggcgtctcatgcacacatggaatggaaagctattctcaactagagggaaaaaggtatttttaaaagcatatgtacaaattatacctacatatgccatgagttgttttcgtctgccagttattttctataatcaactcgaatcaatgatggccaatttttggcaggactcgaatgaaaatggaacgaagatacatt

SEQ ID NO: 299815 - DNA, 1462 bp, Cannabis indica
aattcttctctgaaaaagtttccaatggagatgaatttccagtctcagaaaagggtataattgtcatttcaagctccatagatataaagtttgatactttgttaacaaaggtgtcttttttattgaacactcttactcttaggctcattttagagtaacccttttcttttcaagttggttttcatagtttttagtcttcaaaatctaatctttctttctgggatttcatcttatttataccatagatctttgtgtatacatggtgtttgataaaagtccccttttgaatttttttttcttttaaattgaagtgattatgttaggtcattacttagataaatatttgatgagggttttgttttgtaagattccatgtccttctttcatttgcttttgtaaaccttcttctcatatttattcttctggacaattgaaattggagaatccaaaatgtaataataataatgttaatttagttcttgaaaattgtgatgatcaaatacttggtgaggagaataaggaggaaatcttagatgagaaagaaaaaacagaattagctaagatttgtatcaaaagtagtcttaagaagccaatttcagattcggattctttaaatgagaagcagcagaagaagaaagttcaatggaaggactttttaggaactgaacttgttgagatcagagaatttgaaaccaggtttgttatttattctctttacttttgctctttttagtcttatgttaataagtttctaataatgatattattgtgtgaaatttcctagatttgaaaaggattaagaattgagtagtttgaccattttgttgaatttgatttctactcataaattgacaatattgttttctatgatgtcttatgtttctaagtgtatttcatggtactatttgtagaccaacttaggactgtatttcaaggatagtaactgtcatcatcatcatcatcatcattatcaatatattgatcatgtgattgaatattatatagtttcttaggttttgattccctttcgattttgtgtattgttaaaagttgtttacaaggattcattttcattgttagaactcttggaggaatgggaaaaccagtttaatatgttttgagagttttcggctcgaatttacattgttttagcacttattttgattgggttaatactattttggacttttgcaaaagttactgattagattttctgttttgtaaaatgacaaatttaacttgtatttttcaaaatggtataaaatagtaccctcggttcaatttttgataatttttttttatataaccaatttgaagacaatttttagcacgaacagatgcaaggttattattaatttttattttaataaaaaattagttcagagtactattttacactattttataaaatacagggtttaatgtgtcatttaacaaaatagatggtctaattggtaacttt

SEQ ID NO: 299816 - DNA, 4716 bp, Cannabis indica
aaaaaaaaaaaaacaacaattaagaaaacatgaaaaatataaaaacaataagtctcttcttgcttgctaagcccagaactcgaaccaaaaatcctcccactagaaatctcacgacgtgaaatcgagacctagtaatcgaacccccttcccacgacaaccactaatgagtagcttgaaaggtgatgtgtcttttacgcaatcaagaagaaaaatacatccatggaagagtttgtatggtgtatcaaaaggaaggaagaaaattgttcgttcttatggtatatcatgggtaaaaagaatattgtggacggagaataacccagccgcctatcgatttataaattgtcaatatattcaatggtaagattttggctttctttcttctttgaaagcagagactttgtggggctgagatttatgttaatcttagcattttctgttataatttcaagatgagggtggctgtgaggtgtagacaagtgatttttggacttttgaaaaatgtgaatgagcttgtgcatcaattaattttttatgaaggataggaacaactgataaacaagagagggatgtatggaagacgttcatggctgtaaatgtcattagtgggtgttataaaatttgaaacatattgtgctgattatttctggtgttgctgttgtaatatttatggtaaattagttttataatttcattgtaaatctaggatatggctgaggtaaagtttggatttcatgctttttattttgtaattgtaatgccatggaaagtgatttggtatttgatcttatcttgcattttgactatttttggagcatgacaatcttattttgtctattgttttttttttcattgtgattgatttcaaattaggaaagagtttctcagattgtggtttcttaaagagatttatacattacaatatgcactatcaattagtaaaataatagttacagtaggagatttgtacattacattttgtattatgaataatgtttctaatatttcaaaatcttatatattgtgattggatacaagctttccaatatatcagttcaaatataaatgagagtacttcacacacattataccagttgttcataaatgattgtcgacagaataaagttcgatttttggatttggaagggtttttggttcagttctgagtttagtaagtaagatgagaaatttaggggtttagatttagttttaaatagcttcagcttttattttagttttctgaaatgtttgtttgttatagatgatatttaatgaaaaaaacaaagttggaattaaccacatttgtccatgtatccagttaactaacaataaattggaaaaacaagcttttgaatattagtgccgctattttcaaattagacacttattaggaacaaatcaaaagaaaataaatatttatgccgtaaatttttttaaaataaaatattaaattgcctattcatgttagacactactaatctcatctagagattgccttttaccaaattcactaataaggatcacgttgtttttaatcttttttaatgagtacaatgctgtttttattccaatcttcacttggacttaagtaagtaaattgttatttaatagtttccttcagaggtaaaagggatggattgattgtcatatacggttaagttcacatcagttccaaaagcacgatttctttatgatattcatatctaacaataccaaacacagaaacaaaatgtaaaaaggaaaaacagaaccgtaaagattacggtgtaaggctaagctttcaaatccaaagcagagcaaatgcattatcagtttcttcacatttccctcgagctcccaccatatgtcttgaaaggtacagtgtgcatcattagaacctttacaaatgattttaactcttgcaccaatcttacaaggtcaattttctgatgaagtgttgattagacctttatacgaaccacgaatgagcctgtccaataatgtcacaaacatcattttgatatacattttcacaaaatcatctgaagatagagggaaccataataagatacacgtggacacaatgtctctaattagtaaataaactcaacaaagacaagaaccatgatcatcaatactaattcaacaagcaaatccgcactatttcaggaacaaaatcacactatgattaacaaacaatattgaggataaaactagtggtaaaacaaaatagatagaggatgagtaactagttactggggtgaagaacaggaaaatctactggttcgaaatctgatagtgattgattaagttgcaaaaaagacattagctgaattcacaaataagctttaggcgcttagacttatagaatttagtaagctacatgaagttccatctcaaaattaattggccaaggaagagtagctcatgcatcttatatatgctattatattttcacacattaacaacgtgagactatttttaatatatcctcctcacatttggacttgaaaaataagtatagtgaacgacctttaagagaccatagggccgtaagtaacatttgaaaaaatctcacaaggccaaatcgaaaaatttgtgggtgtacatgtagaaaaatttgtgaattttttaaacaggttaaagactccaacattagaaactagcacacattgtcgaaagatggagacagcaaaagcattttaattgctttgataccacattagaatttaggattaaggtgcatggagttccatctcaaaataaattgataatgggagaagtaacccatacattttatatatgttattctctttccacacattaataatgtaggactttttctaatatagactattagagcaagctgagtccagaagcttgtctagaatctacgtaagggtttgaaataacaagtctaggcttataaatttagcaacaatagtttatagatatatcaactctacagtgtgcaaatgttttatttagtaattaacataacaaataaatcacaggaaacatagaaacataaagcaaaagacattcaaacaatggagaactctatatcgttgcattcgaagccctgcatagtagcttttaatgcacgaaacaagaatattagcaaccttgagccaatcaaattaacaagcaaacaagaaaaccagaaaacttgtataaactgcttataaaaagaaccaaaaaagtattaacagctacaaagatcacaggtgtaagtacacttctataagggtgtgtttgaaaagtcactgtgtaattcaaaataattgtaaggcttggcgtgtttgttcaaccaagtaattacaccataactatgtcattggaggtaattgagaagtcttagttacactctccagtacttatgatccctactgaaaattgggtctagttatacaatattataatttttagatcattaatattactaaattgtgtaagtagtaactcatttgccaaacgtgataataagaattcatatgcaattactacttaacatttgtgtttggatgttaaaagtgtaattactctcatgtgcagttattatcctagtaattacactaccttgtaattctttcaaacgaaccctaaagaaaaatattcccatttgacaacatagtcaaaagaaaaaaaagatcacaggtgcaagtaactcacaagctggaagattggttatatcagcagatacagcacaaggaattcccaagttagaaagagctccccttatgattccacatgggaaattgagatgcatccttgtaacttgtgtgctcttgttctcagtcacagcctcaggattattatgaggtacatctccattttcggagggctcgatcgacatcctagaaagccagcgaaaccgagtatcttgcaatacaaatgtaccctaaagacacaacaaacaaaggtgcgtgattctatcaaatttaagacatctcttatacttgaaactgtcctcattgattattgattctgaaaaaaaaaaaaattaataattaccctatgattggtcttcaagttatcaatctgtttcttaaaaagttcagaccagaagtccttacagatgaatttgatagcctctagatgatcaccgaagcgagaccgatccatggtgtacctaaaaaaggtaacttgaatttgtatacaaattgcatataacccaaagactctttcttaaccatattgctatccctttctcccgttttcctattaattcttggaaaccaaacagctccactaaattctataaaatgattaatatgcaaacaatagttgtggttggtatagggtcaatgaataaaatttcagttttttagatccaaattcaagagcttcaaaaaccctaaagaaaaattaccgttcagagagctgaaggccgacctggtaaccaatggcctcgatactatgggcggcgagatcaggcttattggcgtagaatcggttggagtaggttgaaaccatctccgtcagtagactatccacgcagctctctgagacttctctccccattctctctctcctctactctgctgtgttttctctttctaaaatgaagaagatgatctgatctgctctttccggccatgagaaatgggctttctagtttaagtccaaaaccaataggagattgatgggccttttgctttgtaataaaataggaggaaattacactctataccctttttatactgtcttcttttatttttaccctcttttttaaagtct

SEQ ID NO: 299817 - DNA, 2318 bp, Cannabis indica
aaaatatacatctaatatattaaatatgcgggttggcaggcgggtttgggttcaatccgaaacccagtactcctaaaaactcaacccgcgaacccgcccgaagggtaccggattgaactcgacccgcccgaacatttatttttataaaaaattatgggttcatcggttcgggttcggacgggttcctcgggttcaggtcaaacctactcgaaatgttcagtcctacttcttacattccaaacgaacactttatccatttatcggtggaggatctcccccttcatcaataatggactgtatctcacaaaagacctttcccatttgaacttcatgatcatccagcacattaaaagaatttcttgtgttcactttggaagggcttgtaatcttcactcccttccctttaactgttatgaaatcttgttaatcctctttagctttaactagctcttgattcttattcggctttgtcttttctttcggtttcaaaatcttcttggtttgttcaactattttcaccttcttgcagacattgcttgtgtgccctatactcttacaaacttcacacttattaggtctcccttcataggccacctccaagtaaatcaaattgcctatttcatcttcgaatctgatctgattcaagaaaccttttgaaaccttgatttctagcagaactctagaaaattccaacctgtctctatttgacgtagcttaaacttgtttaatcattcttcccaaagtactcactattttttccatagatcttcttcccaatacattaatttaattttgcagatctgaacccatatatcgggactttccaatcctcttccctagtgaatctcacatcttaatagctcgaaagagtaagaacatgaagaatgaaaagagagaaaaagagtaaaaccagatctttattgaatgaatgatctcatttgatacaaacaccaatggaagctacttataccagtagctttgaaacaatatagctaagcaaccaaccaactaaataactaacatcctaatcgacactctaaccaactaacaattttcataaccaatcttgatactccccctcaaaatggagaaactatatttttcagtcccatcttgactttaaaattgttaaattgattaggaaaaagaggcttagttaggatgtgagccacttgatcttttgtagaaacatggactgtctttatcacaccttattgtactttctctctaactaaatgacaatcaatttcaatgtgtttggttctttcatgaaaaactagatttgcagcaatatgttgggctgatttgttatcacaatagagtagtgcaggcccttcatgatcaatctttaattctttgagtatagagagaagtcaaaccacatcacaagtggtgttagccatagccctgtactctgcctctacagatgaccttgatagcgtgtgttgtttcttgcttttccaagaaataatggatgttcaaacaaaaatacaaaagccaattgtggaccttcttgtatctgggcaagcagcccaatttgagtcagtgtagacatgcaacttcacctctgaattggcaacaaaaaagatgccctgtccaagagtacccttaacatactgcagaactctttgtgcagcatgtagatgagtgactctaggtgtgcataaaaactggcttaacttttttattgagtaggaaatatctagccttataatagtcaaatattgcaactttcaacctattcttctgtacaatgttggatcagctaacttttccttctcatcaagtccaagtttgagatttgcctccattggtgtgcttactgttttggaaccaaggtaccccagatcctccaacagttgtagtgcatatgccctttctctaatctagcaacttcaagaactagaaaatacttcaaatttcctaagtcttttagctgaaatctagtgtaaccttgcttgtagagcttcaagttccactaagttgttgctagcaagaatcacatcatcaacatataccaataagaatatgaaactgttgggtcttgtgctccaaataaaactcatttgaatataatcagatttactaattaataaagatcagaaatcacattttatgttgcatggttcacataatttatttcatgattatgtttaatgtataaattctattaagtccagaacatatgtatttgttcatgattatagcgttgtcagcacagtgaaatataatcatgattttatgttcaaaagtttaattctctgatttgtcagttcactggatttagactggcatgataatcagcgataggtatactt

SEQ ID NO: 299818 - DNA, 1790 bp, Cannabis indica
atatacctaaaaagaacagcttgaggctgggaaagagtgtactaataatgtcattgttattattgtactataattaaggttttactgtttccttcttctcttgctttgtatttttatatctgattcactccaattcttgagcagagagcagaagtgagtgactgagttctctctctctctctcttgtattattatatatacagaagcagatcattgatgttagtacactcttcaataattttgtatagctggattttgggtttggtatatatataccatctcactctctttttcctcgaggttcattttgaatttcattttctgggatttgaaaatactatactattactaattaatcaattaatttatttattttcacgttttcagtgctaaacataattaatttcagtaaaagttcaaattttgaacagccccaactaattacttttcgacattggtttttctatagaaggaattaattaaagagttttcgacattggttgatgcagtttaaacagtagcattcatatttggcacctgtagcgttcatcattttttataaatcatgctcgattaaacaatagtacatttcaatagtacattttagcaattctctttaaacaatattaaataagaaaaaatcatgaaaaagaagagaaaatgcaagagatgatgaaaggttcattatatgcaaaatcccaaaaataatatcttattaatattctgaaaaagaaaaattaggtatctaacatttcaatatgaattaccaataagatcaaaactcgaggcaaaagtggaaacagtacccaatttctcaacagcggaggattcatcatcagcatcaacattaatctcgtaatcgtcttggctacggtaatcgtcgtcatgatcagattgaataacataattaccattttgatgatcaatatcaatatcttcacataatttctcatcaactttgttgttgttgttgttgtcgttcataggaacaatactcataatgagtcgtccctcggctctattcactctcaactcatatttgttgtcgtcgttttcttccacctcttgaacgacaagtcgtttaccatcctctgtacatctccgaaccaagtggcatctttggtcaacaatatttgtaaacaaccggtttgcttgatgagtgaggttgttaatggcggtggaaaatccttcttcgtcgtcccaatcatctttttcatcttctcaaatagtttctcctttgtttctatcatattcattcaacactctccactcgattggaattgaagggtttttatattaaggttgttagctaggttttacaaatatttatatatatataggtgatttatattttcatttaataaaatttgtattgatataatcaatacattacgaagttcaataattttatttgatggagcagaggactattaatgggtggtgttcaatgatattgtgaggcgtcatcaactctttcaggtgaaaaaattgacgaactatatacttattacagtccaactgtacatattcatgaatttatttttaataaagcctttctccctcgaagagataaagaaaagttattatgttctatcaacaacatattgggatattggattgtctagagtaaaggctggatctagccttaactaatgaactttacattacattggttagtctctcattcccaaaggtaaggaaccaggctttgtggttaagtattatttttgggtattggtggtgattattgttagactttttatttgggcttacattaaattttattggtt

SEQ ID NO: 299819 - DNA, 1785 bp, Cannabis indica
aataaaaaaaaaataacaacaaaactctaatcatgctactaccaaatcacattttacttgccaactaaaactaatcaacgaccgcacaaaatcttctatcactagatcacaattcttagatcatttggtcttgttgaaagctatatcagaacaaaattttctcttgatatatatccaatgcctgcatgactttatctatgaacaactttctatgcaatctatacctgcaacagtgacagatcaatcaaaaatattaagacttgctcgaactttttatcatattcaaaagcccaatgctaaagaatccagtttgtaaaaggtaaacatacttgattgctgcttcaagtgtcctactagcttctgggatagaatctgcaagcagtacattgatagaaagggaaatataagcttaaggttgaaatatctccaagaagaccttttactgttgatctaaataatgcaattggtcactttaagaaacttcagcttttttgcaattatagcctgattttgaggtgaaaggtatcaaatatcacatatgattaatttagtgggaagaaaaaaaatcttacaaaagacattgagcatttgcaaaccaagaatactacataagaaattagtaatgctcaagatgagagattcttaagaatcgctgcttttaagaaaatctgaggggttaaaaatggcaggaaaaaagaatgaccactgttccggtagtgtgtgagtcagccaagagttctctctttttcttttttgtccttttattaacataagataagaattagataagcatttgttacctagaagtttttggtcttgcctaaaggtagtaggaaagtcagcaagcattcgtttgcattcgtccagcaattccttcacagccttcttctccacacttgggataagaggcacatccccatcagaccaagtgggcaatgttctcgcagctgctatgaccgctccatcaacaaatgtgtcgccaaccttagatagccgagctgctacattcctttgttaataattaaatgattctattgcaacaatgtctgaaaagaaaaataaacaaacaactcatactgttgtggtaatattcttcaggaagaccagatatgttgaacacagacaggaaggaatccaaatgaatacgtgcattgccagagaacttgattacatcccatggattctgtaatatttctttttaagttagttccagaaagaaattaaaaaacatagaaaagaaaagaaagaaaaaaaaaagccaaatgccatagtcctagtgtcctcttgcgttgtacaatagataatttattgatgcttaagaggactaaaagaggtaccaagctagcctcttaatcaaatttcaattttcataaaagacaaacaatataataagtttattgtttaataaacaatgatgttcttttactaattgctgataaaacatgaattaaaactgttgaaaccatcaaacaaatttaccacaggtgaagagaacccatatctttgcatgaacttgttattcatctgttggctcatgtaatcgacagtcatctgaaatattcacaaaattgaaagtgaggtatgaattaagggattgtgttgatgtatctatataaggaaattgttaggctctaggattagtgtggcgtgctaacatatattaaataaaagggaatttgggtcattgtattaagaggagtatttgggagggaatacaatagcatatatacgatactaaggagaattggtgggtatgcaatgtattgagtagtcactctttgcatc

SEQ ID NO: 299820 - DNA, 1010 bp, Cannabis indica
gcctgccatagctatccaaggtgtttacctcatgttctctattacagaggtattgccttctgaattgaggatttcctttacttgatcagaaacacagaaacttgtcggacctgaagtgatgacacatacattatttccatcaatgtgtggtttaacagaacaggtatcctgagctccgaacaaatctacaatatcagctgtggaaaatcctgcttgtttaattgataccattgtaccagggaaacctttttctgaatagttctcagtagatctatcaggacaggagcatctaaattgacaatatctacactagacattctattgtcattgatcatatttagtaactctggttcaccaggaaatgcatagatcatagatttaatttatacagctaaataaattagtggaatgaagatacaaattattaggaaagtaaaggcttagaaataaaaacaaaaagaaaaaggggttctatatatcctttatgcaccgttaactaagtcaaaacaactacaataaatgaatgcaccgaccttcatcacagtcaaaacttgagaatcagcagcatcaatcatatcatatgctcaatggggagttctacaagctggtcactgactagacatttctttccaaacttcgctttttcttcctcaaaatcatcatctacacatccaagagttttggtgtctaaactctccggcaaaaaactcttcagtaaacgcaggcaacgttcaacctgcccaaattaggaaacaaaagtcatgtcatgacctacaaaataactagattgccattgccctttagttattgaagaaacaaacatggaagcattggaagagtagacaatgtaaagactcagaaagttaagcctaaggtgctcttgagcgacgagcttcaaatttatggtttagggtggcttcgaatgacagtattgaggggtgggaagagctgtaggtggtgctgtgagcaggggcggaggtatttgttagagattttataacaatggaaga

SEQ ID NO: 299821 - DNA, 1265 bp, Cannabis indica
agagagagagagagaggaagttgtagagttggtggtagagagaaagtagtatttggtggttgggtttggataagatacatgtcttagatgtgaagatataccatattatacattgtttacttgtagaattgatacttaataaagtagttgagtcaaattagaagtgggtatcttctattaatcttctttctgactagtagtgacaataatataatacataaatgctgctggttgtttcattcctggacaaacaaggcttaatttagtatggagaattttaatttttctttaatacagaagagtgtgtttgacaaaatagacatttttgttttgttttaatatattattttgcaaaatgactttgccagacctatgaaatacatatacgagagtattatgtacctactttttgcaaaaatatcatttagaaacggaggctcaacaaaaggataaaatttcttacacaaagtaacattcttaacatactcaacacttgtcggaagatatcatatatatatataatcagtggggatgtactgaatcatggtgtgaaaagctactttgtatataatagaatgtaattttaaaaagaaaatgtaaaaaggttaattttcataaattattcgtgtaacagcaacaaaagtggtgacaaagacgaaaagaaaaagaagcaagtgtatccttttgggggagggaaaaaaggcaatgcaattgtggagtgaatcgaatctaataacacaataagatatttaatattaaatggatctcatctcattctctattctcaattctcatcctcccaactccccaagtcctatctatcctatgttatttcattatttgtaactaaactacgaacaagtagcagagaggggcttgtctcatatctgtcacttttcagagtaatatttttttggggccaaaaatctggcttcggtgccgcgtgcagcatctagtaacacgtggcgagtgatgattggccgtagatccgagtccgacaaacctctttttgtcattgctttacttttctgcctttctctacttttctgtaataaaccttggataagaaacaaatatcattataaataaaataaaaaggatattattgtttattagtattaataataatgccaaatacttaaataaataagataaatttgattacaaaataaaaaaatagaataggaatggaaatggtaatatgaataggaatagaatttctattcttttatttggtaaagaagatgaaaatagataagtattta

SEQ ID NO: 299822 - DNA, 2225 bp, Cannabis indica
aaaaaaaaagtaaataaataaaacaaaaataataaaagtgaaaaaagaataaggtataagtaatataaatataaaaaattatttacaatataaatgttaagtttgaaaaaaaaaaatatagtactttatgtttatggtaaattttttttttattgacttttcatttaaaatgttttaatttttaatttcttcaaaaccataagatgttgcaaaagaattctgatatattagtatagatattaattaattaatgacagaggtgtggattaattgaagaaaacaaaaagcaaataactgaaacaatatcataattcattgagacatatttatgtatagattttatttctattttaattgtgttagtaaacagctcaacaatgtttgaattttggtttaacaaagtttagatgaagtttttgggtggaccaagcttcataacatagttcaacagctatatattttaggaatgaataagtaagttaggtggatgaagcatatagtatttcaattgctatacttaatgaatgagtaagcaagtggagtggatgaggatgtaaaggccaattgcaccgaaaggtattaaaatatagtgagtggcagcatagcaagcaacccatttagaaacaagacaaattttctaaaaacactttttcctcttaacaaaaaacaaaaaataaaaaatttgcataaaggggataatagtgggccactaccaagcacaaattgatagccgaaaaccatcacagattttgttttgaggtgaaatcacaccctagattttgtacttgtcttaaatcagttaggtctctcattttgtatattttttttttgttttcttttcgaaggaatctctcattttatatgtttattttaaggttataactgcttaaagttactcttttttagttacacatttagtcatctttagtgttgatcgtctaaaatatactttacactagatttacatgattcatgatttcaaatgcactgattacatgatgataagaagtgtaaatgtggtcctactttgggtctggacaggtatgttaagggtaagatataaaaaatcaatggattgaattagtgtgcggtgcaacaattatataatatttacaaactagtctattgataaaaggagaatatgaatatgaatgagaatgtgtaggaatttctatagatgcaactagtatctattgcaatccaactctaaaacttaacacaaatacaactaaacgaacataaatcaaacaactaaataacataagttaactgcaagaaaccataacaaatacaatatttatactcgttcgaaatcaaagttatatcagctttgttcttattctagttttagaaccatcatctctttctctttattggtccaaggtggagtgttaccatcaactttgtatcatagtttttcagacaattttcgtgcccgaaaatacatatcgaaatatatattttttaattttttactgcggtgttcattatagttacaatattattcttataaatttttaaaaaatttcgaataacttacaaatgttgaaaataggtctgaatttttttgaacacgcatgataaacaggaatattaggaattttattttcggtattgtgaattattcagaatttttcaaaaatttacagtgttgatattgtaactataataggtattgctatatatatatataaaacagcatgtgatttcaaacgcagaagtcgactaagaggttgtaattaacattcttcttcattcaaataatcttaaaatatattatcacagttcaacaatataagatcaaacaacactacactcaatcacaagtgttttacactctctcagaccctaaggttaaatttggttgaaggaaaaatataggaatatgaatgagaataagaatacgaatagaaatggaatggaatgaagttaaaatacataaaagtacttgataaaaaaaattcaaattttttctcatcattccactaaaatagtggaaaagtcattctatttgaatgacattccaatacattacaatgcaacaaataaagaaacggaataaaattgattcatttctatttcattatctccaaccaaatgtcatctgagttaaactctttcaaatgttgagtgaactcaatacaaaacccgttcccaaaagaaatatctctgtaaaaaccttttttggcaagttaggtgacaaataatttttccatttatggtaa

SEQ ID NO: 299823 - DNA, 1677 bp, Cannabis indica
atgaagatgttcaagtgatgtgggaaatactacaaagaacagaatcagaaatgttaggaagtaataacaataatcttaatgatcatcaacccaagcgcaagcacagattgtttcccagagtttttgtatggtctaaccaaactacaaaccaccaataatcaactactttctcatcacccaatccataatatatatatatatatatatgatatgagtacagtaattatatatcactataatcacataccaatcagaatatatatatatatatataactattttgatgctaataatgttcattgacagaaataatattatcaaagtagcatcaaatatagttcagaacttgttcaataaaagcctcctaaatatatgcattcatgggtgtgtatatcaaaattggtatgatcaatggaaacatttactgttactttttcactctcaactcttatctacttatatttttcttaatttctaacgtatgtcttcaatttactgtaacaataaattatactgagttgatgttttggcttgtagcaattttattattaggtcttaagaattgtgtatatataataactattttgatatgggtctgaaatgttcaattctcaactttagggatgagtgccactgccagcacagtatcataatatttgatctgagtattaactggtacaattcattatcattgaggcaagcaaatagattaaatgttcatcttagattaaaattaactacctaaattaaaattaatatccttttcaaaaaaaatattaaagttaatgtatataggttttatgtgtaattttttttttaaatacttccaaattagtccttttatttcaaaaaactaaaaaaaatgccttttctattctctctttccctctcggctctcactcggttaacttctttctcatccaaccgaccaccataaaccgtcccaaaattcaccaatcgcactaccacaccaccacccacgaccctccctctctctttggttcaccattgtgcatggccgacaacccatgaccatcgtcgtcgaatggacacacgagtacgctttgtggtttctttgtattttttatttattttttggtaaaaaattgagttttggtgagatttgcattttctgtcatttttttgtgtgtagtccgatagagtacgatggtgggtacaatagtaatgtaatctagaagttatggatgaagatttgataatagtttgatagtggtatgataattgataaaatgcacaatatatttgataagtgcttaaattttttgttataaaagtaagaattactaagaaaagagtgggtgagatttttgatatatgaagggcaatttgaagagatatgaaaaataaacctacattgttaaaagtgatttaactttagttgtgtgttgttattttttgtttaatgtaaccatgttttatcaaatttctttttttaactgtatcatagatctattagtgaactcaccaagtttgaaagctattcaaagcatcattaattttaaagcattgctattagacattagtagtacctagtgtcttttataagtgacatcccacgattagttagtaatattttttaaaggataaataccattttggatcctgtattttgcaaaaaattacaaattgaaccctatattttgttaaatgataaaa

SEQ ID NO: 299824 - DNA, 2364 bp, Cannabis indica
aattatatataaaagtgtatgagaaaatgataataaggtttttttgcacatatttgtaattaattaaaataatgtatacaaaattataaaatgcctaagaaataatatatatatacaatttaatttaatacaataatacaacctagtacagtacactaaactaattcttatggtgttttatgtaatacacagacaaccttttaatttaatccgaatgttcatatcattatgagctacttaagtgcaaaccacctctacgaagaagactcaagtaattgattttaggagaattatttatatactatttttttttttcaaatttacagtttgagtttctagagtggctgtagcgctagttgcaaaagagatttctctatgattttttgttgcaatttaggttgcagcgctaattgcaatagggatttctatgtaaaatttcgtaaaaataaatgtaaaaataaaaaagtctcttaattttatggtaaacaataattttgggaccatttattatcatgttatattttagatgaataatcaatacattattatactttgttgatttttttcaactacatctttcattaaaatagtactaaattaattcattgaattgaacttgtcatctgtcaacttttttttcactttttccattgggcactccttatccacttttttcttccaaactttgttataaggaatattgtataatatttatttaaaatatgggaaactttaatgtggaaaaacattgaatggattttatgtaccttaactgattcaaagattgtgtggtagagttaatgacattgaaagttaagagttgaagcttgagttgaaaacatttatggcgatttcatttttcttcatctttttttttttctttctagacaacataatggttccaatccaaactgattaaggaaaaaaaaacaacaacaagtgagttgagagcagtaaatagggtgggaatgtcataaatctgagagcagagtagactattcaaatcaattgaatttaaagaagtgcaaagtcagttaaaactttctgcatagatttttacctatttcccatatttggggtttaccactctgtaacaagtaatgtagtactatagcgtagttgtagtagacattcagtcctttcagcctcatctcattaatgagtttggtgtctcaaattccatagataaatgaacccacaaaaaattcatttttaatttattaaaaaaaaaaaaaattatttaagagcagggcatagaggagggagacaaatgaatgcttttatttaattattgcatgaacttattattgttgttgtttattaggaattagaatagcttgcgtgactagtactctatttaacagtttgttttgtcatattcatgttgatattggtgagttttgcaatgctacttattttttttaatgttacatgttataatatgaagtgtacacattaaaatttaggacttgttaaaatgacctctaaatcacttttcacactaataacagtgatggcatatagctttctcagccgagcagtaatgcttttatttttttgtgattatttctcgaatttttttctttctgcttgttctacgcaagtggaattagattgtgtgtgggcttcgatatcttcaaaaatttcgggtcctatgaatgctaagttaactaggtcgttctttgttgatgatgtttgccaagcattgtttcaaatggacccttccaaaaatcttgctaaagttggtatgattgcggggttctatcagaaaaaatggaataaggttggtccagatatggttgtggctgctgtggaattcttgaatagtactttgagtttaaaaagtattaatcacactcttatctgtgttatttttaaggtggatgctcattcacgagtttcgaatttttaacctatcagtctttattatgtactttataaaattattactcaagtcatgactaatagaatgagacaggtgttgggagatattaaatttgaaaaacctagtgcttttttttttatctgataatgcttttattggctttaaatgtattaatgcattgaaaagaaagaagaaggagaaggagaagcagatgaagaaaattggggattccggaatctatgctcttaaaatggatatgtctaaagtttatgatagagtggagtagtcttatttggaacaaatgattcctaagttgggtttctattgtgaatggtgcctaaaattcttgattgcatttcatttgtggaatattcagtattgattaatggaagtgtccatggttgcattacacctcagtgcgagctcaaacaaggggatcctatgtctccttatttgttccttatttgtatagagggact

SEQ ID NO: 299825 - DNA, 2039 bp, Cannabis indica
gttgctatacaaattttgattgctatacgaccgccattgtaggatctgtttttgagcaactttaccacctggcaaaaaagtaggggaagtagttgttggaagacaaatccagccctcgcgccggcaccagcaccggagtttctacctggatagattcgttgcatctgacgattcctcctgagttagtcgtcgtaaccgcatcaggtcatagctcctttgtttggcgctagcacctcttgcactgctctgtctgtgcgcagtgatgcagtgggggatttgagcctaaggatatcggcggtcggtcttgctcctagagagttggctggctagatctgatcttctaaggatgaatatcactgcagcatgtgttttaagttcacgtgcgtccatttcgactgtctttcttaggcaggcggaggcatcaaatctttttctgggcaccacctcagatctgcacatttttggcctttggccaaacctcgactagtgataaggaggtcttccttcttctcttgcacggaccttcttcctaatagtcttgcatcggtaactgtcgtgcatatctctttcttcagcttacaatgaaagcaccaaaatatttatcgagtttttcggtaactaaataattttagagcttaagtaagtaatgaaggtataaataatgtaataataaacaagagatttttacgtggttcaggcgttaactatctttagtccacgagcccattttattaggctctttgaccggtgattgtttatacaaatacaaagacaatggacttttactcctttccactgtattcctcttgaagaagaggaagcttagtaggaatattttacagttaatagtagggttataaaaatgtgtttgatgaagaataagtcctcaacttcgagatgaagatctgaagagagagagagtctcaggatctgaatcccctcttcgtgccttgattggggtatttataggccaactccatcacatgggttgtcttggatggatctctacgaggatgaattaccaccttcagattagtaggtggcatatttcatgtgacttttatgaatgtcaaatcgtactggttgggcttcgaatgcgtgtcacctcagggccattcttatttgaatttccctcgcccctagtcgttggattatttagcccagtacacaaggtcgcgcatgctctgcatggcagcgtggcgtgggagacaacctctgacatcgtacatgatgaagcttggtctctaagttcatagcttgatacgtgtgggctaaacctctgcaggtcaaaggcgtatcctagactagtgcttactggtttgagaagatccatatccttcgtaggagaaagtagcatcatcttctggagtggaatgggacatcagctcacggacaattctcgcatggctagcactcggggaaacttcctttgtgacggcccttcccgcgagattagtgcctttattctcccggagcgcgaagcgaagcacctaggcagcctaatgattcttggtcttctttctttagttagtgtccacgtgtcatccttgtgaaaatgtagataacatgaagaattttgttgctttgaatgcaacccagtatcaaattgagtggttgatggatcaacaaaatgaagaaaattataatctaatttatgcttatttttatttgttcttttatgataaatttatgctagttttgtgttacttttaattgtattactttcatgattttatgttttaaatattgttaatttttttaaataataagacacgattttgtcccgttattgtacggtcacggattgcaatccgtgatgtacgataaccgtcggatgggtagttaatttgatccaaaggttggggttcatctaggggtatttagggttaaataaatggctaccggttacgttttttgaaatttaaatttattatatctggaaaagtgaaaagtgacatccatcaatcacatcatatcaaccgtcgtcctcctccactcttccatttccttcttcactttcattttgttttttatttttc

SEQ ID NO: 299826 - DNA, 1081 bp, Cannabis indica
gatcaagaaaatgcatactgacagtggtaggtacacagttacagttatatttatgatcaggaaggaaatgaaggtaacagttgttttaacgtgtaagaaataacgagagctacattacactatactgacaaagaaggtaccatcttcttctgaatacacaactcactaataatacagactctactattactaaataccctcttccccaggcaagatggcacttattttaccataccaaaaactggaaagtaaaaaaaaaaaaaaaaaaaaaacatgtacaaacaaatataaaattgaaaatgaaaaaatctaaggaacaaaaaaatgaaaagaaaagaagtcagcatagattttctgagcagatagtattcagctcaaattttgattaaattgtatctatctacctaacctacccttcttccattatttccttttcatattaccattttcaacttcgaacaccaagttcttaaactataaaatatggatcaaacaatgcattttctttcaggttagtttctttttttttttctttttttttttaatccagaagaaataaaagatccacataatatcctcaaaaagacaaaaacaggacaagaaagaaagaaagaagaaagaaaaaaataccttttacgaattgagctagattaccacaccggtaaaaaggataaaccagaagcttctcaccccttggtccagcataaaatcccagaagaggtaccaaatttggatgccttatactccccaaaaaccgaatcatttggtcaaaatcttcaccccttaatgtacaaacaggcctcagaaacctcaaaagcctaactgacttactgttttgaagaaaagccttgtacaaagtaccatagttggattttccaatcacttctcctggagcatcaagtatatcacccactgtcaagtcctgaccaccttgaaaagtcactaagtcttcctcttcttcttcttcttcatcctcttcctcatgagtcttatctccatttttatactctgttttctctatatcttcattctcatttctcctcgttcttttacagtagaagtagatgaaaagaacaaaaaa

SEQ ID NO: 299827 - DNA, 1461 bp, Cannabis indica
aaatgaaaaaaaaaaatgataaattataatcaaactcatacaaaatatcatatcaccaccctaaggtttctcctttacacatataagacacgcatttatatctattctatataaagtgggctatgtaacagaatgttaggtttaacacaatttattgatttctacgttaattttaacagaatatcccaattacttaacagtataaattttataatattattatatatatttaaaaataaaaattatcacatatataaaatatatatatttaaaccttaatttttttattttaaaaataaataatgatattttcgctatataatataaaatgtgctattgacattaagaaaagaaattcctcaattaaaagaatacatcgattgaaatttttaactcaaaaaccctaatttctttttttaccatagagagcatcgattgattgagcaattacttaaacccgaaaatctcttcttcttttttctacacaattgagatcttaaacccaatcaaatcctattttggattatttgatcaattactgaaacccaaaaatatcttctttcttttttttctacgattgatatcttaaacccaaaatttttattttgcaattctaaatcaaagtaatattatatattgtttaaattattaattgtaatttcaatttctttcctctgaaaattcattccttcttcaattccttaattgattttatcatctatgttttacatacacaaaaagcacgtaaagataaacaccatgataccaaaaaaatcaaaattgaatgtcttaatgattcaagaatatactaactgaatctcctgcttaaaagtttcaaaaacctcattacttagtacaagtatgtggtgcaccattgaacccttccacacacgtcgaaagattcactcgcataaggtatccataataatattatatactgtttaaattaataattgtaattccaatttcttttgtctaaaaatcctaattcccatcttcaacatgtgcaattagggttttcttttaatttttattttctgtaatgggttttgttataatggatttgcttgcaaaatattagtgatatgcgattggagatgaccaaatttcaaagattattacaaaatattaactatggcagtttctggtcatttattgtaccaaataattcattgctttcacaacttaaatttctagaaccatattacaattccaacaacaggtgtatctattgttcttattagatttagttgcttacattttcatttatgtttatttattcatttgtctttgtgggtttgagaaaatatagtatattttttttttcaaaaaaatagtatattttataaggacatctaaagcattcctttgatatacatcaaagtattagtttttgaaaacagaacaatatttgagatttttcagtatatatttatttatgtattattattattatttttt

SEQ ID NO: 299828 - DNA, 4194 bp, Cannabis indica
ctgaatcatctgagtttacttgttaaagagcaatgcccacatttattatacatcattgttatataagtgtgtgcaattatattaatctaatattcaatcacaatgacaccaaagagtactcgaggtcgagctgttacattttttaccgttaaaaaagactagtttgtagtgtaagacaagaccaaataccaaggtaacttagttggcatatgggccccacttaccgcttcgccaaatcattcaaaacggctagttttccatttatcaatcctataaatacatacatactcgaatcctcaaaatgcgaaacagcattgcagaccttcaaaatcaaagcatcaatctcaatcttcactctttattgataaatttttattttttagcatttgtcaatctcaatcttacatttttgtccttcataatcaaaatcaaatcaaacaattatggctgctgggttttcaagatcgtcttcatcttcatctctgattctactcttctctcttcttttcaccatatcagaagctaaagaaatattagttggaggcaattccgattcatggtcaattccaacttccaatcaaacccaactcaatcaatgggctggtaaaaaccgtttccgcataggagacactcttggtaatttcccaattctctatctctctctgattttttcctatttcgatctcgcgtttgattaattaataattacttttttatatgtattttttcagtgtggaactatgatggtgagaaggattcagtgctggaagtgagcaaggaggattacgaggcttgtaatactggaagagccattaaagagcacaaagatgggaacactaaggtgagtttggacagagcagggccattctacttcattagcggggccaaaggacattgtcagaagggacagaagctgatcgtggttgtgctgtcaccaaggcgaagcagattctttggtatttctccggctccttctccgggtgatatcgatggtcctgcagttgctccgaccagcgccgccacttccagcttcagaagaagtggtcttgttgttgtggcatttggagtgttagccttttctttattgttttgagctagctagtattaataatgttagtttttgtttcaatcattttattattatttatttgattcattgcatgctatctttggcatctaaaattctgtaatccaattaattaagattgttaaaagattacatgttattattcatttttgttgttgttaattaaaacaattaagagaattatatgcgcttagctactttgttatttaaagggcaaaacaaactaaatcaaaatttagagtataatcatactaagaacaaatgttaggaggcaaatcaactaattattctttgttcttatgagattgattctcttgtcaagtactctttacactttaattctattcttctaaatcaaatatgacctataaggttccaaaagaaaatcattacaccaattaccagcaatctaaaagaccacattgagacaaaactcaaaagcaaacatgaccccaaggctatacagaaacaatcaacaaatttaccacttaagctagacaattaaaatcagatacgaactaaaccaaaacaaacagataagtatcggttatcactggttctcctcctcattgaggaattgtggtggcattcctaaaccttgggcaagattgttcattctgtcctttgtggcctgtgagatgaaacgcaagcacaacacacctgttactagtatcaatcaagaagcaaagaagaggcccccaaaagcagaatactaatttttacctgaacgctcttctggtgggcatccttgtatgcttcagtaaccaaaagagagagtttctgccatattgaaacaacacatgtaaacgcaaaaatgcataatctcttcttaaacaaaaacagcaacagccttgattacacatgaatatatatttatatatatatatttatggctagaaaaagaggtcacgaagattatatatgacactaaataataaactccacctacttctggcccaagtgccatggcagcctcagttatctcaacgcgcactggttcctggttaccggtgattgttgcctagatgaaaaacaacaataataatcagataaggaaaatgtgctactatgcccagtgcccactaagattaaagaaaaaggcatcaattttaggttcctaaacttgattctattcctaaagaatgatcataagaccacctttaccctaaacaagtaaaccacacctttacaagctcatcttcacaataaccatcaaactctgccctgaaaaacattaaacgaaaagttgttaccatgacaaaatttaatattaccatcaatccgatagcaaaatcaaacaaaaggcaataaacatacacatcaagctctttctttacactcactgcctcaatttgtaccaccatttgggctttcttaacagtttcgaatagcttattcatactgccgagaatcgtctctatctgaaattaaatggcacacaaggaaattgagcgtaaagttgttgttaggaaaaaaccttcctcatgtatatgcagaatatggtatgatatcgcatgcaacattactatactttcctcctcatcacaacttggttaaagagcaattatgttagtttataactgaatgacaggttttgttttaatcgtagtgtccggctggctatatttagatattttcataactgctttcataaagaaaagtttagtgcaacaatccatagtgtagataattaataactaacatgatgagcaagaacgttaagtagctagaccttcgaagttctatcatcactgttctcattgtcatccttcttctcaccatgtaagccattaagacgaagagatcttgttctcttcccagtcgtagtagtagaccaagatagaaccaagggacgacctttacacaagtctaattcacctagatgccaaatataagatatttattaagcttgatttgcatcagaatacatgccatacgttttcaagaaaaaagaaatatctaatattgcactaagaacatgtatacgttaacaacaaacaaaacgaaagacgaagcgcacccaatcgaaaacaaattattccataaactcttgacatatatgtatatatatatatgtataatatacaaacacgtttagataaattatatcaagttgaacatatcgcacaagtaactgatcacacaatcgctttgacatttttgttaccaattcacaattactcattgaatacgtttactgactaaacttagcattatggcattatccatacatggggatattcatcgttgaaaacacattaacccttccaataacttgatgattatttaaagcttcccacgctatctttaatatatataaatatatgtatataaagaaacatgtactaaaccaaacacacgtacaatattcaagaaaattaacgagtgaattcaattttattccatcaagaaggtactggtttctaataagagtgattagaagaatgttcaagaaaggtcaatgagtacaataacaagaaatgaattacacagcgaacaagaaaacctgaatatacattaaattaaggcatgaagaacttacagaaagagaagcgtggtctggggtcactgagtcggtgacaaacagcaaggtgcgaggttaaagcagtagtgtaagccattagaggaaagagaatgaaaacagaagagaaggctgttcaaaaaagaaaaccgaagaaagaaaatatcagacaggggagtaagaaagaagaacaaacaacctatagaaatagaaaaaggcagagctccgatgatttggattttggaggcaattttcagttctattgggcctttgatcagatctctatcatttttttgggcttttcctgttgggctatattatggggttaaacaaagagaattttacaaaaatactgcttttggaccaaaactttacaattatactgggacacggcaaaaataacatttttactgccccagcccaatttcattacttttgtactgcccaagcccaacagcataacatttatactgtgtgtgtggggaaacaacctgcttcgtgtgtggggagacgccggagacggaaatcaccaagaaaaaaccattaaaaccggcaagaataaacaaaagcagtaaaatcgacgtca

SEQ ID NO: 299829 - DNA, 1799 bp, Cannabis indica
tatatatatatataaatagtatgctttaattttgtaatgtaagagggaggcggctaaagcagagtaccaatattttatgttgtttgagaaagtttaaaaaacttatttttggagaagaattcctgaagttgggtcagcttagttgtccttcacatttttttttaaaaaatttatacatactttaaattacataataaaatcatatatgcagctaattacatgtatatttatattatgtctctttgaataatgattaattattattagcagacacattttatatatatagtaaacaaagttccaagtcgctcccctaatttaaaggaatcacacacattggatagattgtcggaacatacaaaatttatttatggaaatctatctctgtatatgtataaaagattagtattaaaatttattaatatatatatatatataatactttaagaaaaagcctataaataaatcatcatgaaaaagaaacagaaaaaaaaatctgattaattaacttggatactaagggacttccatcaagatcatcatcaacaaaaacactaaagcatttctcatcagaaacaatttaaaagttacaaaaacaaacaaaatataattggatgagagaaaagttaaagaagagaagagagataggaactaattttacaaagatttgggatattatatatttagtctaacagagagaaaactagaaaagaaagaaggatatttatatatataatttccctgacctcaaatctgcagtttgtagtagtaatagacctaatccggtaaacgatgccgtttccctcaataaggctgccgaccagagtttgagtttccgttccaaccgtcagccggtagttgaggcatattattcataggtaggttgaagaaaggtagccccgccgccgatgatgggtccggaaaagggttattactcactccactagcactgccaccgccaccacttcctcctccgcctcctccgccgctggaggactgaggtacttgctgctgcatctgaagaggcacctcctcctcctccaacggcaatctctcataagccacgttagtgaaagaagaagctatcacaatcactggcccggcggcaattaaggctcccacaacattcccaccaaccacctgaccctgcccgccggccaagaatatggtaaggctggtcgcccccggcggcgcaggaggaggcaagaacgaccccgaaagggaaagtatctcgaacctgccatgtagagtaaccacagctccggctgctgctggctgccgaagagtgacgtttgtgactgttccgctcccacttagcacgcagatcccgcgctgcctcttccgggcatatgtggccactgagtcaaacacgtcgcagccgcttccgacctccaagatgtgggccctgagcgtgtttgcgctctcccgcgtgatgatcacgggaggtttgggcttgttcttggatccgggcggccggcctctagggcggcgggaccccatgtcgccgcctgagttttggtgatggcccgagatgagatcaaagcctccacctgagttgttgttgttgtcatcatcatcttcatcatgatctgcgttgaagtggccgtttctgttgatgtcatggtggtggttgtcggaatccggtgggaattggaggtgaagatcagggcgttgaagctgctgagcaaagcgagaagctgagcctaagtctaagccagccatattatactaagaattgttttgagataattggagatagagctaaagggaaacagaaaaacaaagaaaaataattacaa

SEQ ID NO: 299830 - DNA, 3167 bp, Cannabis indica
aagcgcaaagagacataccttgcttcgtcgagccttcctatctctttgatatttctccgcatttacatcatcaaacacagctgatgctctcttaaagaaggttgggtctgaatatctctttaagcaagatccaggtccaccagtatcaaatctgaaaattccaccatgtgtaaggaagtctacacttcaccacttttgataactttctttcaagtaaacaacaaagaacataattctagagggtacataaaataaaaggtataatttacttgtcaagcaagtgcacacgaggaggaccacgacattcttcgtatgaatccataataaaatggggcaagtcattgttaatgaaatggtgtctttcattgtgtacacggggatgccactctgaacctgtacagcaactttcattaaaaactttaactgtctggaagatcaacacagtacaatggaatcttctaaacacagtaatctttgataaatgagaaaaaagcagaaaaaaaaactctaattttctctttaaaatggggattaggaaactagaacacttgctatataaaagcgcatgaggaaaacaaattaaaagaaaaggacaaatacttaataataattgaaaactagtcaaactatctatgtcagcaccttcttgccatcaatagaagcaactcggtattttcaatacaaaatatgatacattttctttgacacaagattaactaggttacattacgcattagagcaacaaagtcaaaatgaagttgcaacagctcctaagccgacatgaacaatatcgaatggatactaaagatatgaaaaattacattaagttgtacatgcctagattagcatttccccacttttcatggaaaaaatatttaacttcaacatgtggcgcacaaacttacaatacttgtacatactatacattaagatttttatcttataacaataagtctttacaagaagcaagtgcacaaaattgtcgatccacaagcaaaagatatacaagcataaacttaatatagtttctatttctgataatatgcatgtgatatagagaaagacatcagagtatagcaaagatagaaaagacataccagctgtataagcaaaatgtatgtggctcgtttgtgccagcacaaccttttcaaggggaggaagagcagcttcaatgtgctgtacccgtaccattaatttatggcttctggaagctgtagccattacctgctcctgcaatccatgaaacacctctcctgcaaacctacaaattggatatacagcatactgcataaataacaatttccgtcttaactgtcatatctcaccaaacaaccaaagacaaacacctcgtcgtcaattagaaaaattaaagaaagcaaagccctatttcttacggtttcatagtaaatacatcgcacagaacctggattccaagagattatacatgtatacgtttatgttttcttagtaagacctgcttggtaagcggttaccatcatggtaggctatggctaagcttgcaaccactggttccaaacttccatggtcactggaaatagaaagtggcgaaatttgcagtaaaactatctaaactattaatcttaaggatgtttcgatttgaagtccaaaacttttaactgcaaatcgacgcgattagaacattcataccaagattcactttgacttcaaaatttccaaactccaatactaatcgaagagattcaacaaatttctcttggactccataaccaaataatcttaatcttgtccgagcaaacacccctttttcaaattttatactaaaattaggaaataaaaatacaaaataaacgcaaatttcattggcaattaaaattgaagagcagccaaaacttactcggcgagatcgcccaattgcctcaagatccccaccaaaccagcgacggcagcaccatcaagcacagctttagggtcctctttgttgactcgcgagtgaagctcagcgttccctagtccgaactcgttccgaacctgaaacctcaccagaggcatctttctatctcgaggatttaggtgatactacctctgtagaagtgaaggtcaaagggaaaaagaaatacgagcaaaataggaaggaaataaataaataatgaacgaatgaatgagaacaataaatggaaggaatgaataaagaaatagaagtgatgttggggtagagagataaaagcccttgttttgttagagaaaggaagagaagagtaggtggggagattggagcagcttaactgccgcgaaaagagtgtgtctgagagagacagagagagtttgagaggacattgccaactctgcaagccattcctctatggaaagaaatcattgttcgtatattagtacagtccttttttctatgattatttattttgcaagggagtatgatgaaactacataaatgacctcaaatcaaatcttggaatgtaattactcggagccttttagttcctgtgatttggtgtggtgtggttccgaggctggcagccgtgagtaatttctcttggactccattacttttgtgaattttgtctgtttttttaggggttacaatttgaaaattattttaatgaaaatatagatttcttttaaataaaattaaaaagaatcggttaaaaaaaatagaatggcagctgaattgtttttattcatttaaaaaagaataatttcctggatcgactatagaattatgtgatggaaaataatgaatgatatttcagccaaaaaaaatatatataataaattattaatatctatctatctataaaataacattacttttattactttttattaggttttttattagtcttaagtattgaggtagtatatatttggtttgttgtaatggcctttgtaatggaatgaaagtgatctttattatgtttggtttgttattttgggtatgtgatgctttttcaatgtaatgagaattacattacacggattagaggaagaagtgttcaaaataatttaatgtcagttatgttagttaggttggttagttattttaggtaaagttgattttgtcctaaccgacttatttctactaaaccatcttgttatggcttagatggtgaaatcaatatggtcgttggtgacggtattaatgacgacccattaacctacaaacaggcaat

SEQ ID NO: 299831 - DNA, 1892 bp, Cannabis indica
attgcattctgtcacacgcgaaagacccatcatgaataatggaggaatgctttaagcactacaaatgattgtctttccggcaaaatcttctcaactttcgttttatttgtattaatttggtaagtttaaattttaagagtaaaagtctaaattactgaaagtaaatttaaggttttattcagttaacagtagatattattatacacatattatgtttatattagtacaattaatattattatttaaaaattatttttaaaatttagtttaaatttaaataaaattataaaataaacataaaatatttttgaaaataaaaatattataaattttaaaataatttatatattttgaattaataatttgacacatgtataaatatttatatataaatcgtctatattaataattacctctaaaagttagatattaccttaaattacaaacaatttaataatttggtgaattttagcttcaagcttaaaaaaaaactcaatcatgtatatgtcaatattcttatacattttaacttaaattaccaaataacaatttaataacttggtcttcgtgatgctaatgcatacaattaagtttttggcttttaattataaactcaccttttagcacgtgccttggtcccaattgattgagattaacacgaagagttatgtcgtgtgagagtttgtacatattacctttttttttttgtgaagagcacgaagatcaacacaatgtcaaatgcccaaactccaatgtcgcattatgctttatttaagtttatctcatctttccaaacaaaagctacaccaataaaaggcctaaattcaaggacaaatgcttaattaattataaataatggacttccaaattttgaaatcgagcccttcacttggtaatgtatttcatacaaatgtggaaatttatgttgtacacttcataaagggttgttctattaaactagaaaagtttgtaatttaattctttttgtatgatcgtatacgttgtatctatttaaaattatttataaattttcagaaaattaaagtgccaaaaataagattcaaatgtatacaacaaaatatttaaaccttattttcagtattataaactattcagaatttttttaaaaatttacaagtagtcataaataactataatgtacacgatcgtaagaaaaaaaatattgactataaactacttctagatgccaaaataaatgggagatttaccgaaatacttttttaagcaaagacaaagctaggaaggactaggtgaggcaactgactcacatcaaattttgaacacttagagcatttttaaccacgctatctattttttagccatattttagctaaaatagctaaaaaaaagttaaaataaagagctttttttttataattatttttgctccaatcatgctttctattttaattagtttttttataattttaataattttttataatttaaatttgtcaaattttaaattaattcaataaaataataaaaaagtaataatgcttttgatttaaaatactattacaaaaatttagtaaaaaagttgagagctctctataactagagagctccttatccattctctatgatagggagctactttttctatggttgtagcttattttttgtaagctcactccctattttagctaaagagtgtgtttagagagtgttatcctaaattttttccacttgacggggcatgtctacgtggccattatcagcgccacgtggcagtacaactcacccacaaggaggttaagtcagcaccctagcgaacgggtggtcctagcactcaaacgggacaacgatctatagaccagcctgttgggttttgtgccctaaataaaaccctttacaatttgattagttat

SEQ ID NO: 299832 - DNA, 2871 bp, Cannabis indica
ttatctgggtgctgtctttcagttatgttttttttttaaaaaaaaaagaattttagggtattgcattgtaggtcattgatgcagcaaatgaggtagttgatagcattgacaaagatgagttgataaaattcttggcgcttaagattgatccagaagatgatgaagcagaggtatgcttgcttgtcaacagaaaatctttgcgatttatctagagcaaacattctaagttctttcccctagtttctagattggttgtacttaattgttgctgttgttacagaaactcaaaaagaaaatggagacgactcgtgatcagttagcagaagcactctatcagaaaggattggcattagcagctattgaatctttagaggttagaacgctcatgtttttcattacattcttgaaaactcaattgcaccagcagcaattgataggatcagtctgtttctagtaattttgacatatctttttgaagttaactgtacagcactaattgatgagtaatatatgatgatcgagtggtagtgtgttaacaatcatcatacatagcaattttcattctgttcaaggttgtatggttgaaattgacatgcacaggaaatattgcttgaaaataaaatagctggtaaaattttaagacagtttgaattaccaagtgaaggtactttattttctgagattgaattcgggtatatttctccttgactctcatatgtattggaagaatgattgttaagaatttgttcaaaactatgctaagagatttaatgttgtttttgtctgtgtttatcacatctttgttgctgtgataaatgcacgtttaccatacccttgtattcccttttagtcagggcagtattgttaaatttatttcgtattcattttatttaattttttttttaaaaaaacatgctaagaaatatggcttctagtttataactgcattttctgggtactactatttacaaattagatgggggttccaattttatatttctaatagttatatgtgtagttcagatacataagaagcatctgaattctctctacttcaatgcttacctatacagaggtatgctcaagccagatggttctggtccaatcatcatgtgtaaatgggttttctttatttgggactaaaatctacttgctagtacacttgatatcctttataaaaacaatttagggttaggggggatcctagtaaaaaaaaaaacaatttactggtaaatttagttaagtgaactagagcatggtcgcggcatatttaccaccattatttatcacaggctgagaagaacaaagaagctgatacaaaggatgcggacaagtcggctgatccttctgaaaaggactctgatacaaaagatgtggacaagtcggctgatccctctgaaaaggactcttgttcgggccatcctgacatgtttgaagagaactttaaagagctgaagaaatgggttgatgtgaagtcctctaaatatggaaccctcttagtaatacgtgagagacgttgcggaaggcttggaacagcgctaaaggtactttcactcttcgctcttgtgtacatagacacaccacagtctacaccacagcacatttaatctaagcataacaataatatggattctagatttattttttattttattttaatccaagcttctctctcactttctttctctcctttacccgcactgattgattatatgtggtcctatcaaacaatcattcttttatattggtctcctcacaatctttaggcatataacgagttcatgacctcagttttacatttatgttttgcttggtataatttgagaagatctccacaaatcatttcatcttttactgtcttaggctgcgactgatttgattcaagaggatggggaacctcccaagaagaagctttatgacttgaagatttctttgctggaggagatcgggtggaatcacttggtgaaatacgagaaagagtggttgaacgtgcgctttccaccaaatctgcctctgttttgaaggtttgcctcattttctttttgagtcacacaccattgaataagtggctcaggtgttaggctctatattccaagtgttgatttctactaggatagttgatttgctttacattgtcctaatttgtcaattacataaaagtggcctgatgctatgatgccaggatgctaatgacaagttcatgattccaaggaaaataaatattttcagtttctattggttgctagagaatcgagctcaacactaatctgtacactaagtctatgcttatgatttcatttgtttttgcactgaatgaaaagttgaaaacagaacaagctcaatgatttacaagaccctattaataaataaaagatgttaaataagggaagcaagttcaatctaagctttttgcttgaacattatttttagcttaagtttgatgtgttactttgttattgagtttaaaatgagaagaccatctctaagtattgagcgcgaaagtcaataaaacaatatatttggctcaacttttataattgtgttccaaaaccaataatgaatttgattaaaaaataaatatttaattaatgatgtttattatataataaaataagacaatgaattataattagcatgtaattggaagaagaaaaggttatacattgtactctttccaatctattaagtattaatacactcaaaatgactttaaagtgtttttataaacgccataaaactttcttagccgcaccattttgcatcacatattagtaagcccctaactataaactgtcaattgatttgttattttttttgagaaaaagcgtctatatcatagattcaaataaattagacctctcggtcgttaca

SEQ ID NO: 299833 - DNA, 1029 bp, Cannabis indica
agagtcccttgatgagtcttacctttctttccgaggtatatatttttcttattataatactttacttggactgtattgtactatgtatcatttgataacccaataaatcccctactctattttcagggcaaattgacttttaaatggcagaatttcaaggatatttagaactaaatagatcttaaacaaaaatatttgtaaatgtaattatttttcccataagtggagagttttattaccggtttgtcatggattccaagttgagcccaagttatcacttctagaagctcttcaagagttccatagccaccttcataaaaataaataaataaataaaataagatgcacattgtacagaaaagttcaatcatagtccaacaacctaactttatttcagaaaaatgggccattgcgacccaattctgatcgcttttgggctatgttcagtttatcttagcccaataactaaacaatatactgggcccaattctaatactttttggacctttttttggaggaaataaataaatgagtgaaacttaagacaatctttgtgtgcttttcaataatacaaacagacaagagatatataataaataaatttttattttattttttcttattaaacaaaaataaaggattgggagggtacagtgagaccacaaggctcagagaataaaataattaatgacagaaaagagaaaaataataataaccacagaagagggtgagccagggcagggcagggcaccccatgatcctaattgtcaatgtcagaaacttgagctatatgggcttttttttggcctcatatggggcccatttttcagaccacttaatcagaaaaaaaaacatgttctttcttgtcactcacaagttcaaattctaaatgtaaacttaatagttttatggaataattagggactattttttgtaaaatatttacattttttaattcaaagaatgtttttttttacatttttacagttttctaaaaaataacacgaaaacaacataaaatcaacaaga

SEQ ID NO: 299834 - DNA, 4743 bp, Cannabis indica
aattgtcatatattaagtttgatcctaagctaattttaaattagacatataatcaccacaaattctctatcataagaaaatttataaattcatatgtatgcagctctccccataattcttacaaattttctcctgggggcaactcttgaagctttggaggagtgccaagaactcgctccatgtcaaagcgaacttcaatgttacgcaggctgtacccaaccaccatcagccaatagagcaacttcgcaagttcaggcgcagtcgtctctgttaagctcgtctgcaaacacacagaattgagaacactaatactctgctaagagtgacgaagaacatgaagctctaatagaattagtaggagtgatattttgctaatactctcctactaaacattaaaataaattcatctcatttcatcaagtttacagcactgctttcataaattatttataacatgtctactagacgagagtccacgattggagcttaaacccatagtgaataagagagtgagagcctcaaaccttcatttgggcaggatctgaaacagccaataaccgcttgatgaatgtattcattgcaagcacaacatcttcaccagcactacttgtcaagtcctacaaaattatacacgaaattgctagtgtattaatgcctcctccaacacttacgactcaaacataataggaaacaacgaatgaagtatgcaaatcattatgatgctaaaaagttatatctacacttctaacaagttatcattgaaaatatcagaaataattttttctgtagatttcaaaattttaattttgttcttttgaatttcttaatggttagttttcctctcctaacacactgtcagctaatgtcatccatacaaggaacttaaaagtccaggaacatgcatattagttacaacaatacaacaataaagtatttcatttaagccttcttatttaccttcaaattttgtggctcaagagactttagatattccaacaactcattttgtccatttgaagatttcctgtctacttgtcgattcaattcctcaatctctgcttcaagtagctcgatatattttttagcatcaattcgctcagcaccagaaacgttattccaccgaataacttcaccagacacattcttctgcgtcccaggtgcataatctggtgcatcctgaacacccactgggtcatgttaatgcaccaactaaaaccaaatcagccaagaactaagctgatgggcataataaaggtgtaccaaaaggtatggatgtaagtaacatgacagcataaatcatggtagcaaattaataactagatttcatcagaagaaaaaaaagagtactgacaaaaataattatacatggaaatcatgggggaaaaaagatcactgttttgggtttggtagtactagtgtgtgtgggaggggagggtatcaaatacccattgtatcaaaaagaaaaagttagaatgtaatttaaaagaaaaaaagaaagaaaagaaaaagaaaaaaaaataacattaaacatatctgaaatttcacagtagcttaatgacaccttcttctcttggacatcaggaagtgcagcctgctccagactctgctgaagttccaaccgatattgtgcattcttaaacatatatccagtcatcatgacgctgtacattagctgagcaagattttcagcgacctggaatagaaaccatatgactaaaatgaagttgtgaacactttaaatcaaaagacactagtactacactcaaacggtatgcggttagctctagctcccatgaaatctaccttaaatagaaattggtataatttcccggtctccaaatattgtagagttcaaacgagtatactttaaatcatgccacataacaaatcacatctggcttaagaaaaaatttaccgtggagactgttactgcaaaaaactgcgggggcagtgttcctatcatgttggtcactgtttggcgcatggcatcaacaacctaaatgagttcccatgattcatgaaacaagtttcagactttcagtccagctaaaaattacatgaaatatgaatacccttaaaaactctagatatgaattaacaagtacccaatgcaatgcagcaacataggatatcaaagcatatgcaccactaaaataaatacctgttggggcgcccttttcacgaaaacctccatgaattctggttgaacattctttacgtactctaatagaagttctctcctactatttggctgtataatttcatccaagacaatgtgtaagcagagtcagggaaaatgataatacatattctttttctcataatcatcttgattcgtaacctttacttggattccattaataaaaataaaaaaatccaacttggcaaagtaaagctagcacatccatattaagaagacaaaaaagacagaaatttcataaataccagagctccatttgggggcttggaatcggcattaggattggaagaatcgtaagcttggatcttcaaagtcaatcttcttcctacatattttggcttaaccgggaaccaaatcgaagaatgtaagtgagagaaagaaaatgaagaagaggaagaaagtaaagattttggtggaaaagagggttttatagtcaaagagttcatctgagctagcttgcttgcttcactcactaatcgaattgaattgaattgaatcggcagacagccagaaaggaaaaagggatacaacctacaagggttccgtttcccaggaaatcatggatgacgatgatgaatgatgataataacacacagcttccacgtgtgccaccttaccaaaactctcaaaacccctactatgttaaactatctccaataagagttatcttttagagtgttcttgccacatatacaatatagttctatttttaagattaattttaaagaattgttaaacaatattattagtgtctagcaccctcttcagtatcatactactattagtatatttaagtatcggtcacatataacttaagaaaatagtttttaaataatatcactaatcaatcgtgaggcggcacttaatgtccaatatcaatactctttaattttatgttaatgattgctcaataatgacaatagccacatgatatattttttcttttttaatttttataattagaaaaagttatttttgacctaaaaagtcattaagtcaatgtgatatgtgatgtggaactatggtaggcaacttttagagttgtcaactatgacaaatcttgtgtggatgagagagaaaataaaaaataataatatttagcatgatgtgtgtattttgacaacttttagtgttgcctctattggaaatgctcttagaagtttgccaatttcatccatttttggctgttagatgacatgttgtattgtccatgtgtacttagtgtattgtcacataaacatagtgtatacatgacacaattttattagctcaagtaaataaatatttgaaaaaaaaattaaaataaaaaatattaaagataaatgataatattataaattaaaaaattcattaaaaaaactaatagccttcacctatgtaacctcgtgctccacaatacttccttcaattctatttgccttaatctaagcagcccctgctcggcctgctaatggtcgcctcaggccatcaacgatccaaatagaccatagaattaacatcccctggtcttgaaactcacaaccctgagactccttctctcgccaatatctctctcatttctctctctctctctctctcagtttttctcaacccgaaaatctcatcaacgttgttgaggaacttagaggtcccacacaaggtccatcatatctggtcgccatcacggagctccagttgtcatctaaccttccccatttttcaattcagttgctcctcctctgtccctctgcccagatccattgtcttcaaaagcttccatagttgtcggcaccgccattaaagttcctaaactctcaaatctcatacccacgagttcagatctcatcgatgatgagatcaaacatctcagatctatttattttctatttttttcgtatattaattttctcattttgatattttgtttggttttgttttggatttgatattgtttttgcattttatgtttttatttgtattttttaggttaaattggatctaataaatgtaatggtggtggtggtattacagtggtgtggttgaagtggtagtgagtagtggtgtttgcgtcgtggtgatggtggtttcggtggtgatgaattgattatcaaattattttttattaccagacacaattttgtgtggaagaccataacgacatacaatattctttatgacgaagtccatgaccattttggaagtcactgtattaggctcaacttccacccactcaatgaagtagtcaacaacaataatagcgaattcgactcctccttttctagttggaagtgatcttaccaaatcgattccccaaacagcaaaaggccataaactgctcatcaaggttatctctattagtggagctctagcaactttggaatatcgttggctttgttcacatttctagacatattcaatgcaatccttcttcatagttggccaaaagtatccttggcggatggtctttttggacaaactcggtacgaaagtatgatctctacaaaattcttcatgtatttcatgcataacagcgcttagatcagttttggtgggttttatgccct

SEQ ID NO: 299835 - DNA, 2936 bp, Cannabis indica
tttgacaaaaaattagtttaaggtgttatttgtaccattttaaaaaatacatgattcattttgtcatttaacaaaacagatgatccaattaataaattttacaaaatacaaggtccaaaataatatttaccctatccatatccataaaaatgtctagattaaaaaaatatttaatatccacatgatacaagtcataagcctttataaaataacagttatacactaatatggtatacacatattatatattacatacataacataatataattataagaaacaccattaaaaaaaaaataccaacatatgttttgagagacggaaggttaaaatagaaattgtaataatttgtaaatagcactcttgtagataaatcaaaagaataaaaggtaagaatagaatgataaaatgatgagtgtcttcttttttatagaaaacaagtcgaacaaaacgaagtacatatttatggttggcatggggcacagatacataacaaagtttggatggatatacaaacatggataagaaaacaccacatcccaattgtgtgttctaagttgcaccatacacctaaaagaattggatgtacctttaggaaaaaaatagaagcctacaagacaataagtgatcccttaatcaaataaaagcttattgaaaagatgtgaaaccacaattagtattattggttggtgagaagtgtgaacccttcctaatcattaccaagccctttattgcccaatagttgatatgttttactctcttaaaatttaattaacaacctaatgaccaccacccgttaaacttggatcttttttctgtattgtttaacgcaattaatgcactaatttagtaattactataagatatctccaattctactctctattttgtaagctaaaatgttaaaatagtcattaatattgatgttactcccataatgctccctaactattaaattattttaataatattttatcatttaaatttgtcaaaaaaataaattaattttacaaaatataaaaaagtaataatacacttaatttaaatactattaacttactatagaaaaccctgtatttattccctagagatgctctaatataaccaaacccttgaaaaataatcacagaaattaccaaaaataaataaataaaacgataaggactttttatagaaggtaacagtatagatgacttagattagtacaaatatcttcaaaagtagcttatttcaacgatttttttcaaagagagcatgtgaaatgacaataaataaactaaaaaactacgaataacaacgtggcccatgttatgcagatcacaacaaactttgaaaatatctttcgtcgatttttaaataacgtagataaaagggaaagaaataataataattctttaacttaataatgtcaattaaaaaagaagacaaaatagatgaccaatcgatcaaatttgcaacgatcaaaagacatatagaacacaagaaacaaacaataaatagtaacaatagtaagtagaccagattggaattaacatttaacagttataaactagttagcaaagtaagtatgccagcagctctacaaaagacagaatcacctagctagtcattagagtttttcaaaaaaaaaaaagaggtacgattacacagatgattctccccttttctataactataaaaattcaagagcccaaaattcagtgggccaaaagggggagacagcacaggagtatacttcttcaacaaaataaatattaagaaaaagaaccgatgattaacaattaacaatcaaaccaatcacatggtattgattcaatcttaagacagcctagaagactatgctatcatcttctccagccaattcctactcgtcatcatcatcctacacaccacaaaaccaaaaaaacagtatcacaaattataaaccccaagttatggaatgaaaaaaccatgacacaaattagatattaaaaaaatgaattcaattctaacaaacctctccactgccatcttcatccccttcatcttcatcattcacctcagacattgatttctcagaaccttcttcctcagcagcatcagcaccttcagcctgcaaacaaacaacaaacaatgttgaatacacaaataaacaatttctagaagggtatatatgaatatatcaaaatcagccaaaataacacaattttgatatcccacttacttgtttcttgttatatgctttcatgtttttctcatactcaatctttcttttctcagctttggcaacaaatggtgccttgtcctgaaaatagtttgcataacattaccatatatataaatatatatacttgaaaaggttttaccactaataaaaacaaaatacacttacagcctcagtcatcgacttccatttctcaccagcagctttaccaacctaatatattcaataaatacacaacgtcagatcataatgaagaataaatatagattcctaagagcaaagttaaaacgacgaatatagattcttacagcagagactgctttgttgttagggttttccttgttaaattgcttcctgaactcctcccttgaaccaataaaattaaaagtaaattaaactaatattaagaactgagaattacactaacaaaaagttatttttattatcataaccgaatacttacatgaaaacgaagaaagcactggaaggcctcttaggcttgttaggatccttagcagctttcttcgatgctttccgacctttagtagcagcaccagcggccttcttattcaccgcaagcctacaataaatacgacaatcaaatttaatcttcatagatctaaaatcccatatcagcatagaaagaaagccaaaacacaactcacttgggttcagctctcttggatgtagacttagctcctttcatagtgaaatctgcaaaaataagaacgat

SEQ ID NO: 299836 - DNA, 4560 bp, Cannabis indica
tttctttattttattttctaaagaaaaaagttgtttaggatagtagtagtaaaaaaaaaagagtaaaacataacaaaatacacttttttggtaactcattaagtcatatttcactaaatgttacatattgatacaagtttcaacttcgagtccttttgtcctttttccttttcctttctatttttttagatttgaggtgaacccattatagtatatttctcatatataaactacaaaattattggaggaagagagaggatcttgatgcaactaaataaatgaaaaaaagaaaaattaataacataatgatctacaaaaatatgcagagggtgaattaatagaagaagagcaccacctgaaatgaaaattttaaggcaaaggcaatggagatttccaatccgaaaatttgaccaaatccctatttgtaaaagttccattgtgaagccagaaggtttcagttgagtggtgaaactgccttacttttctttgaagttcccacaaaatcgcttccatggctgaacatggagacgagtcgggagcataaacccataagcacctcacttttctactgcggcttaacatattctcgatatcttcatctgcaccgaaaccatacacgaaataattacatttaagaaaagaaaaatgaaggaaaattgagctatgtgaatgtgttttgagtgtaaaatttgacctggaattgactctaggtactccaagagctccggccctattcggttcgatggccatttgattgatatttggctgtaatcaattacgttttgaaatggcaattctatttgatctgataatatcactgggacacattcctgaacatcataaacatgtcagtttcatcagcttggcaaatcctagtgagagagagtgtgagggagagagagactgaccacaaagaatgactcgtagaagcgaagagtccaggatgattccccacgtggagcgagacagaatttcgcattgcggaggtgctcgaaatattctgctcttcctaatttttctgggccactaaacttcaactctggagattccaactgttcataacatcaataagggtgttttgggacatctaaataatgaaaacatgtttctttgaaataaaatgttgcaatcaaatcattgaaacaaataattcccccaaaaaaaagatgggaaaacatggtaatcaattaaacagtaaatctgacaaatcggaaatatactgaattactaaataatagactaaacttgacaaacattactaaattaagaattcacgaaccgagcaattcaaagaatggaaatttgaagttgtaaatcggtgttcaagcactattcttttttcgttttgtttaaacaatttcagatattattcaagcaaaaagaaccaagagagtgagagtgcagatacaaaaagaaaggattactactaaatggaccttagttcacatttcacatagacaatgggtttcataaccaagaaaatttcatttaaactaagtcatagaagaatatgtaccttgtctggaaattgttttgagagctctatcaacttcaaacggccagcttttccttgtgcacgacctagataatttgcaaggtatttccgctttgaaagaggcaatggcttgacaacccttgccttatttgtagtcattgaatcatcaacattgccaggaatgattatatctttccaagtattaaaggcactagtatctttcttatcagttcgatccccctgcactatcacataatttgacaatctcatatgtcaaattatattcttgcagaaaaatggatatacaatttacatggctactaaacagagtacaataagtcagaaaccatggaagtactttctctcagaaaagatttaacaactgaataagtaatgtcatcatacaattaaactttaacttcacttgcttttagtttgatttgtaagtatattaaatacatgtgttagagatcgaatcaacatcaatcctactcagactaataaccgtctctcacatgcagtatattagcagagttaacaatgccttatagaggattttagtcaactgggtgaattattccatttatgttaaatgtaacacaaaatgtattctaatgataccgtacctcgggggtgagaattatggatcgattaatatatgtctcccatgacttaaataagtgtgctccagcaccactgcaaaaagggtttaaaaagaaaacataagtatccaattgaaatatttgaaaaatcatttatacataatatatataaaaaattggttcctggattgatttttgcagctaaaagtataggaatgagaatccaaatttgccttgattcataaaaagtgaataactacagtgctattggaagttttgaaattctcaactagccctttcaattttaacactcatttgatttaagaataatgcaaccaaaaattcccatttcccatcaaacttacaaacaagcacaagtatttctaaccatcttttgtttcatcccttggattactatcctttaacacctattttatcatgtgagacacaatttaagtatccaatctaatcataagaacaaacatggatttgcaacatgtaaacttaccaataaaatttactccataaaaatcctgattattagacataatttctatctcctagaggaaatatcaaatgaaaaacaaaaaaaaggaacacaattacacagtgaactaaaaaatttgtaccttggaaagacaaatatgtgatcgcggccaccagatagccgaaaataaggcagttgacttaagacctacaattaaataagataagatgagtttagcttgcccttctgctcgatagctagcaaacacaactacatacagcgacattgcaaagaaccaaagccggtcacaaagtttaaacaatatagaaattttaagcaacaaattgaaaaactgaccttcacataagtctcagtaatctctttatccttaagaccacccatcattcgaacacattttacataagctggcacaaagaacagatcagcttcctccttcttccttgtccgaaatctagattgcagaagtagcttatgtattttaacctaccaaaaaaataaaaaaatcaacaaattgttcccttcattgtcgaggattcatagccaaatataatccaaaaaaaagttactaattgttaagaatgtgaaagcgtggtttagaagtagtgaaaataggatatagtgaggtgcaattgtaagacgtacgacaatgagtgaagtaacccatgcatcctatgtatggtaataagttttcatacattatcaaagaactctctaacattcccgtgcggtggctcgatcacaaatcgcttttttttggctcactaatcaacatttctcaaatttcactgaaaaaaattctttctatttaacatttaattttgtatcttcaaaattctttttggttaagaaagtaagtgaaagtaggattgagtgaggcatatggtaacatgtacgaggttccaagattccgtttcaaaaccaattagcaatggagtagtatattcatcttatatatggtattaagtttctatctaacatcacctaaagatggtggctatgtatggctcaatcacaaatggtctttttggctcattgatcaacaattctagaatttctttctatttaagagtttcatttttgtatcagcaaaattcctttacctacaaaccatagaatcacatactctaacttaggatacctacagacctaaattttccataacatactaaaattcaccttcaaaattaatcaaagcaaagttttaatctctccattccttctgttctgttctgcgcattttcttagtaaccaaacaaacaacttccactaaaatcaaaacaaagaaaagatatattcaatcacacctgagttccccactggcctttcaagcaatccttagaagtgattcttccatcgcggccatacattaggtccttcaagccatcgacctcatcttcatcgtagacgtagattttgaggtcgaggttaggcccgtagccacggtgaggccacgagagatctccaccgtcggtgaaaagcggagtttcgccaggtgtacggatgagatcgggggagaaggtagttgaatcgtgagagcgtggacggcggaagaggctggtgaagaagaaggtggagaggactaggaggagagctccgatctggtgcgtgcgtgtgcattggaagtggttgtgggcacccaatggccgacctttgttgctcatgcttctcattcggagtctgagagagatgagttcagagctctctcagttacagtttctgattgtaaaatgaagaagacgaagatggaaactcataccactacgacgccgttttcattcaaaaataataagttaaaagggcattgttattggagacgtatagcctttcgaaaattatttcattaaacaactcgacacttagttagatcaataatgatattgacatgtagagatagaggtgtccataaatcatccaattcaatgacaattgaccgatccaattacaaccgaccacca

SEQ ID NO: 299837 - DNA, 3694 bp, Cannabis indica
aaaatatatatataaacatgtgtggattaaattggatcggttaattttacatgtcaatcaacattaaatctgtaatctaatctaatatgcacaagtgtggtaaaagcactttgtaaattagattggattgaatcgcgcgtattttatattttttaataaattattaggtgatcattacatgatatattaaattttgcattaagatttacaattatacaatataacaaaagagtaaaaatttatataaaaatatcataaaactactttttggattaatttttacagtaagagattttctttttatatcgatatatatgggaaaagatttatgatgaatttgtcacgtttcttcctctcagccaaccaataccataagtctaattttgaccattacttcagtactattgtaattatcttataaagcaagaaaaaaaaaaaaaaaacaaaacagtagtactagtccaccttaatatactgtacctattggtaaaattgtccaatttataataacagcttctttatttttttattaatattcttggccggttttgcatgtaataaataaccttgaaataattatatataacatatttctttttcaaattttcctgtcatcgtctcgtaaaatatatgtgcataattatatatacacgattgatgaagagcttttccaaccagtaagcatattattatatatatattatttcttctttttttgatatttatttttaaagagataaaaaatatggtgatagatgatcaaattgcttaatgatttgactagttatctattttagattgcatacatactaacttcacaacaaattaattaagaaagcttgagccacttatggctaaggagtgaaaacgatggattattttgactctggcaacgataattaatccaaacactaacaaccacatacaaataatatattcatcggtttaggcataacagttaaacggtttttttttttgttatatggagatggtgtacacatatatattgattgttgttatataataaatttatcatcaatttgttattttttaaatatttttttgtaaggaaattattaaaattaattgttttttaatatatattttatttataatttttaccacttaaaatttttatttacaaaaatacacataaaatttgtttgctcagaaaaataactaaaaagaataacttaaaaacaacgaaaatttaacctcacaaaaattataaatcaactataaataaactataaaataattaaaaaaataatctcatgaaaacggtaatacatgtaaaaaaaatgggccttatttccctctatttttcttgtgttgctattaatgtggtcttgcattggacatgtggctcactcttagtagacggctagtattgttgatcccaaggtagatattaccattacaattgtaatgatgaagaaatcatgaggtgtaagggagattctcttttctgttagtattgttttataattgtaattgagcatttggctcctctattgtttttggtcttttggccttgcctataaatagaatttactcaggctatcattaattgagttgagatctttcacaatcaatttacctttattttatcttggtattagagccagagcctcctcaccatgtcaatagactctcaaaatcctggaaataacaataatgctcaaccatcagcctctatagcaacatccactgtgttgggtgttagctcaagcatacctcagctccaaatatatttcgtaaactatttcaccaccctaaaccaacctttttccctcaaacttgataggcataactatagcctattggaaaaccatggtctcaactatagttagaggtcataggatgcatttctcaatggcactaacacttgtccacctgaatatgttgctgcaggaacagttatggaaagcatagacattgtagaatctcaaatcgtcaaaccaacttatgaaaactggatcatcaacgatcaattgttgatgggatggttgtatatctcaataactgagactatagcaatagaagttatgggagtagccactacaatagggttatggcaagtcattgaacaactttatggtgcacattccaagtcaaaaatggacgaaaccaaaaccttgattcaggttaccaaaaagggaaataatcctatgacagagtatctcagataaaagatgaactgggcagatcttcttgctttggctggagagccataccccgagtcgcaaattatcacaaatgttctctctggtcttgatgtaaactatctcaccatagtgcttcaattgaagctcgaccaaaaacttcctggcaagaactcctagagttgatgctcaactttgacagaaagatagagagactacaagtcttgtcttcaaatggcaaaaatatcaataccctgatggattcccaaactaaatttgcttagaagccacaaaatggaggataaggaagatgttctggtaactacccccaatcttatggtggacatggaggcagacactcaaacataggaggatgaaatcgtgctagaggaagaggaagattcaatggtagaactggagggtcaaaacccacttgccaagtctgtggtaagtatggacattctgcagtcgttttctacaatagattcgatgaacactacatgggttctaatcccaacaatggagcacacaacaagaacaacaatctttcaacctttgttgctactccagagatcttggagactgaagcttaatttgctgacagtggggctagcaatcacatcacctcagactcctcttctatgacacaaaaacaagagtatgggggcaaggagagagtcacttatggtaatggcactcaactctctatctctcatattggtaatggaactttgtacattgatttcggtcaacatttatagctcaaagaaatgttgcttgtccatgaaattgctaagaatttattaagtgtatcaaaacttactcatgataacaatgttcatagaatttttttcttattgttgtgttgtgaaggacaagctaacaaggaaagtacttcttcaagggatgcttaaggatggtctctaccaacttcaagttctaaattccaagccaacttctttgtgtccaagtgtgatcgagtccaataagcctaaggagcaactactttttggtgttgctattaagtccaactctagtgtaaatcagtctagaactgatcaattttctatttctaagagtgatgtttggcacaagagattaggtcatgttggaattattttaccaggatcttagatctactcacaagtatgttgattaacatcctaaatatgaacttctaaaacgattataaataaacacatataaagtatgagaaacctttacattgggtgcagcggaataatatgtctccttccactcagatctctaacccttgtatcctttctgttgcacagtattatcaagatctgagcccgaatgtccttctttgttgaaattggattcttcacaatctttcacactgtgattaaggaactacttgatgtgtgtggacactactctatcacttagggatctcgaaacaaagaagaagaagaaagagagagagagagagagagaggtggcggctcaggaattttctgtgaaaggaatgagatgcaattgtgtttgtttcctgaagccattacttt

SEQ ID NO: 299838 - DNA, 3969 bp, Cannabis indica
tcatcattagaaatcttttgcctcttattataatgaggcaatgctactctaaacaattcattatttaaaattaattactcacttggctttgagcaaataaagtctgttactctattttgcaaaataaataggcgtaccattcttggaataataattttattattaataaaactattgttgaattttcttaaagaaattatgttcttggtacattcaggaataaaaaaatacttaataacaagatttgttattaattaaatttcaaacagactctgccaacacccttggcagacacttgtggtccattcccaacacacatagtcacctttccatcagtcgtgcccttgaggaatcaagtatctgcatagaagaacatatatgattagttgctccagactcaacaatccataaggatttatcatcctccactaagttagtttcaaggacaaataaattgtttttacctttcttaagcatgcagagatactttttacaatttttttctagtgtcccattatgcaacaatagaaatacttgcctctcacctttttctcattggacttgagctggctttgtttttctgcaccatgggtgacttctccctttgggcttgccaccacttttgtccttacttttctatttccttttcttatcaaaaaaaagaaggagaactagattttcaacaatgtttattcaccttctttggacttatccttgttatagttctcaaacaaagccaactcgttcaacaatggagtcatgttgcactctagcttgttcatcacaaagtttctggtgaaagctttgaagcatggagatagcaactcatggatcatgttcacttgagtcctttcatcaatgatagccccatgtatctttgtctgatgcgttagctcaatcatgttcaatacaagagttctatcagggacaccattcttccttttacaattcatgtagctacgagtagcatcatgtcttgcttgattagactggtgccaaaacacggtctgtagagaactcattatttgagatgcattcttcatatcttcatgtgtcttaagcaaaacatcatccatgctaataagaatgaaaattttggccttgttgttgaattgaatcttagcataatatttgtcgcaaacatttttcagggcattggcagtgggctcctcaagatgtgccttagttaggaaacaattggggttctcgctgttgactcagaattttatcaactgacagcggagtcttatttattgctgataatcaccatgtgtaaataataaaagtgacaaagatatttttataggtccatcccccttgattaaacggtaatgatccactcctctttttgttatattgattgttgagataataccatgcagattataggcttgaaccttgtaatttctagctatgggtctcttcagtattatcgtagtgagaattgagtgttacagattcaaaatatgtgagactttataaagaaaatatactaagtatctaatgagtaaaggggcatgtgacacttagagttcaagtctcttttcatgtggtctaattccttttttacgtagggcttacaaaatagtcgaattcaaataggtaaataccccatttaaaataggaaaataactctttttatcttatatttaaattacaaaaaagataactaatacccctaaagaataacctgatattagtttaagcaagaatccttatcttcatgggcagttaaggttattccgtagctaaaaaatttagcttatggacccctccctctgtcaatcctctattcgcagctatctggacgtgctggccagccagccctatatttagggcctgatcggcacataggacttcatcgcccacccaggtatagtccaaccagggttccctggctggccattttctctttgattaatagccttagaacccttgataattgacataccatgcaaggtgactttgtcaaactattgattggtcgtactccataaggtttaagttttgtctatgtggacatgccacgtgaggtgggccaatattgggataacatttatccccccaagtccctgtgcgaacatctgtatggatagggacttttcaactctagccttgactataaaatctttaaccagacagctttgcctagtcagatataggactcttcagatgacttgcctttgtgacaaaaatgactttattgccaatcattatggggatttgggtaatggttgtacactttcccatttttgaacctttggtcttcttcgcctctacatggctaaatatgtggaaaaaataacaacccattaagttttgtagagaaaactcttcaaaacctatataaggttcaattttcattatttttgtccacttcctttatcccctctctctctctccttcatactttctgtaagaaaaagaaaagaaagaacttttcatttcctcctcaagcttgacgcctcaagcagccccattcctcgaggtttctaactttttttatgattcaatcgttccccaagcatctatagctgtcttcatctgtgcgtaagtctactttctcattattttcttcaatctgccattgatgactttaagctttttgaaattcttgattctcacattgtagtgtggtctttcttacattataatctccttaatatctttaggacgtataatttatgactttctaagaaaagagattggattttgaacaccatttggattcttaactctttcagtcatgaagaacacgaagaacattgtttgaattttagaaaaataaaatttttattcttttaagcttttgcctgcacatagggtatgttcatgaaaccctggctggtttgtgactttggacctgagaacttggtcagttcattgcttgacttggggccctggctggttcgtggcctccgacccaaaaaccttgtcagttctggctaatattttgtcttttgtaaaaactctacatggctttctgagcctcttaatttttttcacctgaatcttgcattttgtgaattaacgactttgtacattagggttgtctggctaatatcctttttcgatgtctttttatttcttttggttattcacctccctctactccctctacctttttacacaaatgaacctacacgacttttggggaggtgacaactagattgaggaacactttctaatcttcaccacgaagaccatcatccagtccagatagctagttattcttttgagggtttttcaattagttcctcgagtaatttcaaggtcagcagtggttccccgaaacctaagattcagcaccaccactattccacggaaataggccatgagttttatggttggttcatctgggatctaaactaggggtggcggcaattcctccccaggtcgtggacttatattatccaagacggtgtgcctgacacgtttccctctggacgggtaactctgacagttagagatctcctcccagctaaagctactgttaccgttgttagacattctgagccctatcctatcgtggctaggacaaaggaaatgtgtcatagggtacctcccaataaccctaatatttctgagttgatgaccaaaagaagtgttaggtccttttttgccaatttagttatcaaaacattatttaattaatgtgcatttaaattattttttgttacatcgattttgtgcctctagttactcttttcttctaaggaaagattccttctcagctgatctctttttgtttaggaaacttcttgtaagagaagcagtgcctttagatctctttctctccttcgagttttgttaccactatcttactcactaagattgagtacttagacttcctatgtgtgggcatggctgtaataccctagaattatgaaatggactagcaaaaccctagttagataattatgaataattatggaattatattattatatagtttaatatatgagaatt

SEQ ID NO: 299839 - DNA, 2901 bp, Cannabis indica
tttcacattgtttcatagagcaacgagaggatctgagctgaaaatatcgccgatatcttgaaaataatcatccatcgggtacgatttgttagacgataaaccaaaatcccaacaagtctcggtgaaaataccagagaaatcatcattacccaaaataccgtctcgtaaactcgtctcgtcgaaaaagtcgggtatcgagctatgaaaatcgaaaatatcgtctggaatgaaagaaccgtaacttgaatgctccgaaaactccgagaaattctccgatacacatgaatcttctcgcatttcgccgatatctcgcgattctttcgagggtggtgaagaagactcggcttcttcttcgatcgaaggagaaggacaacgaagaacagaggttggggaacagaggttgttgttgttggactcttcgccggagtaataaccggaactaacagccggcttaataatattctccgtaacaacatttttcggtacaggcggtactgtagagaagttagtgagcgcgtcgggtccacgcaactgaatagccgcgttgtcgtaaaccatggcagcttcttctgcggtgtcgtacgtacctaaccagagccgtacacgtctcagaggatctctgatctccgccgcccattttccccaaggtctttgtctcacaccgcgaaactttttcgccgccacagacgacgcgtttccgccttccatactccgttgattcaccgccggaaccctcgtcctcttgttcctggaatttctcgacgatctgctcttccaaacggcactggtttcatcagtagaacaagactcaatcgtaatctcattaacgaacttcttaactctctggcgacgattgttgttgttgttgaaatattcctcttcgtcgctggaagaatcggtggcgttaccgtctgtgactgaaacacgcactattctcggtcgcttgatgaccatttccggcgatgttttggtaatggatttttcttgagtagtgagcttagtgtggtttttgtgctcggtgaacttgattactgaacctcctcgattcatgtttgagaagcttctctctatttttttttgtttagattctcaaagctgtgttgttatggcatttgaaaacgaagtgagactgaaataatggtggaaaagcgaagaagagagattccttttgagatttgacacgagatgagaatattaaaaaaaaaataaagaagaagaagaagaaggaaagattaaaagctatgaaaaccagtggtttatggggttttggggtttattaaaggaagagaaatttcacggaaagtcacacccagaaaaagggaaagaaagagagagagagaagagtaagcgtgacgagagagaaaagagacccacacacactacacagagtacggaaaagcagagatatatatatatactatatataactgagcgtggatttggggagaagagagactgagagagttggagaccccaaaaaaggagagaaatggatgaaaatggaaaattttctgggaaaaaaagtttgaagagaaaaagaaaaagtgaaagaaagaaagatgggttcgttcgtgggggaatagctttaaccggaaaggtaagagcaaagcaaatgaaggaataaattgtcctcactcactctttcactagccactactacagtagtctctgatattttctctcagattcccgggaaaatttaagaaaggaaaaaagagaaagagaaagtaagatagataatacacagagaagaaaaagagcaaactgttgtggtctatagagaaactttgctactttataggatccaccaaacagagccgtaatcactaaaccctggtttaaatgttcccaattttaattaatattaattattttaactttttcttgtttttattattccaattttaattatttcctacaacattaaaaatatttattattattttaattaatattacatgactttcaccggttagtagtaacctgagtttttccggctccggttacttaccgcagatattttataacgagccgccgcataagctgggcaagttggagccttacacgtggcagaatctgagtaatgagttttttaatctaacggccagggagagagctttttttttttgctaagaaagaagccagggagagagcttactcagctaaagaatttgtatttcttggaatatgagattcgggtcacgtgagatacacacatgggggtacagactacagtctttcctttgactgaaaaattaaaaagaatttttttttatttaattattataatgcccattaaaacgggtgattagagtttttaacaaagagagggtattttggtcatttcagtaacgtgtactttgtagttttttgagagagtgtagcagtggccgtttccgttatactttttgagagagtgaatttacccttttaaccccttatcatttacagctaagtgtaacgtggcaggcaacctcgaaaatcgacaatattaataactactgtccttaaaccatgcacgctcttcttccttaatcttacctttttatatctttaattaatttatttttacctattttttagttttaccatttcgtaactttgtacggctaagaaagtaatccagtgtgctacagtacagcctagactctataactcagacacgtttcagcatttgattagctgtgtagatgaaaagtaaaacaaaaagtcttgtccggttatggttagtcaaaatttaaaacagtgattcgccaacaatcttttgggtaagcattaaaaaacataataacgcacctaataaaatttgtcaacttaactcgtctatatagaatattaagagcatgtttcgtattgttttctattttttgttttaaaaaattatttttaaaaatgagaaca

SEQ ID NO: 299840 - DNA, 2287 bp, Cannabis indica
atgtattttttgtaaataaaaaagttcaaagaataaaaataatttttttccgtgttaatgtatttttgtatttttttttaaatttttggtctatataaattttttaaaattaattactaccaagtccaatatttaaaataagagcataaaaactaaataaatgattcacaagtcacaagtttccaattccaaccaccaaacttcatgtatttactttagaatttaagttataataaaagactattcatctaattaattaaacaattgactttgtgctctgcttgtagattaagataattgttccatatataaagcaagggttaatgagaataaagaatagaaaaatatggagaggtagaaaataattatgttgttaataaacactataaaagtagtgtattgttatatttttagcatatttttataaaaataactttcaatagggctataagaaatttagtataggctaaatttaacataaaatacaacatgcttcaaatttttaccacacaataaatgtcaccgaatttatttaccgatttgttaccaattaataatttttattagctaaaagctttctaacattttcattttcatttaagaagtttatatacatagtttcaatcaaaatttaatgattatttcgacttcggaagttaaattgtaccttacaactataaaatttgtaccaaatatgataatgaataagttttcaagctaaatttgctataaaatttatattatccattaaagatggtctaaatatgaatcaacttagcttcggtgtcagaccatgggccaacaacttattaagtatcattttaaaaaaaatcaattatcaataagaatatttaattcattttgattacaaaaactaagaaagaaccttctatttataaatttataaagataacacaatttaattactaacatttaacagaatataaagaatgatattaacagaaaacaaaagaaaacagttaaagctaacaattaataactaaagactaaataaatctcaactaataccaatccaacccatttgagtaataaaatgagactaattaacaaacaacactaacaaaattaattattacatataacatcaaacttgatattcttcttgtagtattagctagtaatgcttttattttataagacatgtttacgatgaatcttgtttctagttctggttctgactctgatcttagttttaataactttgtcattgcaaatccttaattgtccattaagagcttgtgatttgaagaaacttcttccacaaaatttagagttgtacgatggtgatgacgatgacgatgataatggttctaaatcaacgtagttgttgctataattatgtttttcgatgtgaatccgaagacctagagcacattttagtagtttcccacaatatgggcaatatttgaaactacgtacttccatcatatagtattgttctttcttttcccttctttttcttctttgattatatagcttaattaattgaaaccctagctctcttattagctagttattataaggcttgttcgattatatgcttagtaattaaagtgagctatcttatatcatatatatagccatggattaatgaaataatgggccacgtgtaatgtcttttaaattttaataattagaaaaaaagtttaaattaaaaatcggaagaacaatcaatttattataaatctaaaaaaaatatattaataataattataaaaagatgtgattggctgtttttaaaaaagatatatgaacggctagtaagaaagatattaatgaattttgttttaatttttagtgacaaaacttacattagatattttgatttttttaaacaaaatttaaaaaataaaaaggtttatatggccaaattttttaaagaattttttcttaaaaaaaaaatattttctgttagatccgtttttcatgattttttaatctatatttctgattatcttctaaaaatacaaaaagttttcaaacaaatatttacaagatattatttatctttttgtgtgtgctcgtaagatattttttattttattttatttatttatttttgtaaaaaatgggtgtgatcataagatttaaagatatttataaacatcatttcaaatataccgatttaattacatgttatttatttaattaaaataatatattgatgtatcacctgtataattaagcagtgcaatattccaataaaaaaaaaaaagtcttaatatagttttattatattaaataataaataatattatatttagat

SEQ ID NO: 299841 - DNA, 2502 bp, Cannabis indica
tatattagtccactaaataaataattctaacaaatgagacatacactgaaaattgaaatgttatattatataaatatatattaacttagattattattttcttggtgatctggattttacttcactaattcgaccctctattacttgaagcgaaagcctagagtagagaagcatctttgaagtttgaatcctaattggaagagtgtcaattattttgaatttcttaaaaaaataattaaagtgatacttgatatatcactatttaataatacagaagtgtgaataaaaagaatatttcctattaatttcttagagacttatcttattataagtaaggtttttttttaaggttattataagcttattttaattttactgtaatgaaataatattaatttcttatcttttttgtcttcctttgaacaattataactgtcaacgacgcggagtcaataaaataataatataagtatttaaataacagtaaatgacaatttagtatcctatgttttgttaaaatagacatttggtaccctaagttatgaataataatcaatttataccttatattttcaaaaactactattttagtacctttttttatttgaaacggatactattttagtacctttgttatttgaaacggatactattttagtaccttaagtgcatttaaaattttaatatttttataaattatatatatattacttttcctaaattacatcaaattagtaaaaagaatactgatttttaaagaactctagttataaaaaattatataagaactctattttctatattctcatctttctgtttcattgattgccagtaaaagttcaaggaagggattcggtcaaggaaaaaacctctcctccttgctctgaaagtttagcattttggtttaactctttaataacctttcctgttgttctaatggtagaaaagggaagagagaatcaaaattttaaaacataaacatttttataaatgattagttttaaataatttattttataattataaatatttttgaaataactaaataaatataattggatatataataatttaaatatttaaaataggattattttgggaatattgaaatattaaatgcacttaaggtactaaaatggtactttttgaaaacataaggtaccaatggatcattattcataactgagggtaccaaatgtgtgtttggacaaaacacacgataccaaatgagcatttaccgttcaaacaatattaaagattacgaaaaattgtaaatgacactcaaaatttatagaggtttggctccttttaacaataacagcttactcccctattggtgtattgctttaatgaaagtatatcaagatcacaaggtctggcaagcttagtttttcaatgtctctcgaaaaaggttacaaatatttgtcgagtgttctctttgttctcagtgcataaaacccgaagtccctagatagtgaattggcctcactatctatagggaagaaggaatagataagtttccccaaaaaaaaaataagagacaaattaggaagggtttgaatgtaaatcccacacttttctccattcgttaaataaaatctcatgaaaatagggatactaattgacccattattgtggaatcagttaaagaatgtatttggacatatattcaacgaatgcctctggtcagccattcgacatcatctagtctggtcagtacaaactgatgtcatattccgaccaaagtgaacctccttgccacatgtcagcttgccaggtgcctcatcattagattaaattttgagataacatttgtctccaagtcctcgtgagaaattctagtcatacaaggactatctagaccttgcacgttgtacggccaggcgacacgcgtttgtacccacgtgcctgcataaatatgagattagcgttgcctgaaacaagtgaatccttccctatcctttcaaatctttgcattaatttctttttcttggaaaccacatcttggggatcgtgcattgacgattacacaacctctgtaatgattacctttttgctttttttttttgtgggggggggatggaatattttgaaatttaccccttggtaatcctataaatgggatcaaaaatatccatttgtaatttttagccacttaaaaatatccaaagcaagaggagagatattctttgagaaatttgccattttcaaccctgattggaccattctcagtgaaaaacttcaaccaaacaatcaagtagtgagtaagttacttttattttgaactattacaatttacttcatgttctctgtgaagcatgttgacactaaaaagtggccaacattagctcgttagattggcgagatggataatgagtttacgtaaataatttagagagaaacacaagatctatagtagttcactccccatgtcgcgttggtaatagagctacgtcgacttcaagtttttatttctcacgagaattacaagaaaattggcta

SEQ ID NO: 299842 - DNA, 1852 bp, Cannabis indica
tcttttttcttttacgcttttggtgttgattttttttttagatgaacattattgtcctcattattcaacttgtgtgataagaaggtagcataattgaccaaagtggtgggttgggttgtctctgtatattgacataaaatgatgggctataaataacttaagccattatataacactgggcaatggcccacttctctttcattatcaagtggggtcttttatcttatcataaactaatggttttctgattatgtaatttaaagcaggagagctgctgctcatacatcagcatacgataaaaaccctgatgagcatgcacaatcgaccgtggttccggatgatctgatcgagccgaagtcagacaagtattgggctccagacccccaaactggggtgtttggaccagctgccccggggcaaactgctcggccaagtggtggcacgcaggcctccacgcctgccagtggcgaggggtctgtgcttgagcagactgcttggtttcgccctacaagcattgaggatttggagaagcctgctgctcagtaaagtcaaggattagaattgatatatagttgtggttgtgtggttggtattgtgtcctattatatagtgtattgttatatgtgtggggaataagatccaattacaaaaaacaggattattttggtttcgtagttattaatggacagatcttttacccctaaatctcaaatcaaatcttggttatgtccttaaatttttgtaaattctcattgctgatatctccattacaatcatttacttaattccaacaacttgtgcacttcctactcatattcatcggtcattggcctctcatcatctacaacggagtgaaaattcgtgtcatctacttatcaaattatgacatatttttgtaagtcctagctcattttaagtagatcatcaacatcgagttagttttttgcaagtatatttgtacccataattcaactaaacatagtgaagtgagaaccaagatgaggttgggagagtgggctcaaatgcaccgggattatttcacaaatacaaaaaaaattataaaaatacagttatacagaattttaaattattttataatttttatgattttatttaaaaaaacatacgatgttttgatgtatttttatattatactttttttagtttttttattatttgaatattcttttttgttattgttttcctgttgtagttttcattgttttggtgtttttttataaaatactgtaaaaaatataaaaaaattaaacgtaaaaatgtaaaataaattataaaaagtgtattatatacttttttattgtattatataattatccctaatacaaatatacttttttagttgtaatgtaagtggacaagtttcctaatatgggcccatatattttctcttatgggtgcatttgagcccactcctaggcccatcttagagctcatttcctaatacgggcccaattatttcttttatggatgcatttgagcccactctcctaaacccttctagcataattacacaataataaattattaatcctaatctagaaaactaaaaggtgaccaaactatcaagagtaaatcttaacatgttacataatataaatctttcaaatcatatctcaatttcttttcatcagtttattttgaggttgttgtgtagtatagtaatgctaatgttactcttatgaagcattattacttgataattatagttatttaattaagaggtgactcactttacaaataattaatataaataattgcactaatactaatatatataatatagtgctagttgttataaaataatataatataatataaagtagatgagaag

SEQ ID NO: 299843 - DNA, 2611 bp, Cannabis indica
aaatcaaaatcaagttacagcttacaaaagattaggcatgtctcgctcaatagcaggacttgcacaagggggattaaccccaatccacatagcactaaccttgttcaacaaaacataattgactaaactataagcgaccccattcgcttccctaaacacaaaagaaatacccataacagaatcatgcaacaataaagatctaatacaatctagcaatccatccacatctctacatccatcctcctttttatagattaattggatagcatgtagacaatcggactctatactaaatcgcctatagctcctctgtattcccagtcgaagaccgacctcaatagccagcagttcagcgtgcaaaggcgacacttcctgctgcagaaacgtagcagcagcaaacaccacacgcccatcaccatctcggacaaccctccccgtacccgtacccctccttcccttcttcactcccctatccacattaatctttaaatcaccacccccaaaaggacaccaagcaacctctgcccgctgcgtctgacgcccttcagcccgaccttgcccttgaaaatcacacagaaacttcgcacaccactcgactgcatcagctggccgcggcaccttaccaccatgcttcgtgttattccttgtgaaccactgctgccaacataaaatcagaaacaattcatagtcctccttggaccaaaccttggccaaccgcatgaggaatgccataacatcatcctttccatcacgacgaagctgattgtgaaaactactcaatttccaaacccccttattagcccgacaaccccatatcgcatggaagaccgattcccgaacctgagtattacaccgttgacaaccatgatcaatatccatacctcgagacgcaagggcggcatttgttggtaaccaagagtgagccaatttccatacaaaatgtttcactttcggagggatcttcaatttccatagcaacttccaccactcccttacatgactatcatcagtctgccctacttctttctgcatatctaacgccattctatacccactccgaaccgaatattcgccattattactatagtgccacataatcttatcttccaaaccagacctcgcaacaggtaattgtaaaatcaaatccgcatcgtcctcattaaagatggccctaataaagttctcatcccactccccattctgtagtttcaaatcgattactcggagttgcgccgggatacttggcttatcatataccttaaaactgcgaggccgaggtagccaaggatcctccaatatccgtaccaaattcccatcaccaatcctccatctatacccattcagaataatcttcttcccccatatcaaactcctccaaacaaaagagtcgttggccccacacttggcatccaatacccctttatgaggaaaatagctcgctttaagaaccctgctgcacagtgaagtcggctgccgtatgcatcttcaaatttgcttggcaagcaaagcttgattaaacattccaagatcctggaagcccaatccgccttcctccttaggtttacacaaatatttccacttgcaccaatgcgtcttcttatccttctcagttgatccccaccaaaatcgagcagccatcttatgtatactattaatagtactcttgggaagccgaaaacaactcatcatataagttggaatagcttggatgatagctttaattagaacctccttccccgccattgaaaacatagacaacttccatccccgtagcttgttccacactcggttcttaataacctcaaacaattgcttcttattacgccccacaagagacgacaatccgagatatttcccatggttaattatcaaccaccttcatacccatatagattcccattgcattcttctcttcatcacccactcttttgccaaagcaaatttcagacttattaaagttcacctcctgactcgaagctctagcatattttcccagcaacactttaaaccggtgacaatcattcatagtaacatcaaagaacaccatactatcgtcagcaaaaaacaagtgcgacactgtcaatccctgcctaccaaaccgaactccagtcaacctccccgctgcctcctcattctgaatcaaactcgaaaaaacttcaacacaaattagaaataaatagggtgacagagagtcaccctgcctcagtcccctctgtgggagcacatttcctgtcacctccccattaattagaaacgagaagctaactgatgtaacacacctcattattttctctacccaatgtacatgataacccaacttaaccatcattgctttgagaaaaccccactctaccctatcatctgccttcgccatatcaagctttagcgaaagcttcttcccattctgaaatcgattcttccgcatacaaaaaattagtttaatgtactatttagtattattttaaaaaatataaaatttaatttatcatttaataaaataaaatgtttaatcaattatttttacaaaatacaaaatttaaaataatattaatatactttcacatccaaaacaagtaataaaaaaatagagaattgttaaaaaaatattatt

SEQ ID NO: 299844 - DNA, 2108 bp, Cannabis indica
taactcatatgttcttcgctgacgacagttacttgtttagtcaagccacacaaggggctgctgacagcatcaccaaccttcttcaactctttgaaaatgcttcaggacagaaggttaactactccaagtcatccatcttttttagtcctaatactgatgctactacccgtgcatacatctgttctgtacttcaaatgtcagaagctcttgaaggtagtttttatttacgccttccaaacattgttggtcgaaataaaaatgctgtccttgggttcataaaaaataaagtcatatctcgtatcaacagctgggatggcaaatttttgtcctgtgcaggaaaagaaatcctactcaagacagtaattcagtcactacctacttatgctatgagtgtattccttatcccgattggaacttgtaacgagattgagaaactaatggctagtttctggtggaaaacaaaatcaagtaatgggcgaggtattatatggatgtcatgggatcgtcttgcaattcccaaagaagaaggtggtatgggttttaggcatctccatgattttaatcttgctatgcttgccaaacaaggatggcggttactgtgtaagcctgaatctcttgccggccgtgtatacaaagcaaaatattttccaaattgtactgatttcctttcatctgaacttggaaataacccgagctttgtatggcgtagcatttggggtgcaaaggacctagttcagttgggggctgctcgtgttattggcgatggaaaagaaacaagcatattgggttttccttggctaccatcttagaacaacaggtatattacttctaatcatcctggcatcatcaatcaaaatgtccactctttatttcaaacaaatgcacactgttgggatgatgaggtagttaatgaccttttctttccagaggaggccgatttaatcttatccatgcctcttggccgcaacactagacctgatagttgggcatggacaacagaccatcaaggaaaatacactgtacagagtgcataccagctgctgcagaaacaaaaaccagttgttgtgcgaccgaataactctggtttttggagaaatttctggcatctgaagcttcctcccaaggtcctgaacttactgtagagagccattgcaaatacactcccgacttgtgttaatctagtcacaaaacatgtgccaatctcctctcaatgtccggtctgtaatgctgctgcagaaacaacaacacatgaacttctcacctgtgcttttgctcgatcctactgggcattttttggctggccgattgaaactgatctttctatttcctttggccattggtttgaactgctacagcacacagatgacaaggatttcatctgtcgagcagccactttctgttgggctctgtggaaagctcgcaacaaagttgtctggaataaacgcacttcaactgttaaagaagttttggctacatcttcaattactcttgatcactggagaaaagctcaagataaaagtgctcttttatcactatcatttggaaatagtgatgatggggctgagctttggacaccacctgcaattaacaatctcaagattaatgtagatgcggctctcttcccaaatgacaactcatatggctatggtcttgtggttagagacaacactggcaagttccttgaagccaagactagccatttttctggtagctatccggctgaagtaattgaagcattggggataaaagaagctcttagctggataaaagggaaaaattgggagaatgtggtacttgagtcagacagtcttttatctgtgcaagcaataagaagtaaccaaaagatgtcctctacttttggaattgttatagaagattgtcgtttattgttttcctctttaaataatgtaaaaatacgatttttcaaacgatcagcaaatcgagttgctcatgctattgcaaggcaatctcggtttattcctggtggttgcattttagagcaagatatctggcccaatttgagggatatcttgctttttgaatgcttttgatttaatgaagttgatatttcattcaaaaaaaaaaaacattctaatatgaattctaaa

SEQ ID NO: 299845 - DNA, 2690 bp, Cannabis indica
taaaatagtttcgttagcacctgaagtattataagataagatcctaatatagtttttattttatagtatttgaatgaaattaatttagtcgatttaaatatttagtatttaggctcgatcgaaatgggaactatagtattcatttttatgctaatgtcaatgaaaaacaagaaatagtttttcccaaaatacagacaaatggaagtttaactcctaaagctttcttgtgtcgaaatggtacttcctgttaccggacgcattgacttagcaagaggttttattgtaagttaacataccatacggtatcccaactcggaagtcgtggattttcgaaatgtcactcagatcatcagttgatgaagtgaacgtttccacaatttccttaacttcaggagattgttctgcagctgttgaaagatagtctttgccatcttcactaatttcttttacgatctcactcaaatcatcctttgctttatcagcttgtatcttcaactgttctgatgtttctttcagaataaccaacgctttcttagagtatacctcgtatgcttcctgagatacactctgaatctttaaagcttgttctttaaaggaagctaatgcctctctccaagcttcctgagattcgtcagctcccagttttatattatccttttcgttctccacttcaatttccgaatgcttctggaaatatttacaatattaatgtcacgaagcaaccttattcaaagacgaggaaattggaatgaatgaacgtgtacactaatgcaccataatgtgcttaatatcatcaaaatattaaaaaatgttttatttatttaaaatgccacaaacgaaatcaacgcctattccagaagaaaacacatttggttaatttaagacaagaaattttaaatacattgatcaattataataaacagaaagaaattcaatacacatatatgaaaatcaagatttgccctgacaaaagttcggtttcatcacagtgttcaacccttcagcatatacactatcatcaataacaagaagaaaactgtccattgttcaaaaaaaaacgacaataatttcaacatatacatggcaagcattaaaccataaaaccgccaattaaatttcacactcaaaaattaaatagcgataaaaacctcaaaattatcggcttacagaatcctcgtgcgaagcggcaaagacaaccagctgtcgagtcgaggaaccttttcgatgtagtgaaattgaagcagaggctagtcctctggttggtgcagcaaacagtcggcaactgtgagctcttccaagtggatcgaaacacaaagaagacggcgaggaacgcaaagccattggagccgctttcttcaaagagagccaagaaccggtgttacagctagggtttaatagcgaaagtgattccatcgtcgaactcattttcgctattgcctataatttcagttactgttcagggaaatataagagaaaaactagtaaaaaaaaacagttttttttatctagtttcaaattattcaatgaagcattgtctattttgcttctcctattaaaaaacaagacaaaaatttgaaacaactacaaactaatatcattctctccaataaacaaatacaacattgttccaacaagtaacttcgagcatttccgaccatgctctctaaacaaactccttagctaaagtagagagtgagccttgaagaaaatgagctcccaccatacaaataaatagctctaagaatggatagggagctccctactttttcaacgattttcaaaacaaacggattaaagttctgaagtaacatctacgaccaacatgtgcagctccattagcatctcaacattattaagtgaatctaatcaaatgtacttactacatttttattattttattaaactaattacaatttaacaaattcaaatcattaaaatattattaaaataatcatgagaggataataattggagtaacattatgaaaaatgactctccattttaatattttacctaaaaaaataaatacagaatcgcccttagagatgttcttaattgtatgactatttgtagttaaaataattccaattcaaattgcctagcttagctatagaatcacttcatcatcaacaccaagatatatataattatcctaaaattataaacacaaaataaaatatttgtaaaagcaatacaatagcatgcaaatgatattgattcacaaacgaaaatcagaaaaatttagaaagtttgggcagtgagtgaagtaagtatatatagtacctgaagtaattgtgttaacagccaatgattgaaacggaattcctactcttctccgatctccgatcagaacgaggttgatgatatttctagggtttacagagagaatcgaagaaaggacaaaaagagtgatagagtgagaaagattgagtaagggagagagcaaagaacaatgtgaccaagtaactgggcttgtgcttaggcttgggcttggtcttgggcttggcttctcatattgggctaataatagaggtctttctgatttaatttctgaggaaattatactctataccctttttatgttgtcctctttcatttttaccctcttttttaaagtttatcatttttgcctctttttttaaacattgtaccaattttgcccttgtaatttcaagatactctccatgtga

SEQ ID NO: 299846 - DNA, 1159 bp, Cannabis indica
tcttcgtcatcaataatagaagaatattctattattggacgagtaaacccctggtaaaaccaggagtttctcattatatccggaatagagattctcttttccggatcaacaacaaggagtttggatatcaaagtcttggattcctccgaaaaccattgggggaattcgtattgagctttgaaaacttttctatacattttcataacattttcatcttgaaatggaagataaccagctaacaatacgaacaagattatcccacaagaccaaatatcagccttagcaccatcatacccttttctcttcaagatctccggtgccacgtaagcaggtgtaccgcactgtgtgtggagcaacccatcatttctgagctgttccggcaaagcagagagaccgaaatcagaaacctttaaatcaccattttcatccaacaaaagattttctggtttcaaatctcgatgcgaaacaccacgactgtgacaaaaatcaactgcacttaccaattgttgaaagtattttctagcaatttcttcttttaatttacctttcaacactttggcgaataattctccacctttaacatattccataacacaataaactttaccttttgtggccattacttctttgagttcaacaatatttgggtgacgaactaatctcatcactgagatttctctcttgatttgatcaattgggccttcttttttcacctgatctttattaataaccttaatcgctacactttcacctgtaacaagattcttaccgtaatacactttagcaaatgttccttgcccaacttgccttcccatctcgtatttcccaaacaaaatgtttctgggaaaattggccttcttttgctcctctgattcatccattttttctcttttcaattacccagatgagaaaaagtgtagatctaacctgggtagtgattgaaatgatcggaatttgaataaccaaccatgatcaaaagtaggactttgagaaaaaaagaaacgttttttctgggtttgaaagagtaattagaacgagttagatggagctataaaaatggcgaatgaaatggaaaatagagtgaggtgtaattgtaaatggttagacaatttgttgttatgaaactattgggagacatttttggttttttttttttttt

SEQ ID NO: 299847 - DNA, 3421 bp, Cannabis indica
tatttgataaaatgtgtgtgttgtaattggtatatgaagtgtttgataaaatgtctgtgtgaataaattgtttatattaattgttcaatgttattagaaatataaggttgatttcaggaaaggtgttcatgaatcattagtaataatataagtaattaaggttttgttgttcttaataaacatcattaatatagctaaagctaatgtattaacactcatcactcaagagtttaatttaactttttttatagttattttgtttagaaattacatatcaaactcattgagttacttagcatgagattaggcttgaaatacctatagatatagaatcatatcatttcaatctattgcattatcatccctattaattggatgagataagagtcctttttcatttcattatattatattacattctcattctattaattgcaaatgcatttctatcatcatcacctctattagtttctctgcctttgtttcaatctttcttccatcgtatttatttatgtggctatttttgtcagcatgaaattactgcattagcaatgtctgtatcgatgtaggagagatctatagtcaacaaaagagtgcatgctgcgattcgggtattatacaattatgacttattttcttaaaatgatgaatcattctgcttaatttgcaaataaagattagaatctgtcaaaatatatgcctcttatccaatcacatcacagttgtaattgcttgcatttagaatctcagttgctatttcaaaatgatttttttgatatagttgtttaactagtttattaagaaatattttgtatttttaataaaagttagtagaagctaaaacctttagtattgagacagaaagaaagagatgttccggagccgattatcgtcatttttgttggtgaagggcaacagtaaggctctctacaaccacctcaccaaaacagcatcatcttcgtctagtgttgtgagggaggagacctccagatttttctccactggaattgtacggagaattctgcatgatttccgatcttcccctaaggttcttcttctatctttatctttttagaactaaaagattgtgctttgctaaatttttttgtatggaagctgggaaccaacttcaaacaatttgagatgaattgattagctttaactacattaaacgccctttcgagatctccatctgcaaaatgtcattccagtagtagacagtcatagattgggagatcagaaacagattatttcttgtgactgaaatggctggttcaatgccatcttcctttctcctttgttcctagttttttttttctttcttcaaatcttgacatcaaaaaaattggcttggctgttgcaacaacaaagagtttgaattccttaagttaatattttatctcttttttaatcagcttgttttaattgcaactttattaatatgttctgtcgatcaaagtttataatatatattatctcctagtagaattatttctatatttgtgctttccatattatatgtttcttatggctaccttgtattccatgaaaattttagtgtaatgaaagaacttgttctaacacagttttacttgatttcggaacacaattcatgtaattttaatacatgtgtaatgagtttatagtgcaattcattctcagtatgttccatcgttgagaaatgtttccacggtgcaatcccttaatgcgaaaagtaatgaaggattaaagctacttgtaaacggcggacctcatgctcagaaaatggtcgggatctggctttttggctccgctgcttgggtgtttagtatggtcgtacttggaggtgttacacgactaacaagatctggtctttcgatgactgattggaagtttagtggcggacttcctcctctatctgatgaggaatggttacatgaattcgataagtacaagcagtcccctgaatataagcggtcagtgtttgaggattttgatagtttggacaataattttgatgctatttactatcattttattactatttgatgcatttatggattgtggctcgtgcagggttaatcgaggaatgagtattgatgaattcaagtttatatactggatggaatatgcacatcgtatgtggggaagagctcttggtatcatgtttgctttacccttttcatattttcttcgtaaaggatacattactgtacgactcggacttaaactctctactcttttcgcccttggtgctgggcagggtctgattggctggtggatggttaaaagtggtttagaggttggaaacctgatattaagtttatttgcatatttgaatagtaaaaatgtttcggtttgtgctcattttaattacttctttattttttcaaataggaaccgccatctgaatatgctcagcctagagtaagcccatatcggcttgcagctcatcttacatcggcatttgctatatacagtggtctcctctggacaggtctctcggttgtaatgcccgaaccacctgcagaatcaatatcatgggttaaaggggctgcaaaagtaaagagacttgctcttcctgttagcttactcgtcggtattactgctgtctcgggagcatttgttgcaggaaatgatgctgtatgtacaaattaattagtaaatattgtgtttatttgctagttgcatatcgtgttaatgattttgttttgtgaacttttaggggcatgcttacaatacttttccgaagatgggtgatacatggatacctgtggatgttctagaaatgaagccacttattcgcaacttctttgagaatacctcaacggtgcaggtgattttcgggttaacatgactcaatccgtattctagatgattcttttaattgctcaattttcctatgagctcaaagtcttagttttcctgcatagaaatcgatcgtagaataatcctttttaactcatttgcagcttgaccatcgtattctggcaacagcaactttagtttcaatcggttcattatggtggttaacaaggaaagtggatcttcatcctgcagttcgatatttgatcggaagcactgttggcatggctggtcttcaggttcattcatatgtttccataacttaatttctttaaatatcaaaacttggttcttccccatgaacatgtagctagaaccgaacaatatttgatcgttcttgtaatcgtcgttgcaggttaccttagggatatctacccttttatcgtacgtgccagtctcccttggcagcgctcatcaagccggggctttgacactaatgtcactgatgatccttctcattcacacattgagaaagccatcgccatctctccttaaatctctgcctaaagttgctaagacaatctagctttctacacaaatttgtttcgatgaaatgatcggttacttactactacta

SEQ ID NO: 299848 - DNA, 1525 bp, Cannabis indica
taggctgacttgctagctcggtgtgccagcaagtgccgcacgttctacctacttgggggtgtccaaataggcggcccgtgacacctagtatcctcctacatgtcaatatcgctattggtataactaaagtatcgggtctcatataatttaatataatagcttttaataaggagtatcgctaattaatcgtaacgcaacatgtcgagaaaatgctaggcaccactggtgcctcatagcaatgctctttaataaacaagtacttaattccgattacatgtacacgtggcacttgcaatcaatgatgtatatattgcaataaatgtaaataatacaaaatctacccgaattattattggtgattattgcacaatttgatcttgatcgttaactttgacaatacattttttatacaactttgagagaaaagaatacagaacttcttcacaacaagaagaatagattataggaatactattatcacaaccatgggatgggattcacaggaatataaaacatcactaccaaaaaaggggtgatgaccatctttaaatacccttctgtaacttgtgtagtagaatctaaagaagccacatgtatagagagtagtttatattatccattaaaacgatacaatgtcatggcaattggcatatatacatgcttattaactacactattctaatcaccgacaaagattgtcgtgacgcgtaatcatgaatatgcacgagacatcgtcttctacatgccacgtgatttgtttgttttctcataatgttacttattaattattattatacattttagcccttagagcagagtactagaaaaattaaaattgaaaaatttccatacacatcatgacatgtttttgttgatatataaagaaaaaacatgatgtatagtgtatatatgtctaagcgtcacaaccatgttattccacagtggactttgtttgtacctttaataaataaattttaatatagtactaaaaaaactactaaactccatcatcgtacggaaatgaagtggagtcaagccaagcgtccccagtaataaactcagttacggtaaagttatacgcatcgtcgtaatccatgacgtggtaaccggcccaatcgacccgattatccgtacccgaacccggcccataattgttgtactcaccatagtacaacgtgtccaaggcttggtcatcttttgcagaagaccactccttccacccagctgggtctatgaagtcgtctatgtacgactctaaaattactgtcgttgagtaattccgccatggccgacccaggtagctcttcacgctgcccgagttcgagtacagttcttccgaggctaatatcgaacagttctgcatcgatattccggtgttctcatcttcactgtcgcgtgcctgagctgtgatcacagtgaattgacctgccatcggcatcttcgaaacgacgtcgcacccctggaaaacgacggccgcgttgccgaagatgaagtccacggttccgtaaatgtcgcattctctgta

SEQ ID NO: 299849 - DNA, 2947 bp, Cannabis indica
aagaaaaagaaaaaaaaaaagatgtagattctttttatttatttagagggaaatatatgataatatgaattgaagggagaaaccataacaaattgatggaaagtgcatatttttcatattccaaaatgaattatttatcagagtattaaacaatgaatagccaaggctagtatgagtctcacattcacataatatatcttcaaattccagccatcttagccacctaaccagccaaccaatcaaaaaatatatattcagcccacccaaaaaggcttcccttttacaatcacacaagttcatccgcaaataatgcccataaccaaacaaaattgttgacctttttcttctttgtttccttctctcttcttcaatctcctctctaaacccaacaccatggcctcttcctccttatccctcctctcacctccttccatatcctccacccaactccacaatgcctcatcctcctctgccaccattgccaccaccgcccgccttgtgctgcgcacacctaagcccctccacctacgcaccacctcttaccgaccctttgtcgttcgggctcagtcagcccctactctcacccaagacgaccttaaaaagctcgccgcagacaaagccgtcgagtatgtcaagagcggaatggttctcggactcggtactgggtccaccgctgccttcgtcgtcgctaagctcggtgagttgctcaagtccggtgagttgactaacattgttggagttccaacctcaaaacgcacggaggagcaagctcgcgaattgggtattcccctttcggtgcttgatgatcatcccagcattgatttggccattgacggcgcagatgaggttgacccagatctcaatttggttaaaggacgaggtggggctcttctgagggagaagatggtggaagctgcttcggccaagttcgtggttgtggctgatgagaccaaattggttagtgggcttggtgggagtggtctggctatgccggttgaggttgtacagttctgttggaagtacaatctggtgaggcttcaagagcttttcaaggaggaaggtgtggaagccaagttaagagtggaaggtggaggaaagccttatgtgactgataattccaactatatagttgacttgtatttcaagacccccattaaagatgctttggctgctgggaaggagatttcagctttggaaggggttgtggagcatgggctgttcttggatatggctactgcagtcataattgctggcacaactggagtcgatgttaagaccaagtgatttttctttctttttcttcctttctgctgctcttttttggctttatttcttgcttgttgttctatgatcattggttagttttcgagttcatttgggtgtagctcggagatggggtgatttgggtacttcttgcaagttctgtactttaacgcttttatagattgtttgggcattggggaaaggatatgaataatagtgatgtaagtggaaattgtgaagtaataaacattaagcttaagctctgcttatctgattttggcattgatacaaaccgctgatgggaaaatctgttctttttctctagaattagttcttgatgtatacaagttttccgcttgagcatacaatttggaaactagaaattagaatgatatcaaattattgactgaatgaaatatgaggtttccaatgagagatgtgttaaagatcaattcacattgagcatgctattttaaatgacaattaacaactaatcatccgagcattaacataataataatagacatacctctaatcttgatattgatattgatctccaatggtcatgttgattacacttctttaatctacacatatggagaaaaaaaaaaaaaacttggttgtgatgaaccctactcttcctctccatcatagcccacacacattccaccttaaaaatgctaataaagagcacaaccctctttagaagaaattatgagccaattgggtctacatgccaaatatgagagaattagctgtattggctcaatgaactgaccaaaaatgttttggagcgtgactataggtcccgagcgtgttagtacattatgtctattctattacggctcgatggtaatgttatgtatatcgattatatagtcattattatatgttaataccgacactgagtgagcaacactttaattatgttagtttacataaaatattctaacattcttacataattacacatgtatgtgctctcactatgtaatagtgtcaacaaacagaaatctcaagaaatattaatgcttataaaattaattatgcatcatattatatcgacatgatataaatataatacataatgagacatctgatattcatgaaatatgatggtaactactgatctggatcaactcgatcataacaccaagactaagccactggcttgcatcaacaagtgtgcacacacaatactaaagagttatccagaatatgcatgaattcaacaaccaatagcaattattaacatgtctatcatacatgaaacaataactctcactgaccaaatacacatttggcttccaacaatccaaacaaaaatgactttcacattaaggtaagccgtgtcagtgtaatcgttggcatgttgtttgtaagtacttgttatgatactaatggatgaccccatgactttctcactatatgtggaatgtcatcatcattaatagagcaataatagtcctcaagttttgagagaaagatatgactatgatatttatcatataggtaataacagaatcaattactcttaacattaaaatgaaatattacaattataatgtacaatcaatgtcctcataacacgctacatactctatctttacaaatgaggatgttgtaaatgtccatacaatacctaatcacatataacttgttggaatttattttaccaggatct

SEQ ID NO: 299850 - DNA, 3943 bp, Cannabis indica
tttgatttggctgacatgatttggtggatgcgctgcatggatgtttcagttatatgtgcttatagcttaagaaataaaatattattaatctatgatattctgatgtttatttttacctggatcaacaatttgtgagtcttgttgatacgcagtctatggcattttcatgtacttgtctgggtggttactctttgttgatggctttgcagaccttgcttatgtgatattatattatttgttggctcactcttatgtaatgtatagatgggtggtgatatacaccatagccatctcattattatattttcgaagcattagttgcattagccattggctgaatgattgattttgatttttttaaacaagattttctgttactttgggtggacgaggactgaagcttgattttatcatcttgcagaaagatatatacttaatctgcactaacgcaatgcagtataatgctccagacaccgtatattttcgacaggtatagtcaaattttaaattttatgattccattgcctcaactccatatgtttcatcgacttttattattttttttgcaggcacgttctatacatgagttggcgaaaaagaattttgaaaatttgaggcaagacagtgatgataataacgaaccagtagtacctaaagtagtaagaagagggagaccaccaaccaaaaatttgaaaaaacaaggttcggagtatacttcagatggtacgcttgctaccactgctggaggggaaaatgccactttgtcaaatcatgaaatgaggaaaggtcctcatctccaagacaagtctggtttggcagatatatctggaagagttcatggttcacgcaataatgacgtctatagtagctttttagctgataaacttgagaagaacgatgagtttacaggtttgaaactcgtattttagcaatttaaattgtccagagttattgcatttatattccagaaaactgatggatactcattttcatctaattgtaaattttatagggtctgcgatgaggggtaactttaagaatgggaaaaaacattttgtgcttgacgataacaggcgtaacacgtacttgcaaccacatccttctgctggtggtcgtgagccgtctgtgttgacaacttttgatggagaaaaaaaaacagcttatgcctgtaagtgtctatgccaattacataagatggttttcttgaagaggaaaactgaatctcataatctcagttctttagaaccattacatcaaatgccatagtatttgctactgcattttcttttgggtgcttccttctgtcgattcgttgacttggtttctgtaattatcaggttgggcttcttgtcgagcatggttatgcaaggagcctggctcgatttgctgcaaaccttggacctgttgcttggaaaattgcttccaagaagattgaaatgactttaccagctggtgctaagtttggccctggttgggttgtagaggatgacatcctgccacaaaggtcacttcttttaccaggacagccatcggtatcccagccctctattgttgtggcaaattcatcatctgctgctacaagctgcacccttgattcaaatgttaatagattgtcagagaagcccgaaggggataacttgtcagagaggcaaatgccttcaaccactacctcaacgtcagacagccatccaagcaaatctctccccgtgtcagccgccacatcctctgcatccatatttgctaggtctcatgaacctgtcacagcaaaggcagaaactgcagaaggattgaaacccaatgttgggtttaacacacagaacaatagtattggtgggatcaggccaagacctccatttccaattcatcaaggccctacgattcaccctggtatgaatggatataacggctttaatcttgccgctcagatgggaaaactaatgggaccacactccggaccaccaggttttaacatccaatcgtctcaaatgatcgatacaagctctagaaatactaataaagctaatcccgcaactgggagcagcttaactaccgaagaaactaataaattgtcagaaaatcgaactacaataaattctagcaatccactgccaaaccctgggagtgaggcaacaacaccgtcgatgtcagggtttcatccaaggccatcttggcaaggtttctcgccacagctaagacctgattctggattgtcaacgcaacagaagtcagattcagttccaccagatcttaatgtcagatttcagtcaccagggtctcctagttctagcagagttgattcaacacaaccagatttagcattgcagctttgagaataattgagggtttttttttatatttcttttttcctttttctttttcttgtttgtcattctctttaatttagttaaccatagaccggtgggttcatgatttgttgctccaagtgacttgaggccaatagaaaatggtctgtgtcagaagccgagttgaaccacacctaacattattgtattagattaggttgatcatgtacagattaatgtattctaattttaggtccacaagtaaagaagttctcatttgtaccattataaactatgatcataagaatttgttgactaatgagctaagataagatgtttttttaagttagaaattctattttgtttactttaaaagaaatataattttgattttttattaaggtatttcttcttatgccattcctttggagctaaatatggtggcaaaaagaaaaagaaaatgttaattctaagtattctctcataaaacatatatttttaaaaatattctttttatataatattatgacttaaagtttttattttaaaaatatacttttaaagttttaaaattataaaaatacactttacttagcaaaaagtaagaaaataactaaaaaacaactaaaaaccaacctcaccaaaactataaataaactataaaataattagaaaaataactttaagagacagaaagagaggttggggtacctaggttttaggggttggggaggtgggaaatggccttcgtttaggcggtggatgatcgaagttggtccctccggctctggtaggagcagggagccgcaaggttaaggaagagagagaatgaaagtgtgatgaaattagggctttaaacgactgtggtggtggtcgttttgggagcaggtggccgagacctggtcgtggctgcaggcgtggagcatagggacgagagagatggtatcgagagagagtgagaagggaagagagagggttttccaattaggattttcaaatattctatttatttttttttaattctatttttttattattatttaaaaaaaaagtaccttcaagtctcggtttataagcgataccaaaagatcttttagtgtcaattataaaccgacacttatacttaatctgtatgcatatttttttttaacttttttggttttagttatagttttagtgtcggtctattaactaatacttaaagtcattataggtgtaaattataaaccgagactaaaaaattaggatagactttagtgtcgatttttaaaaacaaaacgtcactcaaaccgacacgaaaatctattttatattagtgacctaccattacttatattacttatattattacttatcataataatgattctattattattactatagcttcattttcttcttttgtttcccgagctagattttaattttaagtacccagtacaaaaaatttactttagtcacaacaaaaattgtgactaaagtaaaaaagttgtgactaattataaattattatttctatgttgtaactaaagtgtccgtggttaaaagtattagttacaaaaattacaatttgttgtgattaaaattaaattagtgacaacttgcagttaaatactatgttttagtcacaagtaaatttt

SEQ ID NO: 299851 - DNA, 3453 bp, Cannabis indica
ttgaagtaatgatcacgaaaatgtgaaatatgagcaaacggcttgttctttgcttttcctgaaagattttattttttgtgtgttttttaatgccagataagtttggagcagctatgacccttgttaagtctgatattggtggtaacataacggtatgcccttgtcatgtatattcctcttagagtcttatcctattaaaaaaatatatatgaaatttaaattatctttctttttcttgttaaatcctctgcaaattttaaactcctttgggtatctgttgaacattttcagtcattggggtttaaagattattgatttttctttcctcattggttctggttgtagagattggaatctaaatatctttccagtcaagaacaattcaacctcttgtacagcatggtacagattgaggttgaagctaaaacagcaaaaggatcatccagttgtaccaatggtcttctttggttgacaaggtattatcaacaatttcgtgcttccatttcttctgtaagattaactgattgttgttatttgtcatatgtgtttaattttataatttacttaaaaaatgatctctttttaagttgaagttataatcagtttcttccctcactgtgcccgaataaaatgcttaattgtctgaatcaatgagatgtgaagaactgctgaaggggcgtgtctaactacctcataaaagtgcacaagagattgaaatatcctagaaatatgtatctttttgctatctgcacgaccttgtcagtcgacaatttcactgggaaattgggttataaaccagcaaccagctttctgaacaaggagttaagcctggagattgatagaagaacctggccgaagccagagttgtgctcagctttcttcaatcgacttggtggaaagttcaaaatggttttagggatgagggtcaaatccattccctaaacaattatgattgattcttatcccatatggatgtagtatctattatcatgtacttgtgcagaatctaacttcttcagttggacctttcatttgcttcaagtttaaataagttttctttgttgcctttactgaagtgcattgtttctacctcttcgtttgctgatcatatgttttgagtgttttgcataattcttggcacacgagaacatcaaatacagtgatttgactcaaaagaaagagcctcaggctttctgttttaatataaaaatgataaattttcagggcaatggatttcttggtggcattgttccgcaacttacttgatcatccagattggtccatgtcacaggcttgtacagattcctatagcaagactctgaagaaatttcacggatggcttgctagttcaagtttcactgtaatgttctccactgctgattattatattaaattttagtagaatttaattgattcacaatcatgtttaggaatccttttttgtcaaggtctattactagtatgattatgatttccgctgtatctattgtcaacctttgtctagcctttcctttaatgctactgggccagaccaagtcagttttctgcatttggttactcctttgccttagcacctttagtgtcattgtttttttgtaaattcattcaaaaagagatctattgaaataacattattctaaaatttcaggaaaatactatcctctatctatttcttttcttttctttctctaataagttcttttcttggttgaattaaatttccaaacaaagcataactctgtaggcatgtaaaaatgtaaaacttcttctgtcatgtgtatattgtatgttctaaagataaaataacttagtgctaagagaaagtgtgttcaatagcgatactgacatgagcagttgtgtgattcaatttggtatattttcttgtcttctgatgagtaattggacattgagattgcaggtggccatgaagcttgctcctgatagaaagaagtttatggatgtgattggaggttctggtgatgccatggcagacatagagaaattctgcacaacattttcccctcttcttgaagagaatcacaagtttttggtattagttcttttataattgttctattttaaggtcaatgaagattgtgtcattgtcttcatgatttatttatgaatgagaaaggtggatcaagtgagcaatgtgaaaacagtttgctctctcaaatgccttaggaggcgctgtatcaaaattctatttgagacttccattagatacgtagtcaaaagtaccatcttaggacagtgataaagttatttttaaaaaaaaaaaataaaaaataaaaaaaaaatctgatataaactactgttctattgtttttttgtgtcaaaacacaggctagtgtgggcatggatgaactgaaggcatcatgattcatgaagaaaacagacagaagcatcgtacctatttatctttgttgccaattgttgcgatcttatcctccgtcgtcacatttaaatactaataattaatcagtgacatatgttgtagtaagtttctctttttttcttttaagttaacgctttatttgaaactcatacatatatcaatggttatgaaagagaattttattacaatggtcttgggcgtgtggcactataagagtgctggggtcattttacttttctaagagatttctactctgcaaaatctcaatctctaaaaaatttgccaagtcttttttatgtcttccatcattctcgcctctctaaggggttgtttaatttcataactttaaaattgttttcagttctaaaaaataaaaaatagtttttaaaaactaatagggatcgtttggccaaagtttgtaaaaatagttttttaaaaactgactagaaaacagaaaacatcaaaatattgtttttaattttcaaaataattttttttgtctaatatattatattttatatttttgttcacatacacggtacttagacccagaatcagactcggatcccaccttggaccccgaaccctgactcagactccgacccggacctaaatctcggactccgaccctagcccggacaccagaccccgacctcggacccgaaacctgggcctggaccccgactcatatcccacccggacctgggcttgagacccccgacttggaccttcgaccccgacccaaatctcggaccccaaatcggatctcgaccccgacctagagtcgaaccccaaaagtcgacccagacctcggaccctacccaaacttggaccccgggcccatattcgaaccacgaccccggaccacgacctggaccccggacccgagacccccaacccgaactcggactcagatcctagacccgaatcccacccggacttgagacccctaacctggacctggacccgaatcccagaccccgactcggatcttgactcgaattgggacccgaacccagactcggaccccaaactcggtgttgggttttatgccc

SEQ ID NO: 299852 - DNA, 3583 bp, Cannabis indica
aaaaaaaaaaaaagattaaatttttgcctttatctataagcacttagagaattttttaagaaatattttttctttgagagaactaaaaaaattcttatgtgaacacatgtgaaatgtacatcttgaatccaagatccaatcttttcttgattctatttcagcatgcaacaagaacatttgtagatttaaatacatccagcatcacttcaatttcccttatcgttctaattcttgtccttgtccttgttgttcttgtttttcaagatgtagcattcatcattaaggtgaccttcattctaataggtgaacaatttaagagacttgaacttagacttagatttatttgagctattattcttgttgttgtgattcctatgttgatttctattggagctatattttacctttattctctctcttatcagatcaacctcgagccactaatcctttaccatttgtaccattcttatcattagatttcctttgagtttccttagaattcaaattgctacctttacctcagattgtcaaagtctccttaccatataccatggtgtcgacaaaatgttcatcataggatcttggcaaagaactcaacataacaatcccttgatcctcttcttcaatcttaacaccaatgttattgagttcgagaatgatcttattggactcatctagatgctttctaagttcactagcttcatccattctcaaggtgtacaaacgtttcttcaagtataacttgtttgtcgaggttttcttcaaaaaagattgaagctaattcattccataaatcaatggtagtttcttcattagagacttctctgagtacttcttcttcaagactcaagagtatggcaccgtgagccttggtttgaagttttttaatcttttcttatcctctttgatgtcttgaaaatcatctggttcaacaacttctatgggtcattttgattcataggctgaaatccttttctccagtaaatttatcaatctcaaactttgttgaactcatattgattgagtcttcattacaattaatccttgaagcatgggcttcgatatcacttcttgggtcccattcttctaccttattgagttgccaactcatcttaactcccatatgatattgtttgcgggcctaacccactacaagaaatgtcacttttgtcagcacatttttgtgctggcaaaagttgatattgcactggtaaaatagaatttacttgtgaagtgtttggaaaagggagttggcaaatcaatgttggtattagaacttttgccagcataaaataaaaagcgctggcaaaagtgactttttccagcgcgtaaatgcgctggtaaaagttagattttagccactgcaaatgtacgctggtaaaactttgacctctttgccaacgcagtttgcaaaatgacttttaccagcgcagtagcgagttgtgctggtaaaagtgacatttgttgtagtgcccttcataattttatttttggcgaaaggcctcatactaatggagtatgtggaacacttatattcaagacaactcttacctattctttcgacatgggacttggattgataccctaacaatcctctccttaaactaaggatcgcatactcgtggcctctcctctagtgaaactgccttgtaatgctgctatcaccaaacagaactcatcatctaaccttcaacattgtcaggaagactttcaatacatggtaccaaacacagatctccatcttgtactgccgtaatctctaccaggacatgttgtctgaccatcacaatattagatagactttgcaaggcaccgtatagatcttctataacaaggtcatcacattgagggcttcttctacacattccaaatgcaacccactatcacaaattttgaacttttggctctgataccacttgtggtaattattaccccaaaagacacaagaataaagatggattaatgcaataccaagatcaaaataatcaaagaaacattaaacataaattcagacaaagaaacaaccaagatattacaagattcgatcaattactgacagtgacaattgtctactctccggaggaagagcctttggctttaatttttattaatcaaattcttggagttacaatggtgtagaaaacctaggaacttacattgaggatcgagttctttgagaggcgaattaggattagtaattaatgagatcaactagctagttagtattgtatatataaacttgtacaaggttgttggaatgacattattgtcataattaactttttttaactgcctaagaccaagccaaagctagctgactagctcagaagaataaaagttaactaattactttaactaacactatatatgcctttttgttttctttggcaaacactaaaagtaaaatgttaaaagagattattagtatctaacacttctaacatataccatattgttatacaactaaatatcggatatgatataaatatagataaccaattacaaaatatcaccggtggcttatagtatgctgacaccaaaactaatatatattcatttttttttcagtggtcttcgatccttattaattttgtgctcggaaatataagaaaatttaattataacacataatatatatacatcacacacaaacaaacagataacaaatagctagccctaaagccccagaaccatctatggtttgttctccaatccccactaaatatatatataggtatgattttgtcccgtgattgtactttcacggaatgcattccgtgatgtacggcagccgtcaaatgagggacttatttaatctgacggctgagattgatctaaggataattagggttaaaaattagaaacgtaccctgacacttatttaatgtaccccgagactcatctactcacataacaaaatcgtatccatatatacaatactacagaattaaattaatgcacattatcattatatgtctgcatgctggggttgtcaacgtcctttttatctatatatatatataaatatatatatatataaaaacaaatatcacatcatataaagtaaacaatttacaaagagtggtccattttcattgaagctttaaggtactagatcacgtgtatatgtctacatataatataattcaagcacaattctagtttatactcttgtgtggtaagcaaatcattaacaatatgagtacgtacgacaggtttatatatatatatatgttgtcatacacacacacataatatttgatatatatatatatatattgtaaattaccattggcgtacgtcaagggaaacagcccaggcccctcagttatttatatatagatatttatatgtatagatatataagaatctacctagctaatacttaaatttatacatatttatatataccacttattattttcgtatgatgaattaataaataactaatataattatttttttaatactatttcttgttactactataactagctagtacgtcaatataatagtgattgactcatgtactgcgtgtcacttctgttacattttcactatactgatagcaatgcataaaagt

SEQ ID NO: 299853 - DNA, 2550 bp, Cannabis indica
gaattcatattaggttgttaatgcaacatacttgttagtaaatctagatcctggtaaaataatttccaacagaacaagattcacagcagtgggaagagcatcattaataaatcgccaagcaaaaattttaacctttttaggcaaactgagggaccaaaatctattccaccattgacgatttgatgatgagggtgagtgtgaatccaaagtttccaaacttgctgcaagatgatagcccgacttcacactgtaaacccctgtataagagtgatgccaaatgagcagatcctcgcgaggaaggctactaagagggatggatagaattctttcaatatcaatagcaccaaaatggttttccaatatcctagtatcccatttcctatctgcagaaatataatgggaaactgtgaatatagggtccccactataagtgtatggagtgaacgtagtattccccgaaagccaaggatcagaaccacatctaaccatgttacccaaaccaattttccaacgcagccccttgttcagcaattccttaccatcacagatactttgccaagtaagagaaggcagagtacctttagcagccgaaagaaagtcaccattcttgaagtatcttgctttgagaactctagctaagagcgtagaagggttctcgaagatcctccaggctcgttttgctaaaagagcctgattaaaatgaataaaagaccagaagcccataccttccaatgaattttagagttattagcacttgatccccaccaaaaattggccatcatagactcaagttgattgcagaattttttcgggagactaaagcagctcatagcataagtgggaatggactgcacaacagcttttaaaagcacttccctaccgccaatagaaaaaagcttcgcatgccattgattcattaacttccaaatacgatcttttataccactaaataactcctttttatcctttccagcatatgaaggtaatccaagatatttctcatgcagctcacagataggcatacccaaaacatgatgaaattgatctttattgacagaagtgacattgggtgaaaaggacataacagtcttatctgtgttgagaagttgaccagacgctctatggtagtaatcaagaacatgttgaatcgcatgacaagaagcatcagttgcttggcaaaacagcaagctatcatccgcaaataagagatgcgaaacagaaggagcccctctagcaatggataaacctttaagattaccaagagattcttcatttttcaacaaagcagaaagtccttcagagcaaataaggaacaagtatggtgaaatgggatctccttggcgaagacctcgcttaggaacaaccgaacctttaatagccccattaatattgaaagtaagagttgctgaagaaacacatttcataaccagagtaacccatttggaatcaaaacccatcttagtcatgactgcttgaagaaaaaaccattccacacgatcaaaagccttactcatatccaatttcaaagctgcataacccattcggcctctctttttacttttaaggctgtgtaccaactcaaaagcaagaagtacattatctgtaataagccggtttgggagaaatgcactttgattttgggaaatcacagatggaagagtttctttaaaccttacagcaatggcctttgagacaagcttatataacactgagcacaagctaatggggcgaaaatctcttacaagttgaggttgatcgatcttcggaatgagggtgatcaaagctgagttgataacatccatatcttgaccatcatttaaaatacccagaatactttgagtaactaaaggacccacgatatcttaatgtcgttggaagaacatggcagacatgccatccatcccaggagacttatcaggagccatggaagcaagggcatcttcaatatcctgggcagtgaaaggttttagtaaaaacgagttttgttcagaggtaatggctgtgtcaatcgtggaaagaacatggtgtaaggcatcatcatcaattccattagaagtgaacaagttagagaagtaatggactatttcatcagctatttcttcttcagtttgcacaatcccaccgttgcttgactgcaacttcttaattttattacaagcatgccgagatttagcccttgagtgaaaaaaatttgtattagaatcaccgctttgaagccaatcgacccttgcacgttgatgccaatagagttcttctttttctagcaaatcgtctaaaattctgtcagcatcttctattcattgtaaatgatctgaagaattatccctactgttatgaagatgagccgaagctttgtgagcctcagcaatatcacgtctcatgctaccatatttagaagaatgccaactttgaagagcattagaacaagctgcaatattttgtagtagacccgtagcagatggattatttggaatgtcaagccaattagcttgaatgatgtttctgcaatcagtatctgttgaccgaggttttcggcaactattaaaatat

SEQ ID NO: 299854 - DNA, 1520 bp, Cannabis indica
tacttatcctttaataattggcctccccaagaatttaattctggctccgcccctgctggtatgacaatgaagagggtactaagtaccattgatgccttttagcatttctcttatatgaattattattaagtattagtggtgtccaatactacctaaaggttgcacattgcaattgggattaatgatattttataaaaattattatattaaatcaatagcgatattacattttgagaggtactaccttttagccatatactctacttcagtactgagctactacctttttgcagagttaattttcaatctatgcattcacctttgtgaaaacataacttgtaagtgatctcctatagtgtctatgcatccagcatagtcactgtccacataccctgtaatcctcttttgaattgcagctagcacagtaagctgtttcagtgttgagggttcctttaacatacttcattatccattttagagcttcccattgttgctctccagggtaagaaataaacctgcttgtgatgcgcatggcatgtgccaaacctgtaacagttaggactatgctctccttagcagtttttaataattggagagttacacaacttgattcaatgctttttcaaatgggaccttaaatgaggttgtgtacatgcaacaaccaccacgttttgaaaatataaaatatctaaatcatgtgtgtctattacacaaggctatatatggattaaaataggctcctcgagcctagaatgaaaagctaaaacagagttttcaagcatctagagttgatacctctctttgttcatgcttcaggagctaaccagattgtgttacgagtatatgttaatgacatattagagattggtccaaattagagtctcatttccaaacaggcacgtaacagatgtgaatcaatctttttctttaaaagacctagggagagtacactacatttgaggtgttgagattgtcaagaatgaattttggtatgtatctttctcaatctaagtacataatagacattctagtcaaactcaatatggatggttctaaaccttgtcataatcctaatagttccacaaccaagctgagcctgagagagggtgatctctttaaagattcaacactgtacataagtactataggagctctacaatatctaagcttaaaaagacttgatgttgccttcatagtgaataagattagtcaatttcttaaactcctaccactctttattcagaaagaaaatgaatacttaaaagaagaaagaaaatgaatcatttgtaaattaaatttttagtgagtctacttttgccgaacatatataactattgtagagtacctaaaatataggtctacatagccaacaacttcaactttttaaagaataatttcatgaactgagctgggaaattttttaggggtcgtttggaacgccgtattaaatcgtattgtattgtattatattgaattgtattttatgcaatatttttatgtaaaactatatgtgctattaa

SEQ ID NO: 299855 - DNA, 3797 bp, Cannabis indica
cctcctcgaaatagaatctccacatcagcacaagacgaggcacttctggatgagacatacgcttccttgacaaaggagcgaagcgtgtgctgaaggagcttctggataggaaatgggccagctcgagtcgactatccggaacactcttccaggaggaacaactagccatctgaaactccttttttttggaggggggggggcactagctttcttagaagactacatttggagtggatatgatagtcatccgggaacgccctttcggaagactccttctagagggacaagtttgctatctgggaacatacttcctggatataactaaatttccattacttgaacagtcatatggagatcttttcattaagaggaactataccataaattccacctagttacatcaaatgaaaatattaacggtgatgaagaaagtatacaaccatcatggttgatgttccaaaaatctcagtttactaatttttgagattgatcaagtccaagcaatgcttgaacttttttactgttaagaccttagtaccaacatcagcaagtttatcttccattctaacattaactaaatcaactaatccttcttctatcttttctctaatccagtagagtcatatgtctatatgtttgctcttttcatgataatctggattcttgcaaagatagatggatgactcactatcagagtaaaaagtcactcctcatcttatttttttatataaacaaaactccccaaaaccataacgcttccttgaattcttttgtcgttgccataaattctgcttctgcggttgaaaggccgaccatagactgtaactgggccttctaacatatacatttttggtttgtcaagataacgtagaaagtggttgattttctggtatctctgtttgaggcatagttaccttccacaaacccttttaactcgaattctactttttctttctcataggtcagaccataatctcaagtgccctttaagtaccttaataactttttaagggccttccaatgttcaatgtctggatcggacatgatacgacttatgatgcttagtgaatgagctatgtccggtttggtgctcacattacatacattaaaaatcccaaaaccattgtatagggtacatccttcattttctctttcccctgcaaaccgttcagacactattcctttgacaaaacaaactttcaaccaaatatagcagatgtactctttgcaacttccatgttgaacttttgaataactttcttgatgtacccaaactgctttaagcttatcgcctcttccctcttgctcctacaaacttcaataccaagtatcttttgaattagtccaagctccttcatctaaaattctcttttaagcttggctttgatacttttgatcattaatttatccttgctcacgatgagcatatcatccacatacagcaatgaaaacacagttattgattactcctggttcttaaaatataagtagtgaccatatgttgatcgtttgaacccaatctgttgcatataagaatcaaatattttgttccactatcttgggactgttttaaaccatatatggacctattgagtttgcaaactagctcaactccttttccttccacctgaacacaggtggttgcctcatgtagatctcttcatcttaaaatccattgaaaaaaagtcttattgtcttgttttttaccacacgtcaggagattttaatgtaatcaattccttcaacctgattaagcccttagccactaacctagctttgaaccacacttgttcattcttatcaatttttctctttcaccttgagaatccatttgcactccacaatctttttgttctctggctttggtaccactactcaagccttgttcttctagagtgaatccatcttcccatccatggatgaaagccatttggacttgttttcacctgaaatttcctgttcctagcttttggcctcttcaattttaatttgttgtactgcgtctagtgcaaaagctattaagtgtgcttctgcaaaccttgtcagagggtgaatctctcttctggttctatcacgcgccaactaagaacctttcaaacctatctgtctgagtaattttgaagccttatttagtctttgttatcttccaactcaacaacagcttctgtctgcacactgtctttcagttccacatagcttccagctgtgaaccttcgtcaggatgtttcactccgtattccacttccatgcgtgtagtgttcttgtttcctattttttctatatcacatggagacacactacctttcctggatgtcaagggagcatattccaactcattaaaaacaacatttctatcactcacaaccttttgtctacccttcctagaaatgtaaattttatacccctttgtacataaggcataacctaggaaagttcccttaacttatctagattccagctcatcaatagattggtgtacatatgttgtacccctaaaggttcttaaatgtgaggtttgggattttgttgtacgacattttataaggggttttcaagcctataacttggtttgggcttctatttataaggtaggttgtagttgttagagcttcccccaaaatggtttctctaatctagaactaaactataagcatctaactttgttcaacaaggtttggttcatccttttagatccattattttgctctgcggtcttcactattatgcttagtgatcctatactcctgacacaacttatcaaattcagagttaataaattctaacctcttgtttatcctaaggttcttaactttaaggttgattttttttccacctgagttctccgaattctaaactgttctagacactcaatcttagttgttagcaaataagtcaaaacacacctgttacaatcatcaactacagaaaggaaatattgcttactgaaatgagtgagaactttttatggccccaaagattatcatgcccatattcaagtatcttcttagttgtgtgcctttccagagtgaacttcagcttatgttgtttccataaaacataagcttcacaaaatggtaaggcacaagaatttaaattttcagttataccttgtttgtgcatttttttgaggccttgttcactgatatgccaaagtctgtgatgccacacctacatatctaattctagccctttcaccaaacttgcttctccgattggaacaatttcttcttggagaatatataaaccattgatcttttcacctttcatcactatcaatgaacctttagtgatctccatgcttccttgcatggacttgtatctgtaaccttcatcttcaagtgcacctagggatatgaggtttcatcttaagtttgaaatgtaccttacgtttgtcagaaccttgatttcaccatcatactgtatgatggcaacctttttggttctaatgatcttgcatgaatcatcatttcccattagaactttacctccatcaactcatctatagttaaaaaatgagttttgacttggacacatgtgatgagtgcatacagagtcaagaatccaatacatgttcattgaagattctgagatgaagaattattctccatatgttgagcaatcatcactatcctctgggattacagttgaatccttcctacggtgatgtcgtctgttgtccttcctatctccatcgtgagatttgtagaagcctcactgctccttttccttcttgcaaaatctttgcaagtgtctaaaccttccacaaaagtacacttttgagtttccttctctctaga

SEQ ID NO: 299856 - DNA, 3101 bp, Cannabis indica
tacaaatactatgatcatacataaaatatttatagcttggcaacatatcatcattttagcttcaagccacctttgcttattaatccttgcaataaactcttcaactcttttgtttagttcctcagttggcaataatccatctgcagactcatcttctcccccatcatcactgttttctttgaagtgtttggtttctgccatatcatcatcatcatgatcatgtttttcttcttcatcatgatattccacttgatcaagtacaactccttcttctacttcataaacattttcttctttctcaattatctccaacttctgtaattcttctttctcctcaggaataatagtgctaggactactagtgattattcttttctgtccatgaagactttgactcctctctacatattctgagtagatatcatgagtggctagagatgactgttgtgatgatgatgatgagccaaggagctttgattcaccaacaaggaaagcaactatgacattaaaaactatgaacaagcacttgggattaaggaaagaagaacagattgttggaagggatatgaaagcaaagtgcttgattgaagtagttagtgatgaaaaccagaaagggtaagaacaaagaaaactacatgttattgcaaccatagaagagaggatgagattgtgtaaaaaatgagttttgttgtaagaagaattcatggaaacttgaagcttcttattagccttaaatgaatccatgttagaaaaatggtattgggattttgagagatgtttttggagggaataagaaaattagagttgtatagtagttgtagttgtagttatgatgagggttcacataacatacatttgactgaacatatgaagaagtgaatacctattacttatatagagaatagaaatggttttgatgggatatatttggacaagaggtaaagctagcaaagcccactacaattcattttacaaattattgtaatgaaaaggttactttatgaaaaaagctaatatatagcaggccaagaagaataatgtgttcaaatttaggtgcttttgttttaggcctctcaataagtttgctttccactattcttttgatggttttgaattctaccatttaagaatcaaatgcactcaataaacatataacacaaatttgaataagcattctaaacaagtttcattttacaataaataaatataaatacttatacaaaagagaccagatacatatagactacattaagagttcgtttggtacgccgtattacatcgtattgtattgtatattattatattaaattatattttattcaatatttgtatgtactatacatgttattagtttttttttttgaaggaaacatgttattagtttttataaacacataaatgtataaattataaattaaagtttagcatagtattatataaaaatataatatataatccaatttaatgtaatacaatacaatacaaccgacgttccaaacgagcccaaatacaaaaccaaattgaaaaataaaataaaataaaggatcggatacttttactatagtagaaatgtataacacaattaatcttttttatttatttattttttttttttgaataaatcttttttattctttttatttggtcggaaagaatctatataatttaatgcaaaatctacagactcaagttgatttgaacacatgtcctgatttagtaaccaacaaagcaaagtattttgacactatatacaaagcttttctcctataaaatgttatttataatcacttgatttgatgatggtgattgtttcataaataataaatacatatataaaaatattttaacctttaatcatgtccgttatattatatatgactagaaagtggttctagctttaatttcgtttggttacgtatgcaactattggagaaaatcatggttaattttatatgttttttcctgtataataattgaagctggaatcacacatgttgaataagctacatactctcctttttattattacctattacggggatcttttcattttcgttctcctaattatgtaggctgggaattgtccacactgtcccagtatgccatgttttttttttcaagttttattgttcaatttttggtgcctctcttttatatgttattcgcaatattaattttataacacataaattgacaaaatatgtgcttaaaagataaacagtaaacttaattattaaatgaaagaaatccctccactttttaccttacaaaaaaaattagtaacacaataaaattaatatttatttatattatatatataatttcttgacattaatatatgatttactaaaaaaactatttaagtaataatgttagttaaaatataatttttcttgtaactaaatgtgacttttttaatcacaataaaaaatttacaagtgactaaaatatagtatttgaatacaaattgtcactaatatttaattttagtcgcaataaatatagtgattaaaaatacatttactcacaataaattgtgattttataattaatgactttttagttattaacataaaaataatgatttataattatagttataattttttttatatttatttttagtaaaaatataagattttttagtagtgatttatcagtttttatttagtcgtttttaaataaatgaagtaaaaagaagagtttataccttacaataataaaagtagaaaataaaaagaagatgaagaagagagtggagggttggcaagtctaattaagtaatatttgatgccaaaactctcttaattaaggaacaaaaagcttgagttgaaaccttacctacccttctcaaaactacatattcaaattattggggacttattctacatagggttgtacaataaaaattcgctaactgcccaaaccgaataactcgcccaaaccaaaccgataaaaattacaaactgaaataacccgaaaaaataacaaactgcccaatctgttaattgggcgggttgaaaataggtccaacccgcccaattaaaccgaccaacccgattttgcacctttaattttttttttaactttttagtttttat

SEQ ID NO: 299857 - DNA, 2257 bp, Cannabis indica
tttttaaagaatgtccaaaatacttttctcgcatgctctccaagtctccaacactcaatgtcttctaacacagttttttgtaaaacacacatagttcagttattgtatcctaaacttctctccttaaaaatttctaatattgcccgacaatgagcattataacaacacatgatagtcatgtgactttagtccagaaatattgtcctcatttttactcacattcttctctaaattggcaataaattcgtacggaaactgcattgacttgatatatttacaaaattcacgttgtcctggaggactaactatgtaaatagtaagcagcttcttccaattcccattgcgatctttatataaccacatttcacgatgtattttgaggtcttccaaatcaagtcctgctttgtcagttgctttggacttgctcttgattcttaaaagagttccaagtacactattatttaacaaaatttttggaaactgattatatttagagcttaagaaaataagagataataaataataaacaaatagattttttacgtggttcaggcgttaatgatccttagtccaggagtcaatagtattagcctctttgggcaagtttttacagtatgggtttctctattcctcttgtttctgttaggagaaagctctctaagaattttagcagagtgtctataaatgaaaaattgttctctccttgctcaaagaaaatgggagtatttgatttccaggcttgatccaacgattactcatcatccgtgctgagctctttccacacatcgcatcccttcgactggaccgacaaagctctttattaggagaagcatttaatttccaggctaggtgcgaccattgcatcgacttgctttagagctttcaggcaagattttccaacacacaactcttctctccctattcgacaagcaagtacactaacccactatttgaacttttggcatttcgtatctagggcaagaacttttgttcaggttaggtctaggaccgctcacgtgtcaaatagcaaggtagtgtgcatgagagaaactctgctctcacacctgtgaactgagaaactaggttgctaggggccttaatctggtaattgttttccttccatccatcaatcatttcaagaggtttctttttccttcatttttgtgttggtagtaatgggcttgaaactggaccttcccacaagcacgattggacctatcaagggtgtgcttatctcttctgttgaaaggatttttctaggacatgatcaaactgtggctcttgtgttgacctttcaccttgagggagccttggaaacttttctagagaatgaacccactgccgaaaaggaccccccaataggaattagaagagaaaaggaggtcaaaactctcccaccaacaccgacccataatgactccatttgggaaatggatcagaaagccaactactttcgatcttatgggatactggaagcttattgtgatgtcgctggccatcgcaatgttcctaaattaatgtagcatagactttttactatgggagaatctgcttttgttaatgtagagggattcagtgcatggagttggtcctacttttgtagtggcgctcacctctctctaagaacttattttacaaaattgattgcaaggatcgggattgcccctttccaactgatccattcatcatataggcttttggctgggttgtacgtgttctgcaagataaacaagctagaggacctttcattagaggaaatcctttatttctacagcatgaaggctaaccccataaggacaaacaggaaaaagttgaggttctttagattggataagcaccgaattcttatggccctgttgttagtttataattagcctatgtttcgggtctttaaagttagcattatctcgtctattggtgtcttttggagcagttttacggttgattttcattattttaggttcccggggtgttaaagttcgaattcagtcaaatggcaaaaaactgggagaaacttagaaaaaattggaaaattcggctccagacgcatcagtagtcgcgacctccagagagccaggtcgcgaccctttttcctggtcgcgaccctggtcgcgacttcgagaattggcagaaactcggtttttcgagttttgcctacagtcgcgacttggtacggaaaattgcagatttgacctaattttggttttttctcaaattggaggcacacttctcatccctatataaggaatacgacact

SEQ ID NO: 299858 - DNA, 3339 bp, Cannabis indica
aaaaaagctagaatgaagtagaagtgttgcacatacctccatatcaagtcgaggataggtataagaaaatacaatctcttcaacgcatctacgcagtccttgtgcctgaagcaataaacagtgcaaaacaaaataaggttactttatatgcaaaatggcacaaggacttatagacatccaatctgattagccggcaaagttacaagaagaattccaactacaatataatttaatccccaagcacatttaaattagacttttgttcctaatttatcacaacgtttaatttagctttcacattctgagatgattgatcctcaaaatttgggttgcagtattttccattaagtgtttttattatatgatattgttggttttggctagcaatgctactttaaaaaatttatagtggataagttgaggcttattcttaacactaccaagacaaaatacctcagtacccagaaaatcttttgaagcaccatatctcacattatattatgtagattaatccttatggagagcaaatgtcacttcctttattaatgctcccactatcacgagagatgtgcctccagaaagtattgaaatccatattttatgcattttctaatgttgatatttattcaataaatatgtgtttttaccttcttgtttcctgattgcagaagatgtttcagctgttcccatctagtaacactaatgtcatcttttgaattagaagagcgcctattatcttgccacttcccacgaagctcagaagcaacagctgcaaagatgactcatagatcacacttacaaaattaccaggtgaaaaataatagaattatatatcgtaaaccatgaaagaacaaacatacattcatctggaatcaaatccaaaatcttttcatatctctcctcagacgaaaataaattttgacttgagagaagttttgtctcaaaaaagtttctaagaacctcagtatatgacctcctggggagagaaaaagtattagatgaggaaacaaaaaaatctagtgtcaaaaaattaatggcatatgcttatacttacgcaaggaatggatgaagagctggaccaattaaagatacctttttttgactattctcatttccctgaaaaataaactcagaggtcaacaagttccaatataattcttaaccataaaagattggtgatcaaaattcatacgtagcttaaacaaagcaccttgtagacacgaaaatagtcggcaatagctgctctctgttcattggtcaacctgaaaaaaaaaaagcaaataaattgtgtgtcctttcttatcataacataacaaaatacagctatatacaatatatattccaccttcttgccttctcatcacaaacccagcaatgaacaccacgtcgtccactaaatacccaaagaatgtgattgaaaccaaagtcatctgcagcagaattaaaacggtgtgtaagacatgtattctttagcccaacctctgagagcagtatatatattaaaaattttaaccccaacctctgagagcagtatcaataactttgatagcaactgtcatcagtggccagcagtccaagcaaacatcagcccctgagcagcagtatctaacatcatcataatctgtaatatcctacaggggagtcagaacttaaaaagttataaaaaaaaggaattaggaactgaatattaaccaaattcaagcatttatgaactcactatatcaaatataagctccctttccacaggagtgaaaacattatcaccagtttgtgcatatgcacgtctctttgcaggctgcaacatcagacatatcagagaattaataacaatgatagaaaaaacatgataatatattcagaaacaaggatgtaaggatttgaaacctacaacaaaacatggataggaaatctggctaaaatccataccaagcactatgcttgcaaaagcaaatcaattgataaattattcatgagccaaaaattaacttaaattctaaatcataagtattagaagctaaataataggatgatatgtagaaaaatcaaacattcaaatgcaagtataaaaggaaagctacaataaaaattgataaaaagctcattatcactccttaaattgataactcatacactgcaataaaacaaatagtttgctgtttggattgaaatttgttacactgcaataataaaacaaatagttcactgagaaaatgaaatcttgttcttttagcaactaagagaaagtaaagtcttacatctacgctgtaaacaggtccaatgtctattttaactggacatttttctctgatagagttttcgagttccgacacactgttaaatgactggaaccgcaaataaatatcattatccagagtgaaggaaaactcccttcgaccaaaataggagtggtcacacccaagatgtttcccatctacatatcaggcacagaaacacagagaattaagaggattcttacaaaaatcaaattcaaactagcaaattttctcttggattgaaataagaacactcaccatttccgtatgacatccatttgaacatatcagcatgaggaaatagcttccctgaatcaaataaactccctttttcagcaaaaaaacaagcataatttcgacctcgactaaaatttgctaaaatattgctttacaattgattaccgtaataaactttgagataattagcattgaatccctcaggaaccgcattcccttccctttgttcaactccatcaatctccatttcgtccactacagcttcaacttcttccctcgtcattgtttcagatcagtgactctaaacctataaagagtgattcaaattccaatagagacaatgataatctacaacaacgaacactaaaagagtgattttatttatgaaaatgcagaaaccctaatccaaattgctcatagaaaagcaccaaaaataaaattaaggagaacattaattggaatcgatgaattcaaaactttgagaagatacttactgttatggcggccgctgcgagatcgataattttggagagagagaggtctgagagtgagagagtgtagagcgaagaacgaaggaaatggcgggaaaaggagagagagggctcagaaatgtgtgtatttggcgggaaatgattgcggtgcgtttggttagtctaaattactaatctacatatttgcggggcataataataagttcacaaattatttattgtttttttagttaaaaaaataataaaacaaaaagataagggaaatttgacaatatatgcttaaaaatatataatacattaaaactatgctagcattttttacattatggaaactatac

SEQ ID NO: 299859 - DNA, 1650 bp, Cannabis indica
tatttactcacaacatcatgtgagaatttaaagatatggaaaaggcacatacagaggccatgttaaaagtgaaggaactagagggcatgctcacttcttcttaggagacatctaaaaagcaactaaaagaggtgggtgaaaagttaaaggctactgaagattatgtttaagcaaaaaaataatgagcttggtaccttaaatacgaaacttatcaaacttgaggctgagttgaaggctttgaatgacaaacatgtggccgctattggtaagctagaggttgaatacaagcaggccttggaaactatcaaacaaatgaagacaacccatatgagtgagcttgatcgtattaaagagctcggtaaggacaacacctttggagtcgcctacatgtgttggtgctagcaaaatgactaggacttcaagttctttagtacattgcaaagtgaagttgagaaacatattcggaagacccacgcggcccctgccaatactgagggtaccactgctaacatggagcttgaagagaagagagaagaggttacttctcacctagccctaaagtcttgaggataggatctataggagagttgtggcatattgataatgctctcttcatgcaaggagtggagagttctcttcatgcttgactttgtatttctttgttgtctgtcgagaacacatttgtatttgtgtctctttttgttatatacacttttcttggttgttcattgacatttgggcccacaggggtgggtttatttatgtccacttggcatggagtgcttattagttaggactaacaagtctttttcaactctttagaatggggcaaggtgaccaatcagcctccattagtccaattgtctaaaattcaaacttaaaaagtatgttgactgaacttccattatccaccagcactctggaaactattttgttggcaatctgggcttctatgatctgtgggtcattgtggggaaaatgtacatgcctagcatcttcttttgtgaaagtgattggtaggttcatcatccacggacgttgtgcgggggactgtactaatgcgcacatttctctttcattttttaactcttttaaatatcttttttgggagttttgggtgcttcttgcaatatgtggtcctctaaagatcgtggccacatacccatcaaatgggtggcaaagctactcttgggggatacgagttccctagtcttggagccaaaactactactagagcatgagctggcagagcaggtagggctagaagttgtgttctaagagcttgagggaggcctaccccctacggagggtttacagctccttactgtttgagaacgagcatctgtccgtgaataacccctatccaagatagataattggatctggatctacttgccccaagtgttcagctctaactagagtctcaatttcatccttcagataatcacactcgttggtagtgtgccctacatttttgtgatactcgtatcctttggtcttccccccggaggcatcctttgggactttcaataatggaccatattgcaggttaccttgtacacattttcctgagtgtcaactaaactagtttactcatagaattttggttcttactccctccttggttttttcaaagtttcacttcaattt

SEQ ID NO: 299860 - DNA, 1977 bp, Cannabis indica
atggtacagtggtcgtacttccattagaatgttcttaaccatttgatgagcttggtagtcaggctcaggacggcttaagtataaagtctgtattatgttacctatgtatacgttatgcatatcttaatgagtctgttgactcatcagtttgctaccttgtgtaggtaaggaaacagctaagctggaggagcagtgagttggagcttggcaaggattgcacatatcgcaacagtgtaacctggagggtttcgatcatatagcattttgagttattttctaaagttgccctgcattttgtataagaaaatatattacgagaccttataatagtaaatgtaattttcaactgtgttttatcttcaggatcctgacctataagactatataaatataatataattagattaatttttgttaatcaagttttcaaatacaggcgttacaagaaacaataacaattaaccataaaaatacaaaataccattgttgagtcaagtttgagtactcaaacttgctcaacacaaacattggtcttcaaaaccacttcataacaacattaatcaacctaaaataacctcaaataacaaactgcaacttttctagattcatacagaactaaaattatcatttagcatactacaagtcaactaacaactatagtaattcaaagaacaagggtttataaggttaccttgggtttatgctacttcaatcctttgtcaaaactcggaattctacgaggaaataggttgatttcctctcattcaagctgagccaaagaagagagaaagggtaaggtgataaggtttatccattttgtcttttctttcctttaattaattaacctactaactaatcaaagaaatacagctggaataacacctaagtgccagcttccacgccacaaattagcaacctcaaaccccaaaaacaaaatacctaaaatgcccttacatccacttaaagcaatttgtaagcttaggggtaaaatggaccaaaaccataaccccgcttatactcggtattctaaatattccttatattttttctgctaagaaatagattctaaacttacccatgtgactctaatattcaacatattttttcgttgtcgccgagcaaaaatcataaaaattacaaaattcatatttaacttaaataatactcctaaagtttaataaaatatctaaaattgagaaattataactccagtacccaaacctaaaattgaacccaccatttaataaaatcatgcataactataaaaatgtcaacaattaacgctaattgcctttactaatctatattctaacatgtggtcattacactttgggcattctttaggcccgtagaccaccctctcctgttagtttgtttcctgaggtatggacttcttgttgataggttcggtgttcttgaggtatttgttagttatgggcatcagtacccaactcttgagtattttggttaaaatatcttcgaattaagtcagtaacttcttaagtttgacgatcttggtcgtcttggcaccttctcatttctcgagcatgctcttccaaccaaaattggaagtctctcctttatttagcgagactttcagttaaggccactcgagtttgagtctcattcttgtgaacagtttagaactagccttacattcggcctatcgcgtctcgtaactgatccatctctaggtcaattcctttaatatccacatggggttcattctgtagcctaaagatgctaggggcccgacaggtttgagtttagctcgtgtcgtcattaggtgggacaaatttttttggtattgccccttctggtggcactgtcagtagcgctgcctccagcagcggtggcataggtggtacggtcagttgttgtctgcccatgaccaacagtattctgggcagtatcgtgagtggtagtagcacaaccattactgtaatgaccgccttagtaatttggattagtaaaggc

SEQ ID NO: 299861 - DNA, 5586 bp, Cannabis indica
tatatatatatataaatgaaaaagcaaaatagtatacagcaatgtattgaaacaatcaatcttttcaatgaaaagccaacaacttccactcaaaagctggatctggaaaagcttgtcaaacacatgctttcatgctcacaatgtatataacctcaattactatatacaaatccaaaatcatccaccaaacgccatatttgcaggcatgagaagaagaaaccaccatttacatcatcataatcagattctgtgaactaattcaattctccctcgtgcatttcatactagtttagtctatttagaatcataaatttttaatataattttcagactacaaatgcagctttgcctgagatcttcaatttcattatttgtgatcaagcatttactcttgcactcttgcactcttgtagggaaaacaaaaatggtctgttctgagcggtttggagtatgactatcaacaagaatttcaacatacatatatatagaatatatacactgataaaaaataacattaaagcagccactttatttaaattcaattgcggctgactatatttcggtaattttgttaataagaaaaattttgaaaactaaaagcagattaaagaaacacaaaccaagacccagacatccaaaagaaggagatcctcttagttcctaattcaaataaagccaagaaagtaagaggcctgtgggaagaaatggataaaattgatgaaaacctaactgtgaaataaaaaatttaaaaaaccaaaattcgggagttaaaaaaggacctgtagtggaggtaagacaaacagtaaattagataaatctctaaataaaatgggaggccctaaagccccacctcaatctctccccgatataacacaggagcattcttgacaatcgtaggcatccaaattattggaaccttctaaagtctcatcttgtaaatgcaattgttatatacatgttcatgtcttcaaatttcaagaaaaaattacagaactaaaaggttttatgaataattagaaataataataatatcattattagttaatgaatgactgtgataatgagtatcaatagtaatattactaaatataaagaaagtaatagtagactgtgatgatgagtataaatagtcatattactaaagataagagagtaatagtagtagcagtagttagaagatcccgaggtaatattaaaaaattaatatagtaaagagagtagtaatagtagtagagtactaatagtaaaaatataaagaaagtggtaatagccgtaatagtaaaaatagtgcaatcataattttggtggtaaaaatagtgagaaataaaaaaaagaaagataatgcaataacagcagttgacttactaaaagagaaaagggcagtgggtaatattgtaagaattatcatttgtacaactattacatgatcatgattgtgattgtgattgtgatgaaaaagaaagactggaaataatattaaaatagtggtggaactagtagtagtatagtaagaataacaataactaaaataatatagaatcatagtattggggtaataattaagagctccacaaagaaagactgaatgaagtgcaagtctgagcgccacattcagtctaacgtaagaaataggcaaaagaaataacagcatcagtatttatcaaaatatatattttcatttaaaaaaaatagagaacactaacagtacttatcaaaatacatattttcattaaaaaaatagaaaacactaacagtacttggacttaaatggctttagttttaaaagataagagatgaaacaaaagtcaataacaaataaaagaacaaaagtttaagttctttctcccttttctccccatcttttgaagctaaagaacaaaattttaagttctttcacccttttctccccatcttttgaagctttctatatctagcgttttaacaaaaaacatagatgagtacgtcacattactttggcaacccatattcagtgataataaaaaaaaagtgatgctaaaagtacaataatctagactcaaaatacatattggatcttcctttttaaccactcattaagttctcatataaaataatatataaaaatataagtaattaaaaatcatgccacacattaaggaataataaaaaaaaatataagtagttacaataaatattataatttttgttttatttttttactttagggatgcaagatggggactttctaagaggtcacccatcctagtaatactatcacccaagctcgctcatttgcgaaattttgatggcatcccatgcattagtgttgagatgattggagccccctttcccaatcattactcataaaaaaatagagttagatgaataatatagtcaaaagagtagactcaaaaattacttaaacttgacagcatgtaaaaatatttttttcctttcaatatgtcaaaataaaagcaaccagctacggttcctccccataacccatatagtacattgcctaaaccactatccttttgtacctattaagttttttatcaactaggggactagataatttaacacgttgccgtgaaataaattttatatgtaaaaaaaagcttactttccaaccaatataaaataccagcacaccaccacatatatgcctctacctacccccaaattgaaagaaagcaaacctggaccaacaacccagcgccaggcagctctatgttacagactctatgtccgtatggtacttgtgaggatttataccaagaaaatcacacaaagttagaagttaagtagataagtaatttgggttctgtggttagtgctacatccagtagctgactgccatcttcatgaggctatatttataatggcaatttttacttcagatgctaaaaaacaaaaaacaaatctttccaagaacagcatatcaatcctccagctaagaatatcaaacagggcagcacgctaatcttgtgtagatcctgcaattatatgcatgccaaaaaaaatcaataacccgtcatatctacacagaagttgctctaaagaagaaattaatgacacaagcaacacagttttgaaccattagagagcaggaaagaaaccagtgcattctctaccaaggaataagcctcctccacaaatcaagaattggcagttctcttgagaccctagcatccagtgtcaaaattctattccttacactacatttgtataagtctacttggtaaaatacagagaaggattcatgaaagtaaccaaacatatagcacctgaggaatgcaaaggatcaggttactgataaaaatagaccaaagcacattcattgtgtacatcctgtaggctttaagatgaggcaaccaattttgaacgtacaggtggcaaggtatatacagatacaaattgcaccattaagtacataaaacacaatatatcaaacaaatggaaaataagttagaagtataagaaaaacttacccttcactgatcaaattcagagccagattcaccaacactgtttgtgaaagacctaatttgtcaagaacagacgtaagaggagcatatggatgatgcacattcagttcaaagtttaaagtagtcagtatcatagtttcagcttcaatcacccgttccctatactgctcaaaccagtcctgttcaacatgaaaccatagacatatcagtacatgataaagtcttaaattcgacataaaaacgtaacgtatctcagccgaatcaagattaaaactttccagttaccaattaagtagggtgaagtttttcaaaagtgcaaaatcgaaaagataaaagaagggaacaaactaattggcttttttctaagttccaactcttgaggaataattagaagaaggaaatcacaattcccaaagatacttacaacagggagcagataagataaaaaagtcatatcctgcttatggaatagttcacaagatgctcgtagcacattattcaaaggacgcgctgtctcctcagacttagcagcaagaaaaacagccgcagtagcaatcaactgcacaagaaataaatcaattaaagcactttaactaccattaaaaaatgttaaatagtaccaaacagtggtcacaacttacatgcaatgacaatgagtccattccatgtgacaaataattcaataaatcatttacctgtttgttttcctttcttttcgatattcttaccactaaaaataataccaaaagaaagttataacagattttttctagtgctatacaaaaaccaatagaagttggaaaactcacaaatctatcatgggaagcatgcgatcgcctaacaaaaaatcggtggcacaataccatagcagtaccaatagtagtttgtggcctgaaagacaatagaaaacggattctttaaatagtttgatcaataaatccatcagagagctcatcctaaacatagacacataaaatataaacaacataaaatatgaacaaatttcaaacaaaaatacttacaactcaagtcgcaagccaagattctgaatgaaggcacaatacgagtaccgcaagtgtgtctcacgcatagcatctataccatcttttctcgacggggagtgtctgtcaatgtcatccctagacataaaaaccagttcttcatcctcatccaattttgaccgtatcccgtttacaggaagtgacggagtgacatcagaattgaatctcgtcaggatgcacagaatcaaaacaggtagatggagcacaatcataagcattgggtgccaaatgaggtcttccactactattatctacccaagtagaatcagaaaattttctcctcttggaagaaggtccttgactatgatcaggcttaacataattagaataattgaatatatccctgttatgcctgcctgtaacgtcatgagggttgttaaaactcctcgtataaccattgtttctgctcctactccggctgttatagtattattactgaaattgtttctactaaaagaagaccaatactcatcatcgattgttccccattgaggtcgaaagtttctcataaacgacataattcctggtaattcaaaaccaaaaacgacaaaagtaagaaatgaatcagatcttattattccctacaaccaaaagaatttaatccccaaatagcacaaaaataacataaaattcttgtttattgatgaaaaaaggtaaattctttatgttaatcagaacagaaacccgtagaaaacattggattaaacgattaaaacgataatcagagagaatagtaaacggtatactaatcgatgtacgtaccttgtgaaaacgacgaggtgagagatcgatagttggttggatcgatttggaggtaggaagaataaacaaggcttgtaatggaagcgtaggggaagataggagaaaggaaggtaaggaaaatatatatgaatttatagaggtaagggggcgaactaaaccaaactctcccaactctctgtttttctttttgaaaaaagcttgaaaaatttagatggtatactaattttaatatttttttacaaaaaggcaattttttatttttttactgtatttttataagtttcatattgcagtat

SEQ ID NO: 299862 - DNA, 3623 bp, Cannabis indica
aaccgaaggtgaaatccaccattcggtcaagtcataagctttagaaaaggaggtggataaaactctatcgaagacttttatccgagacgtatactacccagaatggctggctaatccagttttagtaccaaaaccaaatgggacatgacgaatatgcattgattttacagatctaaattaagcctgtccaaaagactgcttcccgttgcccaggattgaccaaatggtggatttcaccttcggtttcaagctattatcttttatggacgcatactcaggttaaaaccaaatcaaaatgcatgtggtggaccatgaatgtaccagcttcagaaccgacaagggggtatactgctacttagtcatgcccttcagattaaagaatgcaggaggcacatatcagcgtatggtaaaccggatgttaaaaaatctcttgggaaggaatatggaagtctatgtggatgatatgttagtcaaatcccagacaagaaagggtcattcagaagatctcaagaatgttttgaggtggtaaggaagtatgggatgaagctcaatcccaaaaaatgcacctttggcgtcaaattggggaagtttctgggatttatagtaagttagtgaggaatagaggaaaattcaaagaaaatacaagttttgctagatataccctccccgacaaagcataaagaggtatagagcctgaccgggaagatagccgccctgagccccttcatcatccgatctactaacaagtgtattccataattcaatatcttgaagaaaagtaaaaaatttgaatggtctaaggaatacgaggaagcattcaaaaaattgaaagaatatatggccaaaccaccagtgttgtccaaacaagttcacggggaggacctgtagttatacttagccatctccaagaatgcagttagtgctgtattagtccgagaggaagaaaaagttcgcacccagtgtattatgtttgtaaacgaatgataggggctaaaattcgataccctttgatcgaaaagttggctttctgcctcctaattgcattgagaaagatgaggccatattttcaagcacatacaatcaaagttttcactaaccacccactcagcaagtccttcagaaactagaagcctctaggaggctcctcaaatgggcgatggaactcagctagttcgacatacagttcattcctcgcatctcaattaaaggacaagccctcgcatattttatggttgagtgcaacgaaatggaagccgtcgctaatttgcatgatctggttattcctacttgaaaggtaaatgtctatggcgcgtcaaacgagaatggatcttgggcaggagtagcaatgatatctcctcacagagtgagactctaggctaccttgaggttcatgtttctcacctccaacaatgatgctgagtatgaagccttgctagcgggcttaaggttagccaaaacagtaggggcttacaagatagaggtatttagtgactcccagtttgttgtgaaccaggtgttgggagaatatcagagtcgaggagaaaagatggctacctatgtctcgactgcaagagaattactgcaggaattcaaaagctacaagattgagcaaattcttcgagaaaagagtgttcatgcagactacttggccaagttagcttcggattgcgaagtagaaaaattgggggtagttcctgttgagtatctcactgagccaagcatcacacccaaagcgaagattgcgactaatgaacaaatatccagttggatgaatctaattatcaagtatttaacaaaagaagaattacctcaagacagagcagtatccagaaggatacaataccaagccccccattagctcatgatcgatggtgtcctttatcgaagagcctttagcatttcgtacctaaggtctgtgtctgtaatatcctaaaaattatgattttgttaaattaaacatattttatcaaatatgtaattatatgaatattagagtaagattataattttacttaagcaaattatgagttaattagagatattgagtaaatgaataattaaacgtaatttattaattacgaagattttatcaaaacatgtgagtattatatgtactatttttgaaataaaatattttcgtgttcgacaatagtggaaagttgatgaattggtcaaagatgtcatgacggcaatagaataagatatattgtaattgtaccagactagtttataatgttgagttgttggtttgaccaaaatacccctaagttatattttaacttaagtgtgtgttggagggtaaaatggtcatttattaaatcacatcctttttgtcttatatagtattttaataaccttagacttaataagtttaatttattggatttatgtatttagttttataatgataatttgatgataaaaccaaaaatctagaaaaaaaaacatcacataactctttctctctccctcttctttcgaaagcctaaaaacctagctaaaaaccagagaattcccacctcaattcaatcattctctagttgaagtaaccaattttaggagctattcaagctttggcgtaagctcttctcttatgcttcttgatttctagctttaggttgagttttgttggggagttttgcttgattttgggtttgtggaatttgtttgagtttagagcatgttcttaggtttaattaaagtttatttgagtgtgaatttggtgattctatagctgttaggttttgaattgagtgaactgagttcaagaacgcaaaaattcactcaactatggtgaatttgccattttaaaataattctgagttttgaatgcttgattatgttgtttttagattgttgaaatgttttggaaatttcattagttatggaggagctttggtttggttttaatgcaaaattagggtttcccgtttctgcagcaggaattggttaaccggttctacagggcagtgtggaactggtcaaccggttgaccagtaggggaaccctaatttttttgaaaccgattgtacgtttgaggtgttattctagaacttagttttatgtttattttcgatgtttaggctatttctaagctagttatttaccaagtttttgttttcgtcgtcgagcatcattccactcaggtcggcctgtacacttgatttttggattgaggtaagaaaagtcaattgtactgcttagcatattaaataagacacgattattatcgtttgtgactcgattatgatcgaggtaaagatacggtaattaccgttgttaagaatgagttattactcccttttgaatttgctgatagatttcttacttattagttgcttaattaagcaacgatggtgacataaggaactcgttggtaacgaggggtaaggatgtattataaagcatccaagtcggtttgtttgataaggcaaataattgattattatttgattatgttttgaataattgcataagttatatatggtaatgtatgctctgtgttaataaaatgttatgctatgtgtgatgtttactttttacttgcttttcttgctgagtctttgtgactcacatgtgctctgtggtccaggtaagggaaaggggaaactggaccagccatg

SEQ ID NO: 299863 - DNA, 1545 bp, Cannabis indica
agtttgaggattaatttaccaaacaattaaatttgaggacaaatttgtcaaattttatatagtttaaggattaaattgtcaaaaaaataaaatttaagaattaatttgtcaaaatatatatttataatggtaatttttctcttttttccaatcatactaaatatttgaaattagttttatttttgaaataatatttgaaataagtttaagatataagaatatttgtgttaattctttcaaaaaaaaaaaaaagaatatttgtgttaatgagtcatgcaatttcaccttccctttttgaaaaacaaaaaataaaaagggacaatttctcgtatctccatcccctttaaaccctaattaattcctaccaaataaaaaagtaacattaaaacccttcactcttcctgtcttccaaatgaagctactacttcaaaaaaaaaaaaaacaatgaaattactaccacttactctaaaagaaaaagcaaaggaaattaccacttattctaaaagaaaaagaaaaggaaattaccatccatttgcttattttattaattgtattattccaatttatagccaattgaaaaaggaattcgcctgctgttttccgagacttgaggaattgagccatacccctacagctccagctatacctacacctaggatagccacgtgtatcttgactaaaccacgagcgaaaataccaatatacccctacactgttatgtaatttacaaaattacgatgccattgccagaaaatcgtatatactctatacgtttcattagcattaaatctgttctctcttctctgccactttccgcataaaggcgctgagtcacgttctagtagtcctccctcctccccaattctaatccatttccatatttaatttttctttttcctttgttcacacaataaaatttggcaatttctaaaattctttctcctaatccgcatttgctaactacaacattatccaaatgagctaagccaaaaaaaaaacattatccaaatgcaaattttggtgagatatataatcaatttcaccaataaataaatccagctcaaaaaaacttgtccaaaaatgtcaaacctcaaatcttttacaattttcatatgatacgagtaataattaataaaatatcctacgtgtaaagggaccttagttttaacatacttttcgtaagctgtgaccgactgcagacagttatgttatccaaccattaataaaagaaaaaggaattctatttatcaaaaataagaaaaagaaaggaaatgatgtaatgacgtttattgatgcctccaccgttagataataactattctattttttattaaaaaagtagggttatccaacggccaaaaattaaattctgtattgtagaagcaagtagacaagtagacaagtattttttactccctcttactcctcttcggtttaaaatcttatcctcaaaaacaaaataaataaataaataattgagggtgcatgtgaaaattgcctttgattagaaacaagatattatttatttctctatacataaaaaaa

SEQ ID NO: 299864 - DNA, 3126 bp, Cannabis indica
attttttcttaaaagtattcttaggttgttagttgtttaacatttaaaatagttagttttgagtttaatcaccatctttaagtttttaaaaccgtgattatcaaggtagcaagatgccaaaaattccagcctgaaagatcatattcttatgtatctgagttaaagttgagggaattttaaaactttgatagaggtctctaggtcttggaaaatggatcatagggactgaaatttggtgttgttggattggatattattgttaacagcatcaaagtgagatgttggttgattgggtttattttactttatagcttgcccatgtgaccaagttagggaataacccacatattcaggaaagctgatcagtgttttagaaactcaattttatcaaccatagtgacattcattctccgattttctatgtttgtcctacactatggattctcttcagttactatggtttgatacttacatttcagttaattgatgcttttgcgatctattgcttaggtgaattgcttcaacatatttgtaatgtaattacaaggtggaagaaacttctgaagtattacctagcagatatagatgaagaggtttgtgcttttattttacttgattatagtaaatgcttgaattaaaatttattccaagatcctttgagctgaattcttgaaaccgttctttcatactattattttgctttggtgttgtgcttagtgcaaatgggtggaaaaaaattattatacttgatagacaattcagaaattcttaatagtaattttagctgtgcttcggatactcagtaaacttttttggtggggtggggttaaatgatactcttaatgttctcttcatttttactgtataattgaaaaaacactgtatgcatgtttgtttctgtttctacttttgtcagtgtagattcagagttctcaatcagtagttttttatctgttcgtggttttgaaggaatgctgattttgctgttttttagtttttgacagtctaatttactgcttaatgatatgatgtttttatttgactctatattggccaaacttgacagattgaggtaatactaagatttgaagaaatgtgtttggagtctgctaaagaattctcccccttattcactaaggtacttttgctgctttagtttgttgtcttcacaattctagctgccagcttttacagttggaaaagatatagatgtgaatttattttccacaaatcctttgcttgcattgttgttaggctaattaggagttccgccccctaaactttgagatgtaccaaatcatgcctccttaacttttcatgcagttaaaaattccccccgatttattgagattgttgaatgtaaagacttatgtccgattttattaatggaagcttgacgtggatgaaagtttggagttacaatttggtacatcggtgcattagtaaagttgaacagaattagatagaagtctttgaatccaacaatcttaatagttttcagcttaaaaagttaggggtgcataatttgatatatgtcagcttagtggcaaaaatcctaattagccttattcttactatcccctcttgattcaaaagcagaataatgttgcaggaatttactttcctgttttgctattgcaagccaatgctattccacttcgaaaatagagcttcggtttttcgttaaagcttattttttctatcattttcctaaaactctagaaagaattttattaatcttctgattattatcatatatatatatatattattttttctcttcaaatctatttcagatattatgccatttgtatgaccaagaaattatacaagaagatgctattctaaggtgggatgatgaaaagagagatgcagatgagtcggataaagttttcgtaaagcaggccgaaaaattcattcaagtaagctttattcttttctctttgcagccattctttttcctagaatcggatttatgtttaattcttcatttttatttctttgtatggtgcaactgttttaagtttttccttaaattttgcttctttggaacataaagacatggacaaatttttaaaatcatgcatgcacattttgaaaatggggaaaaataaatgtgggtcaaaatgattctcttatagctgtcataaggtagtggttaccatacaaatatcttttaggcttaaaactattcccggtcatgtccaagtattaagcatctaaattgatggcatacagcatatgctttgttgaccatggactgtttcttgtttaacattatagttcatgtttttgtatttatttttagtggttgagagaggcaccggaagaggacgacgatgaagaggaggaaggggatgagtgagtcgtaggggggtttatcgtggcgactcctattctttcgatggaggatatgagtcaagacatgttgatgtacaatttcttacagtggtaatattgtacaaaagaaaaattgcttactttgtcaaatggggctcctcttaaaaatctagaaaaattcggtggtgatccatgtaaaaaggaaatctcaaatttcttgcatctatcaattttgctcgattttgttctttttataataaaattttgttgtttttgaaagccacgtggagtttgatgtgagatttgattagttaaattcattctaatgtggcaatctttttattctatttttgtgaacttttccgaaagagctttggagttattttgtactgaggggctgggtggatgtgaaatgagcataatgcattgtgatgtaactaattatattctaattgagattttataattaaatgaagttacactagaaaaaaaatattaaaaaaatattactgtaataagaataataataaataatttttaatactatattataattgaattgtttttgagtaaatataatatttatatatgtattataatttagaataaaattattaattttacataaataaatttataaaatatatgtatataatttattaaaatgtaattatttttatatagaggtgtattttgttcatacgaaacttaaaaaaatgtataactaattataattttgagattatttttatttataattggtctaaattgagacttaattttttt

SEQ ID NO: 299865 - DNA, 1123 bp, Cannabis indica
ataaaaacaaatattttgatgattagatcatgaatgttcaattcttcttcccaaacaagcactggttttgatgaaaaatgattgtaaaggggcaaagatacctaaaatcttgttgggaaaagtaacaagttgattaaaatgacttagttggccatgttcttctcgcagcgctgagtccaacagtaacaaccatttgtcaaatggtcatcagagttggttgtaatgtctcaaagtttttcctcaaaacttcacacctctcttatgattgcattttagctctgattgccaccaaacatgaggtgtgagatctccaccgtttagtgctcatgcatatatggtgcatttataatatgtaagcatggaatgagtggatctaagcttggccataatgatttggttgtgcgatgtctgagacaaggaaaagagaaagaaggaaaagaagtagagaaggagtgtcgggaaagagaaagaaagaaataaagaaaataaaattaaatatttattaatctttgtgagtcccacaccatatatataatatatattatacttttcttactgtctttgaatggttctcacattctccgctcctctaaaattttaaaagtataacctcaagtcaaaaaagaataagtgaggatacttctcatgcatccttgactccctatttcttgagtagtctcatctcctctatgattcagccataatacattgactaccatattctttgtttcttaaaacctttgattctctttgcaatgatttgaacaagttattcttcattgatcacatcttcttgaagaagaatagcatcacactcaatgaaatgcgatggatcctaagtatactttctcagcatcaatactaagaacatattatgaatcaagaaatgcaattttttctggcacatataggaaattatatttaagttggaaattttattttagaacaacttaaattatttaaataagggaaatgggccttcacagttggggttgttcatgtgagggagggttgatccagtatgtcgtacccactactaatggcccctatcactctcacacaaaacccaaagaagaggaatttgaccttaaattaaataattgttattcattgaataagccca

SEQ ID NO: 299866 - DNA, 5079 bp, Cannabis indica
cagatctggtgatgaagacgatactgaaatcccttttagtctgaagtcaacatcatcaagctctgatctgcaactttggatcaataccaccaagctcaagatcacctgccatagaacataaagacgaaacaagaagaaagaaacgtaatccctaatcttcgatcaaaaaggttcgtcaacataataccaagaagttgtatttataccagctaaattaagaataccgaaatagacagctgttaccatctgaacaattaaaacccaaaatatctttgctgacgttgactaacactaacagtacaaatttcagacaacacactacgaatcccaaacgcaatttgacataattaatcactacagaaaatactagttcttatcggtaacattaaaaaacttaatttccttttaaaaaaatttattgtttttttatcatgacttacttttttttaaaataattttttttgcaaataaattagaaattgttgagtcaaattagttagaatgacatagttataataagaatataatattataattagttattaagtaaaattaagtattgcttaaaaaataatatttgtcaacaaataggatgtagcgaaaaactcataaaacattaatgtcgttttttttttgtaaggctaaacattaatgatagaatattaaaagaaaaaaaaagtgggaaagtatacgaagttcacaattctgtttctagatgtacattcattccttcatgaataatgttaaagagacttggtaattccttcatatattcctatattttattcaatttgcatgagtttactcgtgttagacaaaaatataaatacaatgaacttaagacaaaaaattcttgtttacatgtacttttcatgcttatcaagtatcaatattaatcactatccttggttgcttgtttccttgtggggccatattgtttagactaatatttctccaatccatttggctgttcaacacaacccccattttcttagagcttaccgtcatcaaaattcaaaatttagttcttcatcaatttggtaaatgtaattggaagaggttctttcattcatgtatgaagtattctatacttttaaaagttatgttattcaacattttcaaaactgtgttttggcaactaatatataggacccaaatacgtattaatatgtgtatgtatacacaacacattaagtttatgtattatgcttgctttactgtaatgtattaccttgtattctcagtaataaaaatatgttggagcaagaacaagaacaacattttacaagaacttgacaaaaatgaaaccataactagtcaaaagacaataggcaaaattgaaaaatcctatcttgatccattcagttttgagaaaccagaactagtcaaaagacatgccttgaaaggcaagtgaaatgaaggtttttcaggagtgagttcttatcctgctgactgttacacctaacatcctttgccttaatttttgataatatattataatgtttcaccaccatctgattatttttttattaacaaaattcaattcagttcagtatgtatctaatgccagagttgcatttaggtagctttttctttcccttgactgataacagaaaaataaattttataacttactcaattattgctttgaaacattatattatccctctcatctgtactgcactcaaccacaacgtcaaaatgactttgttttttaagcaagcctgtattgaaatagattttttgaaacaacaataaataaataaagggatgagaataagtggccaatggcttcattgccaggataaatagattttggaagttcatttatcacttcatattgatatgaaggaaaatgaggattttattagtgtagtagctaatttaggtgatgacattaggtaaaagataagaggaataaaaacttttaaaattttaagttacattaataactaacactcagttgatataccattcagtctctccaattggagtgaaacaattttgtttgggacatcagtgcttttgtccctcagctctcacttctctacaaattaaaggaatcaaacatacaattattgatgttcacaagacctatatatctatatgctaagcaaacttggtgtatttgccaggttgttttcactgaacaaaagcagtttttgtacagattaaagaacaaggctctgtctgtagctttatttgtttcatgtataattttctgattcatcttccagtaatttcagtgaagagagtatattgggtttttctagtggtttcaccatcatctttgaaagatgccggcatagatggccaaacaaatgcaggggcttcagcaggcaccattggagggtgttcttcccctttcagaaccttcaagatggttgtcatggagggtctttcattaggatttggatgacaacaagccaagcccaataacaaagtacaccccacttcatcttcttcgaaaacctcattcaatcttggatcaatagcactcagaatcattcctttgctgtaaagtccccatatccaaagtaccataccattggtgaagctgttctcctcattctggctccctggtttccttccactgatgacttccaacacaagaaccccaaatgcatacacatctgtctccatcgtggctcggcctgtgagaaatgattctggtgccatgtagcctggtgttcctgctatctccttggttgtgtggtgagttttctggctttgttgtatgatgcgagccaaaccgaaatctcccagcttggcattaaactctgagtccaacattatgttgcttgactttatgtccctgtgaagaactcggtttgtacaatcattgtgaagataatctagtgcctgagccacaccacatattatgctgagtcttcttttccagctcaactcaggtatttccattccaagcttgtcatctctgaatatgaacttgtctaagcttccattaggcatgaattcatacacaatgagaagctcatggctctcataacaccatccaatcaatttcaccagatttctatggctgaggctgccaattgttgtcacttctgatatgaactcttgttgtccttgtcttgaatccttggagactctcttaacagctaccactctgtctcccacaactcccttaaagacagttccgaaaccgccttttccaagctggttcttggggtcaaagttgtttgttgctcttctaagttccttcagatgaaacttctttggagtcatggatgagccttgaatctgatcctcgatcctcggatatgtcctttcaagatcgttcttgcaacaaggtcttttccagtacaaacaacagacaataccaattaccagaacaactgttgttgtcacaccaatccaaacccacttgatgatactatgatcctcatcaatgttcaaactatgaaactcccatgaaagtatgcagttcctctcggtgttgttttcgccagtggagccagaaaatccaacataaaccttctcaggaagatggtctgagagattgataggccatgtcaggactggactcttcatgttactctggctcatcacttcattggtcaaagaaacaaacacactgatgttgttcccatcataacggatttgaaccgttatattactgccactcgaaatgttgactccataatcagtaagagaaacttgtttgattgagtagacactgttcaaattcaaccccacatggttatcatcaatatcttcaggaaaactcttcctcgtgtcaaattccaccgctacaacacctgttttagacattgatgatccatttgtgttgtcgtttacaatcccaagccattttccttgactgtcgtttggaagggaaggatcagcagctaagataaacgacaatccttcaccaagtggataatagcttgtgggattgggtgagatgtttagtataaaagtggtgttgaaagaagtatttatgatcttttttcctttgctttttctccatactctaactggctttataaacaaggatcttccagactggtttatcaatcttttggggtcactaagatctggtgtaacttggatagcattgaatgttatcctagaattattacgaatcagaaaatcttcatcctcgtcatgaaaagttggatagtcaaaatccaagcattccacattagtaaaagctctactaaagagcactataacaaggattttagctaagaacaaagataacccaaggttaaccatgaacagcaattttctttttctttttgagaatatggagtttggtgatgatgacaatgttggaattgggtagaaagtgattataactatgtcaacttagtcgctagtgttataggaaatcaagctaagaaacttccaagtactctcttaaataattaagttatattctttgtttttggtgataatcatgtcttattattttatttatatatatttgaataagtctaaaagcatgagacaaatacgccataacaattttaaaaagtctatgtttagacatatattcactatcatcgtttgttgtcaaagtttattagtattagctttgatatagattaacggctcagattagtttttaagccagaaaagtgccttgagggtgcatatttaatgtttggctactcagttttacgtcacttcctaatcctacccacagttcttcgatattaaatttgttttaaaagtagatatcttgaatggatggatttttttttttggtaaggttgaatagatggaattttgaattctagctattcatgaatattcataacttttgattattcagaaataaattaaattttttgttttcttagcatataaatttggaatttgactactacttaataataaggaataattgcataaggcataattttttttgttaaaaaattatatttttatgttttaacttttttttttttatatttttacggtttttcataaaataatacgaaaataacaaaaaaattacataaaaataatatgaaaataacatttaaataacaacaaaaaataacaaaaaatcaacaacaaattaacaaaagtataacataaaagact

SEQ ID NO: 299867 - DNA, 6513 bp, Cannabis indica
acaatgtccacaatattctctctcaagatggtggctattttttttgctcacccaatcttgaaccgtatcaaagtggacatggtcactatctgtataggtgcggatcggatatgattacttgcccgcaagggatatggctctgataccatgttgagtatcatggggttccatctcaaaaccaattggcaatgagtgaagtagcccatgttcttatatatggctcaattctctaccatttattccatgtgggataatgtccacaataattattattaccaaatataaattataaaaaaaattataatagtatataaaaatatatgagaaaatggtaataagtttttttgcacatattttataattaattaaaataatgaatacaaaattgtaaaatgtcctatatatatttgtatttgtctttcattctctccatttttgggtggataaattatggtagacttcatcccaattttttatttacatttttgtgttccatcctttttctctcatatcaaacactcatttttacttttctctttactttctttctacttttctatgttaactttttcttaccaaacatagggtactaaaaataatgaattttaatggtgacaaacaaaataaagatcagtgtggtaaatatggaaggaatgattcttctaggacattataaaattttgtagttttgttaagtgaaaaatgaatttgatctgaagtaatatttatgaaatcatggttcccagaactccatgagcaaagacactgagcaaaatgcaaggaagaaaacattctgtataatgcataataggccatataagagcatttttaatggagtgcattaaagatagtgtatatgtattgtttagtttatctttataaatttaactttaatggtggtgtatacgtcggtaaaatttggtagatgctaaaagttttgttaaatttagcttaaaatataacatggccaaatttacactataataatgttgatcccaaatatttcggcctacttttccttattaaataaggaaggctcaaggcccaagaaggaatagcctagtccaactgcataaaaaatgaaagacttagctcacatgaggttttgctgatcatgacggaggcatgaaattatttttgtcgacgccatcaatcctttgaacaggaaattcgcaaaaccaaattagttagggtagatgcaaagtctggaacccgaaattcaaataaccattaagttggttacattgagctggctaaaaagttttcatgccttcagcagagctctactataaagagcacggaagtgtaacgaaaggggttggattctctctctaaattcaaattttagtttttctgtattttctctctctaagctagaatctcttttgatttagatatcgaagagtttttgctgaaaaactcccaggctctagcaatccaaatagaggatcaccggagaagaaagcataagaagagcttggagaagattcaaagggatctgcagtggattagagaatattcactttctaaatttagcaagtattcatcgatcaaatttttaccaaaacaaataaatatcacaatttttatttactcttttatcactcaatgtaattgataagtttttacattttatttatatgtttaatagtttacagatactttcaataaaatttaatatttttattgactttttaagttatttttaaatctaatgcattgaagctcaattgtaaaatttgagtcaaatataacattaatttagattttgagtcaaatttagtgtaaattttgcaccatctattggagattgtcttctactctcataaacatgaacataaaatcataatattatattgtaacttgctaaaaatattattttttggtcattatctaaaatactcttaattttaataaactattacttaatcaaaattttagttttcacacttaatttgagaaagtttcaaaactgattatttgtttatttattttcatattcaataaatatttttacaacccacatcttcatcaataagacaagtctttctaaatacaataaaaatcgctaaaagactcaaaacattgattctctctctaaaacaaaaatgatttgtcttttctctaggactaggatgctatacttgtgcatctcctctctcttctcgactaaggattgtcgtcagtcgttggtcgtgtgtctggcttccatggctaaggggaggacaacattttcgtgtgggtgctcttaagcagcatacaagtgttccttaggcagcgcaacttcttctcccttgtggtcgttctagagttccgttagaaatgtaggtcttcgatggatctacccagatctgtcagatcccatgatatccttagtccccttttcgtatctggtattatctccatgtgttttggggctcgaggggttttggagaattcatatatgatatcttttctgtttctttggctagacgctataggtgctattttggggttttgtctactcttgtcagtggagatctatgcacgacgttgtgggttgtggttaagttcatcttctcggttggtggggccctacgcgtggttatgtgggtcaacaaaataggtggcatttggtggtacggaggtcgactactggttatggggctattgtcgaatcttttggagggccttacgctcaaatccactagatttgtcaacgccaacagtgacaataacccctatgttggttaccgtcaattctctgtggatttggcctccaattgtggttggagactcatatccaagcctcttatgatacttgaaccgggacccttaaaggttgcattttttggggcttcacctaagcctcttatggtaagtgtcgtcctcatcagagaagaagaaggtgcccaatatcttgtgtattatgtcagcaaaagattagttgatattgaaagtccgtacccctaattgaaaagttaacttattgccttctgctcgcctcaagaaagttacgaccataatcccatcaaagtatacaccaaccagccatttcagcaagttttgcaaaagctagaagcatctggtcaacttctaaaatgggcaactgagctaggacagtatgagatcacctaccaaccaaggatagtaataaaaggccaagctccggcagactttgtggctgaatgcacgaacaatcaatattcaaaaatcaaagatattgctgagctagaaaagaggcaagagtaagagcagaagaaaaacccagaaaagaagcaagatcaaggccctatctggaaattacatgtagatgggttatttatcgagcaactctttagtgtagggattgctttagtaacctttgaaggtcagaaactccatggtgccatataatttagattcccggcctctaacaatgaagcagaatacgatgcacttactgttggactcaaattggcctaggaagtacaagccgaacacctggatatttgcagtgactcgcaactggtaatcaatcacgtgttcggagagtacatggtacgaggtgaaaaaatggaagcttactttagcaaaatcaaatatctactgacacaattcaaaagatataccataagacagatcccaaataagagaatgcaacaactgactcctgactcgcctagcaagcaactcagtagtagacaaggcaaaccttgtccccatacgttacctcaaagagccaagcattaactacctagaggaggttaatatggtagacaccgactcttcatggatgactccaattgcgacctacctcgaaataggggcacttcccatgatagaaaaatgaacttgaaagacgatgagaaaagttgtacggtacttaattctagacagagtaatgtataggcgtgggttttatttacccctcctgatgtgtgtcaataaagatgaagttgcacggctcctcacaaatgtccatgaaggattctatggaaaccatgctgggggcagagtctgtccaagaagatactaaggcaagaatatttttggccgaccatgataaaagactcccacgcatatgtaaagaggtgtgacaaatgacaaaggtttgcaaaaataccttgggcactgcctaatgagctaacccaaatgcaaagcccttggtcattcgcaatatggggcgttgatctgaccagccaattgccaaaaggaaaaggtggagttcaatatgcagttgtcattgttgattgcgtcactaagtggatagaggccgagccattagccaccataacttcaaaaaaaaaggtcctagattttgttgtaaaaaacaccatttgtcgatatggacttcctcaaaagatcgtatcaaataatggaacccaatttgacagttagatgttcattgaattttgtgccaagcacgtcatagtcaagagttttgctgcactatctcatccccaggaaaacaggccagttaaagcaatgaacaagaccctgaaagatacattgaaaaagtgtctggaaaatgcagaaagaaattagcccgaagaactcatacagaactgctgaaaggacagccaccggtcaaaatcgttttgcaatggcttacagctacgaagcaatgttgcccgccaaagttcaaccaccatcccatcgaatgagaacctacgagcaagccaccaaccacaatctccttgtagaatccttacaccaagttgaggaaagatgggaccaagaaaatcagattctacaagcctaccagcaaaaggttgccagttacttcaacaaacaagtacgggaaagaaaattctttgaaggagatctagtgctaagaagggtgttccctaacacaagagatagtgcagcaggggtactcagcccgagctgggaaggactgtaaagtgatccaagtcacaaagtctggagcttacaactggctcgatacgacgaccaaatgtagctcgtctcagtacctagatactggaacggagaacacttgaagaagtactaccaatagacgtcattcttaaatggcgtcttctagatgggcattcgtccaaaagctttaaatcatgtaaatgctaaggtccgacgactacatatttttgcataataattaaataaatataagttactcatgtaacgacacattccgaccaattattagttaagcatgattatttatcattcatatgtcatttattactataatatgtcttgcaaataattagtgattagtattcacgaattgcctaacatgtatacaataagatgttggaaaatctttaaccaagatcttatttactattcaagtatgttaaattaatgcaaaattaacatcctaatatggaaatcctaaaacaaaaaattaaacacataaatgattaagaaaaccttacaacggttgtaactgaattaattgactccttccgttcagttctctcactcttaatattattttttgttgtaaagtgtgatcaagaacctgcatgagtgcttggaccttggcatgagtagcttataactttaatagtttaattgatttgctaatttaattaattaatcgaactaaataaactatatttattgcggtatattcgatgactactcatcgggagtgtgcctcacaacttctttttcatataccatcaaaaatccatgtggtgctaagagaatttatgatggacaatagttctaaatatgttttttttccaagtttcacctaaattactaatgcaattttaaaattaattactctttgaaaactaataaacataaatcaatataaacaatcaatataagcatcaaaataaagaattagaaagaatacttatttataaatatagggttccattaaattcacgaattaaaggtattttaaaaagtgaagaaaaaaagatgaaactaatataataatctctcttcaatattcaattttcaagtttcgtgtttttcactccaaaaaagtgttttttacatttagaattgttctgatacgaatctttaagtaaaattaatgaatatttaataagccttataaaattacttatatagatttgattcgttacattatgctgatatgtaacgcttgttatccaatatatttgttttgatttaaccttctacggtaaaatttacaattttttttgtacgaactccaaataagatgattcaaagatttaaaaaacttaaaaagtaatctaaaacttctatttctatttgtgctttctacattctgatgagaacacgtaaaccatgtgagaatttacatagtcactagtttgatgtgtgtgtgaaggaatggaacaagagttcaatttattgtttcatgaaaacaaaatgtaatacaaaagcaaatatataatattagattattagattatttctagtggaaaaagtaaaaaattgtgttttatttggaaaaataaataattataatatatttgtattaatttttagtattatactttaatacaaaattgtgaaagagatatttgtagaaaaaccctcttaacatttgtaattgttacacatataaccctaataaaa

SEQ ID NO: 299868 - DNA, 3309 bp, Cannabis indica
aatgggataaaaacgttggacaagagagctggaaacatgctcaatcaattcatgtacgtttatggatgttttcgaaaacttgttccaggtgttcgtaaaacaacgatgaaacaacataaaaccaaccattaaataattgtttccaaaaaactcaaaattgagtttttgtaactcctctccaaattaaatctttccccaacatcccaatacccatttaaatgatataattgagtattgtaacagtttctaacagctagaaacttatcctattaattccataaccttcatatgtaataactcacataattacatgtgatccttaagttacaatctattttcagatttgtaactcctcatatgttataacttttatgtgtattattatactataattgatataatacaacctccaacacataatatatatattaatctcatattaatatataatatgtcacatttaaatattttaatctatattatattatatcaaataatataacacaatcttgaaagtagtggccgctactttagagtccatctcattgcaaagtctattgatacccttgtctcaagaaacctgcaaagacaagagcaatagcacaaaattcacctttcagtacccccgatatatatctttacacaaccgcttcatccacttgatcacaactcttttgaaacattgcaaagccagcttccgattgtaccatagaagcatccacctgaaggcacgaaacattctcatccataagaaaactagaagcaggttcaattgaggaaggcaaaaaaatcttcccctccagtgaatgcacaacagaaaattctcgaaacgttgaatgtagtttgcaaatattgcatcaaagtcctatctaacacccttgtgcacaattgcattctgccatttccaaaccacatcacagacacaagctacaaacaggttgagatcatgatcaaataagttgatctaccaacagccaaaacccaaaggtttgttccagttgagacagtttattctcaacccccacctacttctgaacaaaataccacagatagtaatacaatgatagaagaaattcaaagatgtctccttctcaaatttacaaaaaatacacatctaataaagggcgctgaacctctataaatcaatgtgtcactttaatgtttgttattatagtttacacatggtgattatcaataataaataaggctccattgttagttggctcaaattcaaagttagcattttgtttctttcattgagagcattattcgtcattcttattaatcactatggttgtaaataggagaacaaaaacctccacttgcttgggtcttccttaagatcgtatgacagatgatcccaatgttcaagttcctcccaccgcgaaaggtctcactgattcgactaacaccgtcaatcctgcaaacctcacaaacccaacaaattcaaccaataccactaatcttgttgaacctgctaactcgatgaatcttaatgatcagcccttgctgcctaggaagggtccaccaatagcgcctcaaacagaaggccctaccaacacgaaaaaacctccgcaaaacacaatgggttgtttcacattactacgcaggagaaacaggaccatgaattagcaaacaaactattggcgatctacacgtggacctgggagacgacattaagatggtcaggtcactcagacagaagaaccacacgctattggttgcgattctcttacccaacagagatgcaaattcataaagtaaatggacgatgaagaggccatcctttaagaccatcaggcaaagatgaattgtcgtaatagggaagctagtgacctaataaggtagttcaacgagataacagccgaaagaggccaagatctgataagagatcctttgtaacgaaggctcatcgacaggtcaagtagggtctacaggcaggtatacattggacaaatagtctaaccaggtctctcgagcatgaggacagaccttcccttgcctgaagatggacaaatcttgccagacagaccatatggcaagaacatcaagttcctggcactaggaggttttaaaggatgacaagacaattcaggagaggggaccttgccaactgcctagaccctaaccgaccagcacaataatgccctcccctaaaatattcgggaacaagttattctaaggcctaattttaacaagctaggcccatggataagaaaaaaatcaaaggataataataactcgagaagcgagaattgaagttactttgttccaccactgaatagtaattttagacaggtggatccaccaaaccaaagaaatttgtacgaccaacctcctgtcaactcacaaattggccaggaaagtctagcaaatttggccagccaaggaagggtaaccaatcatgcagagcttgcccactaagggaaattgtctagtctagggctggtcggccaaagctagatgcttagccaagggctggtcaaccaagagcaacaaccttgccaactgctcatctgaaggtcccccagtgagacctctcagcctggaagacatatctgcacaaagaaaatagcaatgttagaaagcaattataatcattcaaggcatggcaagaatatggtgtcattaactatcaaataccatcatcttcggaggaagaactgtcaaaatcttctacaactgcctttcccttgcctctagttgtaggtaaggggcgagcgtgtccctcaaaagcctgacctctaggtctaattccgagagaagcatcaccaaatggacccccgctggccaagcaccagcgcagggccctctccttcctcttcaaattctgggcaatgtacgataaaggtacatcatcatctaagtcaggaacttgtccatctgcaagataggctccctctataattgggactctcacaactccagaagcaggaggatataaaccatacttctagaagttagccacactggtttactagagcatgtttctctgctccacctagagagacaagatgtggcttgccttgtccggcatctgtaatgtggggatggagcgcttaaaaaaagacactctctgaaagtgtcgatggtgaagaaaagctccacagcctctagaatgcaccatggtcagccagcctgctccctacaagtgtatgggtggccaagagaagctctacagggttttctgtacacttctacacgtggacagcatgatttaggctgaaattgggccctaaaagcccaatagaatagttgaataatatctatgttcaagggtatttttgtcttttgtaattaattaattta

SEQ ID NO: 299869 - DNA, 4209 bp, Cannabis indica
aaaataaaaaaataataaaaagtgaccgagttggcgggcgggttaactggtgaccataaaaaactaacccacgaacccgcccaaaagtgtaccaggttgaacccgacccgcccaaacagaatagatttttttaatttttcaggttggccgggtcgggtctgggcgggttggccagatttgggtcaaacccggtcaatatgttcagccctagtactgattggattggatgaacacccctatcaaagcatctctaaaatgatactctctattcttttagctaaaatagctaaaaagttaaaatattggttaccaccacctatagaagattccaccagggataagagaccattgtcttttcttggcttctttttatcattgttcccaagaatgttggtcaccaccgcatttattgttgaaattatgaattgttagtctcccatgagcctatgttcataagttttgacatagattttttttttttttgttattattgtcaacacactcttaaaaacataactctagtgtctcggaccaaatcaataaaatatacagtagacgtagtcccattactatcacaacatggggtgaactactataaatcttggtgtcttatttactttttgcagttttactttgtcaaagtctaatcagcgcattcctctatttttttacgatcttcttggatcagttgacaaaaaatcgtgtcaacagctggattacttaatgctcctccaaaaaactacaccaccaccaagagtgaacactgatctagaagtagattttctactatctttgtcgattgaaaatcagaatcaatgtatccattaagtttaaggttattacctgaatatactagtatatagtctctcgttctcttaagatacttaagaatatacttcaccgcaatccaatgttccaaacttagatttgactggtaatgactgacaatgcctatcgcataacatgtgtcaggtgtagtacataatatagcatacattaagctccctacagaagatgcataaggatactttcttatgtgctctttctcttgaggtgccttacaacattaatcttggcaaagagtgattccatgtctggtcaccaattgacccttattggaattttgcatggagaacctttcaagtactttatcaatataatttgcttaagaaagtatcaagagcttgttcttcctatctcttaagattttaatgcccagaacatagctcgcttctcccaaatcttttatttagaatttgtcagccaaccatttctttacatttgataatgttcctacatcattcccaatgagtaagatatcatcaatgtaaagaactaagaaaatcacaacctttcttttgatgtatttataaacacgtgattcgccaatattttgttcgaatctatatgttttaatagttttattaaaggttaagttccaagatcttgatgcttgttttaatctatatatgtatttcaacaacttgcacaccttttgctcttgatccttctttttatacccttttggttattccatatatatggtttcatcaatattaccattcaaaaaggtcatcttgacgtctatttgtcagattttataatcatagatggcaactatggacaagagtatgtggatggaattaaacatgactattggagaaaatatatcttcataatcaatacctcccctttaagtgtagcctttggcaacaagccttactttataagtcaccacttttccatctgtatctcttttattcttgtagatctatttacatccaatgagctttacatcttcaagtaaatctacaatatccttgactttattggaatgcaatgattccatttcttgatccatgacattattccatttatcaacttcagggtcttccattgcttctttaaaaagtcaatagatcatccttttatgtatttgatacaagagtgtgtgcctctaattcatagcgcacatgttgtcttacaatcctcccattatgacgttgcaccagattttcttttttcaagaattgtagtttctctggttgatttatcattaactgatgaagaaggtggagatgaaatcttacctgtcattagttcttctataactactttgctatgtagtttatagttattcatatagtcatgttctaagaaggttgtatttgttgaaacaaacactttattatcatctagactatagaaatatgtgttagggtttatgccctaaaagcaagtatttattggataatatattaaaaaatatatgaaatacaagtatacgataaatgaatatgttaattatagaaatataactaatacatgtatatgaaaactatatattcatatagagtaggtatgatcttgtaaggaagtacaaaagaattaaaatcatacaatatgaataaaataagtcggtagtgtactaaagtacaaaacctttaatatggaattaccacgtacgtttactaagcccatactctagtgcgtgtgatttgatttagatcacatatgtggatagacacttagtaaaggtactatgtataatttgattattcatgactagattgatatgaactaacatcttttatcaacgtgtcgtttatcataaaagagttattcatactacaacaatgatcattagtagatttgtatgactcatgagtattcatgtaataccctaaggttaagcaattagattagcaaccctaactagtttaattatgtattaatgtggaataatgttatgatataatttaatatgtgaaactatactgataaattgcattttaagatcccgttggtgtactaagggtatttttgtaattttgacccgagaagggtaaaaattgtaatttaatgatatatcgtgcttataggctatattattatatagtacgtgtactctatctatctgcaggtattttttgacaagttagcgcggtataatcacaaccaggtattttggggccgaactggattcggagcccaaaatacattttcgggatttaatttggtgtggacatgaaaattgtggaaatttgaaaataatgtgttatttgtgtgtaacttaaatgactaatttgcccttgagtgaattgaaatgcttattttggctattaggggtattttggtcattttgaccatataatctattttcaacaaaaacaatttttgaagagttgaaaactcattttctggtttattcccatccctaactgacctttctctctccctttctcatcttcttcaagttttattaattttagaaaaaaataaacttgaattagaggtgaattttgtgtgaattgtggcttgagacttgtataattatggtaagctcataatccttctttattttgaatttaatttttggtgtttaaagttttaaaaacttgtccttgatgttcttaagatgcatgatgttgtgattttggaggttgagtaataattttggtatatttgagcttaaggatgagtgatatttgcatcttgattgttttatatgttttggttgagtttaggattgagtttgaggtttgaatttctgagattatgctctgattttttgggtatttttagttggtttgaagctttatgttcaagcatgtgtaattgagaatttgtattgatttttggaacatgcttttatgtatgagcttatattttgtggttctaatgcctgaaaataccttgatttagcatggtttttgcttatgtatgacttaggtgaagttaggtttgtgtttgggcatttttagacttcaaaaatgggatttttgggcgttttgaacctagttgtcgcgactggattattggtccctgcgactaaggttggcagtgggcatgcctgtttttttccattttattttggccataacttttgactcgggactccttttggacattctttatatcgttggaaagcttgtttcgagctataaatgttaatctgtaaatggaatgctagttatgtgagtattaaaaatgaattttgggattaaccctatttgtaagatctgaatgtgtgactaggactactgacgcttgctcaagaacactcgaggatttggaatctccgcatacttcagataccaggtaagacagtagttagcaagagagttaagcgcagtggcgctcatgtttggtattatggttgtgattaagtgagaaatcggaattagggttatttgttgggttttatgc

SEQ ID NO: 299870 - DNA, 3968 bp, Cannabis indica
gttccatctatttttgattcgaatgaccaagacgggtgttgctcaataaccccgcaagaaaaatgagcctcattagttggaatgctcacggggttagggagttcccaagcatttcgtaatctctcccttctagttaattaacatcgacctcaaattctttctgtgatagagaccaagctagttgttaactcttgttctcgatttaaagctcgtttgtcttttgataatgtttttaaggttcctatgaatggtgtagggggaggtttgtttattttctagaatgatgttgttaatgatagtattttgtcttattctatgtatcatatcgactgccttgtttcttttaatgataatataaactatcacttatcatgtttttatggttctccttatggtaacagtaagaatgacttttggatgttgttcgactgcttataggattcttttttgtctgctccgtggttaaaaataggtgattttaatgacttttttaggtcttataatgatcataataactctaataaccccttcttatgctatccataatttttaaagttttgttcataagtttgatttgcttcctttgcattttgttagaaatcgtttcacttggaagcatggtaatcttatgaaaagacttgattggggcattgttaataaagcttagactaccatctttcctaatgcctccttattttatctttctttttttggttcggatcacagggctatataatgaccttaataatgttaggtgttcttctgggaggtttttcttagaatcattggcttacggagccagctttttttaaacgtgtataagataactggtcttctaataactctatctctaataatagtaatgatttgatgagttttcttaacaagcattctttttgtatacacaacttgagagattggagtaggaataagaataactttaaaagtaatattgagagtttgcaggttgctattgacaatatttacatgtctcctgttattactagtaatgatattgctaaaactaagagccttcaatttaatttaaacactttgttatataaagaagagttttttttagaagcagagttttaaggttaattggctttatgttggggataaaaatacaaaatattttcataacaaggctccttctaggacaacgaataattttatcaagtctatcactttggataataattctactgttaatagtttataggatatttttgacaattttgttcgtttttaatcaaatccactttcttcttaagatgttgatattgactctattaatattattctctcaagtatatctaatagtattaatagccaatagttctattttctagccaaaccttttgacaattgtgaggttaaacgagctttgttttagttttatggggacaaagctctgggccatgatggtttaaactcttatttttatcaaaagaaattgagctgttattggggattatttttataaagcagctctggatgttttaaataatggtgctaagttgactttattaatgagagatttcttattttttttatccctaagaataacaatgcttctagaattagggattatagacctattagtttatgatctactatctataaagttatagctaaggctattgttaatagacttaaatctatccttaatgaccttatcgcccacaaccagggtgcttttcattgtaataggattatttttgataatatatttatggctaatgaggttattaatgctattaaaaatagaagaagtagtaaaattggttgggctgcactcaagttaaatatggagaaggcttttgagaaagttgaatgggtctttattaggcacattctcaataagtttggctttcctattaatcttgtttcccttatattacgttgtatttgtactgtttcatttaagctttgtattaatagtcattttcatatgtggtagctgagggtctttcagctgccatccgtactaaagtgcattctaatagcttccagggtatttttatttgtcgttctactctctctatcttctacttgttatttgctaatagtcttcttttcactactgttactcctcaaagctgtaagtctatcaaagatattcttagtatttttaataaggccactgatcaatctatcaactttgctaagtcttttgcgcttttctcgccaaataccactcctcaggatagagctcttttccttaaatatctaggtcttgatgataaatctttcattaatgaatacctttgtgtgccccaatattttactcattcgaagaaagcttcctttcactatcttcttcaaagagccattagtaagctttctatctggaacaataaactttttttctagagctggtaaagaaattctccttaaagcggtcaacaaagctattccttcttatgcaatgtcctgctttagactccctttgtctacttgcaagcaattttaaaagcttatggctaatttctactggggttcaatgggggaataatcacaggaaaatatattggaaaaaaggtctcttctttgcaaatgtaagttatttgggggtcttggttttcgtgctattgttcatcacaatcaagtcgtgcttgctaaacaagcatgaaggattttcatgaaccctgattccctcctagccacacttctcaaaggcaaatacttcaaaaataatgactttctccatgcttcccttagtcactatccctcatttatttgttgaagtattctttggggaagagaccttctttgtaagggcttaatttggaaggtaggaaatggaaaatccattcaaactcttagtcctaattggatctcagatttgagaattttatcttataagaatgacttttctcctcctgaagatacggtctcttactttattagggaggatggattttgggatgttgacaagcttagagttttcttctcagataatatggtcaattcaatccttagagtcctagttgctcttgctaacaaggattgcctaattttggagtaccatccttctggaaacctcactataaactctgcgtatcaccttgctaactcggttctttattttccttcttcttctaatcctggttttcttaaaagttggtggaaaatagtttggtcctccaagataccttctaagattaagcactttttttttggaaagcctttaatcatttgctttcatctggccataatcttttcttgaaaaaagtgcttgataacccttaatgctctatttcctctcttcatgttgatactgttggaatatattttaccaggacctagatttactaacaagtatgattttaacattctaaatatgaatttctaaatgaatttctaaaacgatataaaataaacacataaaaggtatgagaaaccttacattgtttggagcggaattaaatgactccttctgctcagatctctaacccttctatccattctgtagcagagtataatcaagatctgagcccaatactccttcagttgattggattctttacagtctttcacactatgattgaggaccgacttgctatgggtgggcatgcactcaatcactaaggctacaattttgatggtgaagaacactaagaatttcgaaatagtagaaagaaaagaagaagaagaagtctcaaaacactagttttctgacagaataaaaactagagttttaagcattagttggataatgatacctttcttttctttttatactaattcacttaggattaggattgaattatttggaataaacaattataaaataatagcaaaaataggacttagtggccgacccctatgtgggtccatcactagatagatttttgctatttctctcaaccatttatctatttttcacaaataccactttttggaatttcaatcctatatatgccaaaaatatttatttaatatttaaaattaattatcaaata

SEQ ID NO: 299871 - DNA, 3759 bp, Cannabis indica
aatgagtcttagtccacgagtcaatgtattaatgagagtatttactactgagaattttctgaactatctctctttttatacatcattgggatatttataggctcataatggtggtaaaaagaccactattatcctgtttgtatgaactatgtttttcacaatttatcaaatctgatcttagggcatgcttgcctacttttatggtgtgtttgtgttgttcctaagtgtttgatgagactagacttatcttttatgtatgacttgacaactcattaatgcagccgtcaattaatgtatggggtctcgtgaaatcagcaaatcatgagtttgaatccttaaacacatttgttcaacgtaaagtgtcaaatgcttttttccatgctgcattaaatgcatacataatgttttcttcctcgagcagtgtgttatactccatcagtcctcctgtacccttctccaggtcgacttcacttgtagagaagaaaagacaaaaaatattcgttgtccagctagaccctcccagagatgactaatatgtcattacttttttgaaataatagactttgagagtaattagaatggcgtgtcccgtaacatgggttccattgccacatgactcgctcctaaactaccacgtattttaggagaaattataggcaaaccccaagttcttttttacaatttttttaaaatgggacttgcgatgtgcctcttggagtattgatgtaatgttgtgctagacaattttaagtgctgctcattatttctttcgtttttgataaaaacaattcaatttcttatgtgactttgatgtcctaattaattacagggtgtcaaattgatgcttgagtagtgtaatcgtccttttctgtttgttaatctgacagtattgttatttgttagataatggggtttttttaatatttgaattaggattgttggatagttgacgatccgtgttgccctaacaagtctataaaaactcttcatgcttgtgcttcaagatttttattctcatatctctcaaaatcctaagccagttaaaattttaaacaacccaaatttctttctactttttctctaacgttgcccagctcagttttactggggttttgcaccagaatctgcaactacccgtacttcttctatttgtatgtttcgagtcacaagaactccttcttttcttgttttgttgctgtaatttcatttgttgatatgcttgcatgaatgtgatgttggcactatatctacgatttgggtaattcccctagaccgtccttaatttccacttttaggcaagagtttttcatgttagggtttataggatgttatttgttcttttcttttctatgctctgcaccattgctctttatcatggtgcaattagcaccaaatgcataacatataatttttttctatttctgaacatgcttgcatccggagggggcctcttctcagcagatatgggaccccctttcccttttttatttagggtttgacatgggggctaactgatgggtgaattcttgttttttcatatgagtgacatcctgaaggatcttcataaacatggttttgcgcatccgacagagaaatattagaactttattctgaaatcaaaatgtcgaatcatggagctcatgacacttcctcttctcaggctctggccctacagtacctcgtggtgcctctatcagtagtgattcagggtctagtcccagtcactaactatgtccactgggccactgattgggaagctgaagatttgcacttgttaatgagatgtgtccatgacttgggcactatcgtggatgagaatgaaatcatgccctataagactagggtttttcatcgcttggcccaagaaaccgaaacccccaaccacaattatggaggattttgtgtgtgtctatcacttgggcactatcgtgtatacttagacattacttttcacaagtgatatggatgtgaccactccaaactccaccaagactaacctttaaaatatgacattgtaggtcatcaaacaatccacactatgaaagtagtatttgaaggctatcgaagaatctcccaacattcccaaaagcttaatctttcctgatgggatatagatatctccagagaagccaaatagtgtgaaagtgcatgaaagaaatttgctaaccaccaacccaaccttatcaaaggatttttttgaacaagatgttcgcaaagctgtgattgtttaccaaaatccttgccaccttgatagctatttgagtttctgttaccaaaagatcatggtgtgagaaatgtacaatctaagcatctcatccgtgaaaacttgtcttgtaaaaatacacgaaaattatcttatagacttttttagttttgtaggacttgctccgtaccaactaatccctcaggggtatcgcctgttatctggccttttatttttattctcttcgaggttggcctactcccagccttgctgaaattttgttttttttatgaactattttctgtcccaaagaaggaggacaggcagaaagatgacttttattccctttaggcccattccgctaacaagacttctgtcttgttcaacttccagaagaactttaaggattttcgtcaccagttcttcttttcctccagcttcagggctttcgagcatcttgacctcttaactgagtggacccaagattcctccattattcagaacaaccatttttgcaactctttccaaggaagagtataatgtaggtgatttggtgatgaatgccaactgtcaaatgactagactcatacaagggcattaattaatcaaggacaacaacctgtcaacaatgacgtgtctgaatgctcaaaataaagaggctaaaaaataactctggctggagtatatccgggaggcatagaggaagtattaggcttaccggaggatgaaagaacaggaggacctttttgcccgttcccagagtgcggtggaccgaaaaacaaggaaaaaggcatacaagaatttggtggcttcgagaccaacatttcctttccctaactttggtactcctggagctagtaccttgggtactcataagtcctctttatcttttcattatatcccttttggtcaggagttacttagattacgcatggctcatcctggtagggctatgggaaaaaaagttgtatacttttgcaacctcaaagcttcttggataggtctcggatgggtactaatcctccaattccaattttgttggaccattcatgctaccttaccacgagttggttcctcccttcaaatagtttcttaggagatgacgacactaataacattatttttgagtttgtaagagcaaaattaggctgtttgggtaggactagttctttcgtatattttatccttttgatttttcatgtaaatattccttacattttttcttttcagtctatttctaagccaatggacgcaatctttgcctcgttagacgctctgagtcccgaagaaggtagcacccttctgccaactaacctttcaaaggacatagtgactccttgaagtccaaacaaggcaagggctgcagatttcaagatttcattcgagatttcaagcaacttcctctgatcataacaactaatgggatctgaaatgaggtggtttaagcttcccacgagatagactccttatggctaaagatgttagattttatgccctaaataaaactccatttcaatgtaatctattttattcaacatcaataaagaaacaaaagt

SEQ ID NO: 299872 - DNA, 1211 bp, Cannabis indica
taaattaattataacttatatttttatttatagttgaaagaattttgaatttttacaatgtcattgatgtactttagtatacaaaacccacatttgattcccaatattgttttacgcaaaatcaattgtttactccaggagacattccacgtaacttattggaacattcgagtgtttgatcgaaggccctaaattaattatttagattagattgaattacctatagctggtataaatttaataaaagttaattttaaaatgaaaattgaaaagtaccttcggagcgtgtagtcaatactattctcagggcatttatgtccttttcaagaatttaagtgaattgtcttcatgacacaaactatctcaagcatctaatgctgaataatatataagatcaaataaaaaaaatattatgtgctaatttaaaaacaagaatgaaactatattttaaataatctataaatagttgtacttactcgatgttccatgctatgaagaacatctaggattcgttattcattgtactcaaccattctaccaatttgttaacaacttcttggtcaccttatttgttggcgttgagaagctttgtgtcaaagagcttgaaatactcccatatattcgttaaatcctttcagatgcatctacataaattggttgagagattatagtacattttaaaagttgggcagaagttttcctataaataagatacgtacctaataaacagtgtagtataacttctgaaatatttaaaagaacacagttcaaatatatacattaacatacctaattcctaagaatatgcctataattacatccaatattatccaaagtttcaacatgttatatatcctccaatcacaaggcgatatgtgtgtgatgtagcatgaatgcacgatcaactggaacttcaacaatgtcatgcacaactttcctcctaagaaattcttgaaccaaaaaatggaggcatgtaggtatttgagcctagacctccgaaaggaatgttgcaacctcctctactggatctctttcctaacattcaattttaatccagccgaatacatagcaggagggtttgatatatgtttctcctttgacgatgatttgtgaggggttcatatctgttttcccttcgacgatgatgtataagttgtagcggtatttaggaagggaaacttgaaattccatgcttaataaaacaaaaaatt

SEQ ID NO: 299873 - DNA, 1705 bp, Cannabis indica
atggcatataaatactgtgtagcttgtttgggaaagtttttagacaaggatttgctaagttgtaaggagagctcaggctcttgaataccaggagagttcattaataccagtaccattttcatcttcttctttctttcttttattttcttctgttgctgaattaattgataggccaaaacctattactaaattttgtatttcaatgtgttatcattcaatatggtaccttgaaatcgagttcaccaaaatgtttttgggtaattagtacttttttcttcgtaggatactagaattggttattgtaaaaattctcacaattttctggtgcaatggcagtgcataatgttacttagcatctaaggcaagaaacacctgtgcaagcagcttaaaaagcaaataataatattagctggtgtaactctagaaactgataaagtttttgttgcaatgaccaataattttgccaacaataataagcactgcttaatggattgttaagtattgcaatagctttttctataatgggtgaaaacaacatgggtaaacaaatttgatcaaactgcattgaaacaaatctttatccctttctccttgaatatgataatacggaaaagtgcaacataataacctcaaactattagttcggaagtttgtatctaaagggcttatgggcacatgcactaaaaatcaaattgtgcatatgccagttgcaagagggtgccatggtccgagctgagtctgagaaactgaacttagccagaagataccttcgaggtggccttcgcatcttcttggaccatatattctctcttcatttcttctaagacagcatcgttggtactgcaaaaattgagagcatgtcaaagtttatagtatatttatataattaactaaaagtatttcatgtctattttggacatgatgagaatcgacatcctgtaccaaaccagctagctagtcccttactgagagaatttcttacagataaacataaagctctaaagacaatttgtgataaggaaacattctgcccttaaaaaaataatggccaataacatttttgttaattttagatttgggaggattccaattaacaaaaacatattggatcctctgctgaatcttttaaagaccctacagtttttaagaagaaaggaattcaagcatattgctagttgaagcccatgaaaaatcaaagtccaaaacacatacaagcaaatcatgtgcttgaacacctatacaactcatggctatgagccatgacatggtgaacatatgtgccaagtaaagacgccactcagattccctttctcattagcttatgcagcctagtgccgtctagtgtttccttatagaacaaattcatgtattataaaagtattaggctaagacaaccaataccatattataaacaatcttatcaatcacaaccctagcaccaaccatttcaaagaaacaaaaacaaaaattaaattcgaaaattcggtaatttcaagcaaggctaattaggatttttttttccccgaactttgacatgtacaaaatcatgtcccctgaacttttttggccgttaaaaatttctcctgaactattgagattgattgatttaaggacttttgtctaatttcattcaattttactgttacagtgagtgattgtttatgtactaaatcatgctccctagatttgatatttaccaaatcat

SEQ ID NO: 299874 - DNA, 1339 bp, Cannabis indica
gattatatatatgaagggcaccaaagtattcacatatctaaaggttataattaaagaaagcaaataatatttgttaatgaattgtgaatcagatcatgtttatttgaagttattaaagtgaaactatatatatagcttcatacatgtgaggttgtgtgtgtatacatattatatataagttttgttgcattatacgtaggagattttggtgtctatatatactagattattatgagatggagaagccgaccaaaagtatctgtgtatggttttattttatttttttggttctcccttctttagtactttggtataaatattaatattctcgagtgtgaaattaggtatatatatatataggacaacaagtgtgctattcaagttttagttttactttgttttattttcccttttgggtatacttggagtgtcagaagaggattaaccttttcatcaaagatatatattgacatatataaatatatttataacaatactattggttttatcttttaaggtgaaaattctagtaagggccttccaatcattaaacatagcaaatcactttacaagaagattactatatatctatcttatggtctctatagctaattatattgattattaatacactgccacatatataatatataacagttatatatcatacaattaagttacaattccaaaactcagatatatatatatatatatttgtatatgtagtgatgaacttttagactacatttgaaaattacaagccggtacaccaaccactttaattataataactgaaactgactgagagagtgatcaactgtaagaatagtaaacaaataattaatattaagactgcttatatatatattatgtatattttattaaagtaactgattttggagaacgatagttttttttttttggatgaaaaaggatggtgtggtgccacgtacctttattggttgcagagaaaatatatatagtcactgcaagttggcaagaaagaaagaaaaggtaataaagcctaaagagaaggaagaatacaacgcactcccacgccttcacatatcgaggaagcttctatctttatatatatatgtccctaaagctaattaaaccccatctataatatatatgtactcattcctctttcattaaaagctcataatcatgatatactatacaaacaatgcatggaaaatatatataattaaatccatatagttacttgttgagaaatgctgaaaggtatcggtggtgtgtgtttagcagctttttatgtgttattattgttgttggtccaatttataagtatcgggtctcatataatttaatgtaa

SEQ ID NO: 299875 - DNA, 4224 bp, Cannabis indica
atgttcttttagaattgtcattttactcgtttgggacttaatgttgctacaactatttaattttctatgcttatgcagagatcaagtcctttttttgtgcttgagacgagcaatatatgctcacttaacaaaataatagagaagacattgacttgggggtatggttgatactaacataaaagtttgggacttaaaatgtgaagacacttaagtattggggactaatgagaccaataagtcttcctaatgctaatacatgttggagagaatgaggtagtatagagaatcagaaaaccaagaaagggtctttaggattagtaaaatggatgaacattctagtcttaggtagatgtaatttttatttcttaggggtaatagccaaagagctgagatggaatatttgcatcagaagttagcatctaagggtgggcaatcttaagcatctataaagcttgagtgggccttgacagtgtattaactttgaaaagaaagataaaaggcttctgtaatagaactaattattcttcttggtatctcttttaccattctttacttatgttgccttttctcattttcttgcttcccttcttaaggcttttttcatgtgcacatatctatactatatctatacatttacaagtactatctttattattattggtacaaagatggaaaacttgttttcatgttcatatgattgcacagtgtgagtgcaatggattcctaacttttaaaaccctccagtccatgatgcaagatcagaagatctaaacttgatagctcattcctcttatggtgaaactttgggagtaaataattttgaaccattacactcccaatctctattcttgtattcagcacaacagaaaattttgactgttatttgattatgtgggcaatgatatctcttagccacaaaaattctttgctacatttttttttattattacaactggattttgtttctcttacatctatggaaaatgagtgtgtctcaatactcattgcttgtcatgtacacaatggcattacccaaatcattacctatagtcatgtgatatgtgaaacagcatgtattctatgatttatttcaaccttataagcaaatgcatattcacttggatatcttttcctttattctttggaaaatattattattaattttaaaatgtattcccaaaacattcattatttgtatattagccaacatagttcaacattggcatgccttctatatgtcatggaagaattatgctgtgtagtacatgtggagtaccatgtgcatcaaatattcaagcttgtggtcctagatgagttagaaaagccatggaagaaaaaagacccttttttaatattatttatttcactttagtagttttattatggaatagagtttagctgaaattgtgcaatgaatcaccaaaatgggttggttttctttttttcaggacaatagaagaaggcttggaataattatgcaaaaactagtttgtgagagtatggaacactacaaaagatcatcctatcatagagctgtgctttcctctgtagtcaaaacctactccactatcacctccatcattagtttccattaaagactaaaattttagagccataacatggaaagactgcagataccataagggcatgcaagcaatcctgatcatgttgataaagataataataaatgaaactccttaaaatgcacctgttttttactatttaatcactgtccaatatacatgtggtgaaaatgtgaaccattccacttaaatggcaaaagagttttcatagaaacctcaagtctttttgtcttaaaagaaatttacagagaaaaaagtgatgtattatggaataccatatatagctagcttggccttttgcttggattcaaaattaccaagtgttatattttttaacaagtcaataaattccatgattgactaaactgtcaaattctccttgttacaagccaagtctagtaaaaataaaaagaagtagaaaagaaaagtaattgcttcaagtaagagatctactaaattgttattaaatgaagaagcttattaaaaacctaaacagctttgccaattgagcaagttagagcaagcaaagacatgtattagtaggtctctttgtcacaattcaaacgttctttgacagataaagtggcttcttcaaagggataaaagagaacaaaggggaaaattaggcttttaagaaggaaaaactaataatttgctcagaaaaagaagggtccaagctagtgattttttttttctttgccttagaaacgtgattcttcttcatcatctctacaaagggggggccagagaccatgcttgaggaaactatctttaacacaatttgctcttaaaagcaaggaattgatcaaaaccaaaaggactttattagttcctaatttcacacctttaactatttctttttacaaacccatgtaaccaccaacactcaaagatcttttttttttggtcactggtgactgcttcaagaaaattgaactgttaggtttggaagttctataaaaaactctcgattcccttgttccatttttatctagatttccatttcagcatacataatgcaacttccagttttccacttagtgagaactttaagccaaactgggcaacttcttttccagagaggcatatagtactaatactacatatatgtataattatatatttatatgtacataaatattcaagtgaaaaataaataattgaacggctcatcttgtatttctaaaagttaccttcttcctagtcaatctttattgttatgctttacacatagttactaataaatttgtcagttctggcaataacatagaagaaacataagaaatgatttattattattctttaaaagtttgatacaaatgttggtcattttatgaaatttaaagagtagtctatgaagaaattaagaaattatagtgtacatattttattgagatatgctataaataattctatgaaaaataaaataaacattttattctctgaactgtacaaaatatctagaaagcaacaataaggttaagtaaattgcacctcaagctaaaaggacttgatgtttttattttcatttatttattgtattggtaaaaattaaaaataaaataggaatggttaaattggtaatttaggcaagacagtgtataggagttaaaagtaccaaaagagtataaaattaaatatttttttcaggccacccaacaaaggtccccaataaatggcactatttattgtacacatctaatttggggagaaaaatctgacagagttcattcatatctgctcataataattatcaaagataaaagaaaaacaataaaacaaaagagcactcaccatgatcatattcaacaatcttactacccttttttaacccctaccaaaagaaaaaaaaataaaaaaaaagacaatggtaagaaaaaatctaaagccaagtgaagtcaagccagactacaaggtgtccaaaagctaaatctgaagctttgagccaagccatgtgaagataattttttttttcttttattttttatttaatttttttggggttgcattgtatcacagtaagtcacaagactctatataagtttatttatttatttatttttaaagttaacggcttgttaaaggaccaaaataacataaaaggaccaaaataaagagagaagccttgaaaccttgaagagtttatatttctttcttatttttttcttccttctcttctctgccagtgctccttgcactttgttttagccctttatcctctcctctctctctctctcttaccctgaaatagaggaagcagagtcacacagaagagtttaatgtccaacccaccgcttcttgctttcattttctctctccaagactgaaccttgttgttggggtctcaactttctctgctcagtgactcagaactcagttgtttctctcatttctcagtgattcttagctaaaggaaaggaaagtcaccaaaacaaagaaagaaaaagaacagagaagagccattttgtttgtgaaggagactcatttttctctcaactcatattctctctgtttcagctatttcttgtctttagagatctaccaccaaccaactcttatttcattttctcttttcttattctcttgtacctttgtgtttggtgcattttgagttgtaactatgagtaaagaagagtttttg

SEQ ID NO: 299876 - DNA, 1934 bp, Cannabis indica
tgtggtaaaatagtaataaaatataaaagatgtgtaaaaaagttggtttagccgtgtataggtattaatgtaataaatttatcattttagatttttagtgtaaaaatttctcttatttatttaaatttaaatctaaagaaataagatcaggtatgagaatggaaaattgagtaattaatatttgtagttatatagtgtgagaaaattagatgccttgttgtaccacatggcttcagatggacccactaatgcacacatatatttatgtatcaatatataaatttatataatggggtcccaaaatggcaataattgatgttgcaatgttgccggtgaaagtgattagattactatgttacaaataggaatctaatctatattaatatcaataggtcactttcgaagagccatcaaggtccccattctcacacacagacatagacatgtatataacattaaaaaaaaaatccaaattcctacccttttcaataattcaccatcaacccaaatttgggttcatttatatatatgtatacatacatatattttttttaaaaaaatttattatatatatattaagtagctattctctttttttttattattataaatttttagttaatttttgtgtttaagaatataaattgaaatatttttttaaaaatattttttacaacaatatttgttatacttacaatatcatgtctataaatttttaaatattttacaatatagaaaataggtttagagttttttaacacagtgtaaaatagaatatcggaaattctattttcagtactgtagactatttaatttttttttaaaatttataagaataatattattattataaaaaataccgctatgaaaaaaattatttcaacatataattttgagtataaaaattaactaaaaaaattataataaaaaattgtaattaatgtttgtacatacagttagtagccttacaccataaatattttgtgattatcatgagtatcatatataaattaaattacagtagaacctttattcaagaatacacttgaaattaagaaaattatattctaattatgagattataactaaatagagttacactagaaaaaattcaaaacaccaaaaaatatcaatgtaacaataataacatatcataatagaattatttttaaataaatataatatttatatatgtattacaagttagaataaaattattaattttacgtaaagaaatttataaaatatgtatatattttatttaaatataattatttttatataaaagtatattttgttaatacgagacttaaaaaatatataaaattaattataatttagaaattatttttatttataattgactcaaattgagactgacttttttttataacaaattaaaaattattcttcataaaatattgttagatagaactttctatgctatataaattgactagctcgaataattttgctataattattacacataattttgatttttattacttagtctacacactcagtacagtattcaaggcagttatatttgtggtaccctatataataatgtagcaatatatatatgtggacctctatctctctcattctatatataagaattgtacttaagctttcttctcttcggtctttttataaataaatattttgattggttgggtttagtggggctggctgagtataaattgtctgtataggggaggtggttgcaactgacacaacaaaaagcccagacacactactatattgatgtcatctcaatggacaaaacgttacacatacagtgtcacacaccacgtaaatttcatatttcaccccaaaactaagtatatctcgatacactattttcgtattttcgatatctagaaatttaatcttatttttttttttaattataactatatatatatata

SEQ ID NO: 299877 - DNA, 1475 bp, Cannabis indica
aacatgaatcttataaacatattatttaaatatatattatacagtacattaaataacaaacaataaagagtcaggcagaagaccttagttaacttctcttttactattcccactcttcctatgaatgttattacatacagaaaacttaagtttttctacttaatttctttacctcgaatgtggagttctagccttgattgcaataagagtgatccttgaaaaccaataatgagtttcttatgaaaaacctaaattttacacttattaattagaacatatcacaatagtatatatataaatatatatacacgagaccttaactttgaatctataaacccaaaattatagaatgatataccttaattagcttccaatgagatctagttgagcaccaaaacttgaacttcaaatgatagatggtgacgctaatatgatgtaagatatatgagaggatgatattaacttagtgtcttagccttgagttaatagggacaagaaaacaatggtttgtgggtggtgtttggttttatggtgacatattaagcggagctaaggcttcattctaaaatgaaataagtgaatatatgagggagagaataattgcaagagaattttggtatgtaaatccataatagagattggtgtgagctatgtttacactaatgactcctatttatagccttaagctttagttaactcaccctaagctatatcctttaacttatgccacgatccccatctaaccatagttaaactttataaagctattaaattaagcaattagataaatatattcatccttagcccctaactattcggtcaaagcttcagtaattccccaaataaatcgaattgaagttagcaattggtttttgatttgttaattggtgagagctttatcctctctagttcccacgtatacaatcttactagactaggttgtataagattctccttaaacttctaactatccttagtacaactattactactcaataatgattataaaatcttttcctaacttaataatattaccatatcaaagcacatagtaatttcaaataatccaagttataagaacgacacaatgcctacaacttgaaagcaagacttactcataatttgccacctgtacaattttaattttatgcttaattactaaccaccccattacttgtattacacacatatactgtatggaagtagcttacaagcaactagcaccaatccatcaaataaacccatcaatttctcaactaatttaaaaatctaaataattcactataatttactatatcatgctacacgtgcatgctttccatgcataacataaaatcactataactttattatcgtaaatttaaagaaggtcactcttttactaatttattcatctattcactacttccacatcgagatatctagactattctaataataattaaataagtaattttaataattgagttattaca

SEQ ID NO: 299878 - DNA, 1543 bp, Cannabis indica
  modified_base (181)..(181): a, c, t, g, unknown or other
agagaaaatgtgaatccatacacaactgtttttctataattaatattcaattcaagctatgtaactttttattgcatattactttttgacaaaactatcaatgtgtcacacaattatttttcacagccttatctaatcaaatattttattaatttgatattatagtttttttttttttttnttttttacttttatttctccttcgttacaaagatgtaatggtaattacgtattttatgaaacaaacaatatccacatgacattgaatttcaaggaaaaaagaaaaaaaacagtaaaacttaaagagtaaaatattattacaaattaaaaatgtctcgaagcaacgcctaatcattcacacctccaaaattatgattgaggctagaaacattaatttattcaataatttgtccacaccaaaatgacataccaattattttaatcttcatactaattttcaaagcgatatttaaatatgatgatgatcatatatatagttattatatatatgatcaaatcttcttaggtgtataaaattaaaatcacaaatactttaccactccaacaaagaattctttttattggaccaactaaagggtcccattacatatttttggaagtatcttttaacatttatattttatttttattttaatttttcttttttttttaattggtaagttaatcttgtcttgacacatatagttgcactatggaaaatgatcaaacccatcaatttttgtcgatatagtaataaataaaaattgtacaacgtgtttaatgttagaatcaactaaatttttgtgcttatcgaataattgcttatagaaaattatttaaattgtatatgtattatgtttctatgattatttaaggtctaattacctagataattaactttatttgagtgtttcttttttcttgataatgtaacattaatttgattgaaaaatatcatcatgtttcatttgattgatttcttctccacataaataaatgacattaattgaagatttccttttatttcgtattttgatttttttttttacttataatttttccatgtcataatattattaaattgggatggctgattcatattaatttactaggttattttaatttttttaaaaaaaattaatatttaaagttaaaattaagaatattaaaattacacatgctaatattaaaaataataatattacaaataatatattaatatttatagatttatatttgtggtgataaacatagcttagtagtttgtcacttctactcacaaagaggaagtccatgttcgaatccccctccccgaagtaaataaaaatatttatatgtatttaaatgaatttaaaattagtataagttcaatcaatctaaacaaataatattaatatttgtatatatatttaaattaatttaaaataaataatattaatatcatatatattaataaaactaactctattaacactattaaatttaacgaaatattcttatatttttagaataatctattaaaccaacaaaaattattaaatag

SEQ ID NO: 299879 - DNA, 4990 bp, Cannabis indica
ttttggaaaaatatggccacataggataattttttagtgatctgtcattgccacgtgggcaaaattaggacttaatgaagctggacagacgacactttaaaaatgtaaacgaaatagtactttagagggttttctcaccaaaatatgaggttggatgacttttttgcaagtaaattgatagttgagggagttttgccgcaaattactcttattattattattattattattattatgatcaaaataaatgttgatagaactttatttgaatcacttaatgaatttggtgtgggacgtatagcttgtgttaatggtggcctagttctggaagcctttaatgtgaaaaaaaggggccatatcaaactaaaaattgcaaaaattattggcatcaaagaggttttaaattggattaatagagacaaatgagatcgagttctgctggaaacgaacagtttaatatgtgtctaaactatttggagtaattacatgtgctttcaaaatttgatttgttagttcatgactgtaaaagtctattgaataatttttgtaatatttaataaagtcttgttgaatgatttacaaacaaagttgtccattaattgggacataattcttatttctctctaagtcatattttttagctattaatttattaactggattaatgaaagttatccttttattgaaaaaataataatttaacaatcttaacattcgcaattcattcaaaataacagcataccaataagaaaataaataaaaaagaaatacacaaggaaattgaatagtattaaaatgggttttgcaatacaaatacaccccacttcctatacctacctatccccaaaaatttgatcattattacttatcaaacaaaatatgcttttatatatatattttaaattagtggtaggtataatgtgactattgtttaaaccaattttaaattctaaaagaaaagattggataatatataataacaaattagagtgattatatattatacatacttctattacaactacaataacacaacattcattaatcttaatcttatattattttattacaacaacacatctaatttatttctaaatatacatgtataataatccaaatgcatagtcaacacaacaacaattttcagatcatgaacgttaaattcaagaatttaatccaaaaaagaaagaacagacgtatgtatcaagaaacctaaatcaatacaataacaaccacaaaaatcttcaaaataaaattctatgcttccaagtaataaacacattaattattaagtgttattatgacctttttttttcaacgtacaagcaatatgttattgtggacttttattgtgattttagaaagaaaaaaaataacaaatcaatcaataaatatagtttatccaaagaattattattaattttaaattgtatttttgaaattttcgtatggttaaaaattacctaaattattgtcattatcaaattgtgtttatttatttaaaactcgtaatactgtgtaatacttgtaatgttttgaacattgttattgaatattagtggtacattttggcagtattttaatattttagggcaaaatataattagagttttttacggctaaatcctctcaattattactcgacttgcatttaaccatttaagcttaaattttgacggtaaaatcttacaaactactgatctgataacaaatttaaacttagagagttaaatgcaagtaaaacgacagttagaacgaaatgatataattatattaccttaaaataagaggagacactttgatagtgttaccaacttgagtaaaatttttgaaaatgtaaaaagaatcagaagacaagatcgttgagtagtaataattcaaaaacgagttaagcaaaaaaaaaatgatgcgaaatgttaaaccacaacataaatttaacaccattacatacaattattgatgaaattagaattggatttcactgtatatttttgattgcaaataaatatttaaattttattttcgatggtaataatactcaagttatatttttaaaaatgtaagtatctaaccattaagtataagttaataatcacatgataatttttaattattccatattattaaatttttatttttaatttaaaaattaatttaaatataccaataaaaaaataacactagataatataacggtcaaatatttataaaagtttcaaaaatattacttgtaaaaaattaaacttaaatatttatttacaactacaaattaaactcaaatatttatattaaaaattactctaataattataatacaatactcataaattcataagttaatgacacttctagttgttttttaaaagcatttcataatagttgttatttttaaatatatatagatagattatatctatgtccaatatgaaccgccaatcaaatctctttgtttctccgccaaacctttatctccaacatattccttttcacattctttgaatcaaaatcaaagctttaagctttaaaggcttttaaaccccaaaacgacaccgtctctctcatcatcatgactcaaaagacaaaatctttctcaaaccatgataatcatccctaccttacttctacttcttctcatgtctcaatcatcatacttttttctttgtcactttcctctgattttttctctacctctcaaaatgtaaagttccaatttttatttgtatctacctatgttttggccactatcaaagtggttatgattattatgatgatgatgatgatgatgaattcccattagtatttttggttttccttttctgggttttcagtttcttctgttgttatggctcttattgagtcttttgagagaatattagaattagaaagacccatcacaattttgggagtgtgtacaaatttgtttttacttctttctcctatttgggttgcttttattttaggtttaatggttggttgggcatggaaacccaaatgggtaagctttggaaaagaaaatcacttagtcttaacctcaaacaattctccattaaaagaggtctctatgtccccttctgaagatgatgaattcaggtacttgaaatctttaatctttattgctcatattaaatatttttatttggaataatcttttccctgaatttgtgatactcttgacattcccaaatgaactctttttcaaaaactaggcttcccacctaattttattttgtaaatttttgacctttgttacttatgtcaaatatttctaaactgttttagttcatttctagagatacccttttccctaaattgtaattttaaaccagaaaattataatgatttctatgtagttactcaggaaaagacttgtcctcaagttttgtaggtgcaaacatgtttgattgtttgagctatccttatttgggtgacattcccatatgaatttagttcactctaatgatgaatattattgcataatttcaattattagaaatttctcattagcttttattgcaatgtggtaatagtgtattggagttagatgaaggggattctaatcttgtaaatgttgaggatttggaacatcttttccaacttgtggagatgaaagatggaggccctacttggataccgatgatggatcgttctaacccaacgatgagctacaaagcatggagaagagatcccaaagtaagaagactatttccttcacttttgagattagtcttttaaagacaaaatggttgtttaactctatgatttgtgcattgcattgtctttggtttttcggttagactggtcctccccaatatcgtagtagcactgtgtttgagaatgccacacctgaaatagtaagggactttttctgggatgatgaatttcgatcgaaatgggatgatatgcttgcatattacaaaactttaaaagagtgtccaaccacaggaaccatgcttgttcattggataagaaaggtagtattgttagagttagttaactcttattcctttcattcttgtaaactatgtttaacttatttagacttcgtgttatgggaaaatgcagtttcctttcttctgtaaagacagagaatacataattggtcgtcgtatatgggaaataggaaggtcatactactgcataacaaaggtaaaaatgaactagtttcgaactctacgatcggtttatttttttcatattgataatatatagaaattaaacaccatagataagatgcatgactactcctctcattgccaattgattttgagatagaacctcatgcaccttaccatacactcacatattttactaccctaaccatacacttacgcattctaacatggtattagagccaaactaaaactttaacgagtaaccgatctaaatccaaaaaccaatccaaaaagacgagccaaaagagtcacttgtgattcggggatagtgaaccaaaaagagtcattgtgagccaaaagagccacttgtgattgagttgtgcaagattggtgaagcaaaaaaaaaaaatagccacaatcttgagggaggatgttagaaagtctcacattgataatatatggaaactaaataccatacataagatacatgagctactcctctcattgccaattggttttgagatagaatttcatgcaccttaaccctacacttccccattctaacacacactgaaagtatttaccaatctgatgtggttttttagggtgttacctgttcttccatcccaaggcgtgacaaaccaagacgagttgatctgtattactcgagttggtgtatccgagcaggtaagctattatgtcattctgcttcaaattcattaactttgtgttagaaataattggggtcacaattgtatatataaaatgtgtgttaggtcatcaaataaataagtcaaatttatgtggtctattttgaaataaagtttatgacttaagggcatgattgtcatgattttaatatgtggataccaattaga

SEQ ID NO: 299880 - DNA, 3059 bp, Cannabis indica
aaataatcaatacaatcaacaatataatcatagtgtaagtggtaaaattctcttatatcaactacaatgtttatattgattattataagttgaacatgttataattttctataagtatgattattgttttaaaataaatttaataaaactatatttttatgtaaatttaaaattaaaaaatatatataattaaaataaaatttttagtagatataaaataaaaagtaaaaaaaaattatggtttagagttagatttggagttttgttacctaaatctatacaagattaattataaaaaaataaatatattaattatagtgtagttttcaagagttaatttgaaccattagattaaatcaaatattataaattattatttctattgataggtattttacccaatacctattctaatagtccccataaataaatatatatatcgatcgagatccatagaacaaagaaaaagtactagaaattttatgatcaaactggaataaccccaatcaaagttataattaattgaaaaaattgagctacacttacacgtagtacaccaaactggattcccaaaactttgattttaatttgttaccgtacgttcactttaattataacggtaacaaactaaagcaaagtgatacaacaataataattacaatatataatcccacacaaacaaacaaaaaactcaaacttactaatcattacatgcatcttaattggtttggttcatcttatcactcctcttcttcaattattaaacgatcgattgatggagaaatttataataatatattgaaagaaaaaaaactaattaattaattaattaacgaccttgcagttgagcctaatttcttggccactaccatggatgctactcatcttgatcatcgactcaacgaaggctttatcgaagtcttgtttagaagcagcgaatttggagactaaggccttagttggtggggtggtgagtagagattggtctgaagagaaaatactcttgccttgcagaagtagtttgtagtaggcattgtcgaatattgtcgacgtggaatccaaggtggtccccgcattcttcactttgttgtgagctggacaaatatttctcaggctcgccccaaacgacgactgaagtgtggggtcaacgtccacgctggcattgaatttgtggagtctgttctggaacgatgagcagtgggcgaatcctagtgtgtgccctcctataataattatatgatcataatgctacgtacgtaatagattattatatatgtataaaaagctctatatatgtgtatatattcatacctgagagagcaactaaatctttaagggaaaggcctcgttgagcaaagttttgttggagttgagagatattgaaggtgggagctggtaattgtctggtctcacttgcctttgatattctcccatcttttctgccttttggtaccttccaagtaggacccccagactaacgaaaacaccacaccaaaaaccttattaataatggtaaactaacaaaacaataacaacaaaaataaacattctaatatattaaattattaacatttccacacaattcaatctcttgtttaataaacattctatctaagaacttactcacctgtctctaggaggccatttttttactaattactcgtcaattaatttatgagtaattggtgaaaataacgattaaagttttcgaaaagtgttttcaaggggtagaaaatagtagctctcttaaaagttaaaagaatatataaagtacaatacgtactgtgttactcggtatttaaattattttttcttttttgtatattttacaaaataattttctagacaagatgtgaagaatccaatgaggtgtaaattaaaattttaattataattaatgacacgtgtccatatgtaagcttttttttttttttggttagattaattgaagctctctcaagattaatgcctcgaacatattttattttgagcttagcaatactttaattatacagtcctgatagcaattctgtttctatcatgtacaattcaaaagtagttgttccatatatgtaatttatatatatatgtgtgtgttaaaattaaaggtaagtaccagagcaacggcatcacgagcagcaagagataatatatcagcacaagaaacgacaccaggacacatagcttcaacagctttcttagcattgtcaatgacataaaacgcatgcaatgaaatgttaggaggcccatctttctctgctttgtgttttttcgttgaatctagcaacactgacgcatcacacccctaataatataaaaccaaaattatatataatttaatttcataattaataataaaagaaattacacaataaaacgacaaaaaggcaaaatttacgtactctgatgaagcagtcgtgaaagtgcatgcggagcagagcagccggaactgttttgtcgtttgacatggctttctttacagcgttggcaaccacatactctacatgtggacacgtgtcgtcgtagtaattcaagctcagtgaattcacggcagatgagattgaaagtgtgagaagagcaaaaactagtagtgaataagctagggttgccatggttttatcttttcttctttttattaagtttgatatttatatatgtgtgtgtgtgtgtgtgtttgaaagtgtgagaattacttggaatgggaagcggtatatatagcagaaaaaagtcaagagattagagacttaggagagtcgttgaagggatcgatgatcaatattgtggttgttaatacatttggtgataaagaagaacacaccacaccaccaatttagtggagtagtattcttaaagcaattctcatcatataaactaaattagtcgagtcgtattagttctttatttgtcgttttttaacatgatataataatgattagagcattgctagtgtggcgcgtgttgcgattagaccccataatgatttgtatcaaatttatttaaatacaatattttaattataaataatttttttttattaaaagtcatatttaatcacaaaa

SEQ ID NO: 299881 - DNA, 1434 bp, Cannabis indica
atttttaacgactttaaaagttcaaaggactatgatttggtacatgtcaaagttcagggggcaaaaattttaattagtcttatttatatttcaaatatagatatatttcgtattttttttaaaatatttagtaaaaaactctaaaaaaaaaaataaaaaagaaaaaaaacaattataaaaaaattagtaatagtaattaattaaaagaaatagaaaaaaaatgattaaaatttgtatttataaatggtttttattagatatattattcatttttaagttggattaggatggaatagaattatataaaagagtgattgattctttagtagtttactccactccacacgtgagagccttacacatgtgagagtacaagctatgttatcttcaaatttattttcaatttcataaataaatgatatgatccataaataatggtgtaatgcctttaacttgtcctaattataatttccactgattttgttgggatttatttattactcaaattaattattaagggagacatagtggagacataataataaaataaacttttattggttgttatgtaaaataaaattatatatctaccaagagacaacttctcttttcttaattattagtgcatatatgataatatatttagatcataatgattatataagcactccaaaaataaataaatattatatttatatatgtatatgtatatgaagcttagctggatttcatttggtgtaatatagttgttggagaaaagcttagctgtgagtgattatcataattgtgaggactgtgttagtcggcatcctcttgtgtagacaacacatctatattttatatctatttatactatataaattattgttgttattattgaattatttaaacatttccatttttatttttactaaaagtagtgtttggttgtttttggattatatttctaaatgctaatggaacatctattctttagtttttgttgttaatgcttttcttctttttcttttaggtcttataggtaggtataaccctaatatatatttatatttatatatgtataggaggtatgagattgaccaccaatatcataatacaatacaatcactttcttatttatttgtttttaatgttccttaaaagaagaagatgagttacctttataaagctttgactcaaagttgacttatattgtaatgatgattatttgttgtgtaaattggttaaaagaaatggtaataatcttatctcaaatttagaacaataaactaaaaaagatgttcttaatatctgttgttgatctcttctaattatatcttttaacactatagtggtgtttgttttagtgtaatgataatcagggctagttctaggtatatgcagattagactcgtacttaaggtccatttattttaggagctcaaataaaaaaaa

SEQ ID NO: 299882 - DNA, 5255 bp, Cannabis indica
caaaaatttcaatttcaaaccagaaaacagaaaaaagaacagagaatctgaccctgcaaagtgcacaccccaactttacccctacacagaccactagaccagacctatccccactaagcccaaaaaagaaaaagaaaaggaaaaacaaacaaatttacagatgaaatggccctaacaaaagtcattttgtttttatttttttaagtagtaattattaagtactataattttatccaaaaaaaaataaattgtaatagattacatttatgttcccatcatcaaatgcctcactatctataaagtatataaatatataatatttttttcttttccttgtaatggcatcatatatttgttgagcttagaagaaagattccaaaatttaaaaaacccaaaacccagacaacagaggctataaacgagaggtagctttcatggtcacgacgacttcttcgtacaaatcgcgtttttggatttcgggttctttttcttctttccttttcaggtgggtaagtccaaagctctcctctccttgtttgtctcgccgttatcatttacccttgtttcttcgtcattttcaactctgtagtagtttattgtctttatgttgttctcattttcttttcagtatgcttaatgaaaaagaaagttcgtgataataataattgtattcttattgtattttatggtctctttcgtttttggatctcatttgttgcttcatgctataaaattgattttctaaaagagtttgttctactaatttttaaactagttttttaagagcaaagtctttctgggtccttccatctttttataagaagatattattgtcacgtgtgacatttgagtattccatccctgcaagttaactacatgtgggataattatagcttttacttgctttgcatcattgggaaaacttataatattacttttttattgcattatagtctgtaaaagaaatgtggttttctttaaaggacttgtatcaactgaataccaggtgccccatgtgaaagacatagctgataagtgatttcatttctggggaaaaaataaaataaaaattcctatagccaagaaccaagtttttgagacaagatgttgtgtgcttgttctggggagcaatttaaattggaagagccaccacagtcaccggagtcactcgccacaagagacttctcggcgagtggtctttcctcaagaactggagactgggaatcaaaatttgaagacatccaagtggatgaagctgaatcaactctaaaagaagctctttcactaaattacgaggtgggtcctaaacattctgatgttctaattactgcagtgaaactaaccagcttttgttgagtttggtgttttttgatgaactgttggcttgaaatattgatcttacattatgtgaacgcattacaggaagccagggctttgttagggaggcttgaatatcagagaggaaattttgatgctgcccttcaagtatttcagggcattgacataaaaaatttaactccaaggatgaccaaggctattgttgaaagaactaggcagagaaagccacgttcgaaaggtgatgttgtgcctgctggtataatgtcaatgcactccgttagcctccttgttgaagcaatattacttaaggcacggtcgttggaggaactcggaagatatgtaggtatgaacatttctctggggatggttttcttttaggcctttccaacacaaaattatatgttctgagttaaggagattatttaggttgcttggaatttttcaaggcaaaaccatgtcttataacaatgagtgtgtctaaaattggctctgatttgtttttctcaatcatcagatgctgcaaaggagtgtaaaataattcttgacacagttgaatcggcaatgcctattggaatgcctgagggtattggtgaagactgcaaattgcaggagatgtttcataaagctttagagttgcttccatatctctggacaaaggcgggttttcttgacaatgctattacagcatatcgcagggctctggtcaagccatggaacttggatcctgaaaggttagctgctgtacagaaaaacttggcatctacattactctatggcggtgttgaaacaaaccttcctcttcagtatcaagtatggggtccaactacacctaaaaacagtgtagaggaagcaatcattttgttattgatactcatgagaaaggtgtcatctcttgaaataaattgggatcaagaaatcatggatcacctgacatatgccctttctgtttctggacaattcgaactattagcagatcatgttgaacagattcttcctggagtctatagccgagccgagagatggtactttcttgctctatgttatagtgccgcaggccaagatgaagctgctataaaccttttgaaaaaggttgcgggcaattctgaagcaaagcaaatgccccactttcctgctttcctcttaggtgcaaagctgtgttctcgagatccaattcatgcaaaagaagggattgagttttctcgtaaagcaatcaatgcggtcaataatcaatatgaacatttcaggggtcaagcccataacttcctcggtgtttgttatggcattgcagcccgagcttgtgtgtcagattccgaaagacttgttcttcaaagggagtctttgaactctttaaaccttgcagtccttaatcagaagaatgatcctgaagtgttgtttaaccttagcctggaaaatgcggtgcaaaggaatctggaggctgctttcgataatgcaatggcttatgctgatatagtggttggcagcactggacgcgggtggaagctattagctctcattgtttctgcaaagcagcagttcaaggatgctgaaaacatagttgatttcgctttggacgaggctgtaaaaatggaccaactagaacttctcaggttgaaagctgtgcttcaagttgctcaggagcaacccaaacaagcaatagaaacctacagacttttgctagctctggttcaagcacaaagggagcttcaaactaagaagtttcagcaagtgcagaacttagattccgaggtgtgtatctcatatttatcttatgtatttataaagccaagtaacataaatgaagtatagacatggtttcagcaaaccatttttctgtaaatagtaaaactttcctgtccattcttatatttgtcaatgtttacttttccttcaaaagaagcagctcgtactcaatagtctttggtactagataatgagttgctaaagtcattttttcttcaagtaggagtgagaatatttggaaaattacgttatactatgctctgagcaaagttagagtatttccatactccatatggaaatgtgacattattttacctgaaaaaccttctcaaacttaaaatcatcatctcttcaggtattagcagaaagaaagttggaaagtgaagcctggcaggatttagctgcaatttatacaaatctcggcttgtggcctgatgcaaaaatatgcgttgacaaagccaagctaatcgagttttattctcctagtagttggcatacaacgggtaggattctgtccctgttatctagtcctttcaactattagtaatacactaattgtaataattgtgcatctcaaatttcaggaatgttgtttgagacacaatcacaatacaaggaggctcttatttcattctcattctccttgtcaattcaaccggattatgttccaagtatagtttcgactgccaaagtgttgatgaaactcggtggccaatcactcccaattgcaagaagctttctgatgaatgctctacgattagaaccgacaaaccatgaagcgtggttgaaccttggattgctttcaaaatccgaaggattattgcaacaagcagcggaattctttcaagctgcccatgagctaaaaatgtcagctccagtacaaagcattgcatgatgatggctttccaaactatctttgagcattaaatgttacaactaagagagagttcatcagattggattttatgaaagaagaaatttttcttgctccatgcactcttgcaaggagtgtcattcattcctttgcttttgaaagaaaaaaaaaatgtatagtagccctgctactgctcagtagcttttgagtagcaatttacttggatgttacgcacacctttgcttgccatttaattcattttggttaaatgtatagcttttattcagtcctggatgcttttctgtagcttttagtttgtgggggctccttttagtagccattttaattgcatcattctttctggttatttagcttgaccataaaattgaattgatttttccttttcctttttctcttcgatgcatacaaaaggaagatgatcatatatttcaacagcaaaacgaaaaaagaaatgcatgccacgtgttataacaatgttgcgtcaaaaacactaacatgtacattattccttttggaaaactttagttatgcattctttcttatagagcatattgacaaaacatgccaaccttaaactttaaagcaaaatatgcctataatttttaatattcttttagtttttattcaggtttttctttatttttttatcaagaagaaaatgatttcattaatcacaagtaaaatacaaccaaattttacagaacaaaacaaagggcactacaaaattgccccaaaaccaaaaccaaaaccaacaacctagttacacattttctcaataaatctctcaacctgtatagaatgttttctatttttttacaatgtataatctttgaataatcacatttttaatttctttgacaagataattttctcttctcgaaaaaccttcaaaaacacacacatgtttcggttcatccatatgctgtgaatacagacagcaagtagagcatatgaaacagtgggaatgaagcctgtttttctcaaagaaagccaaatagtccagccttcaatctccaacggccagactttaaaacccacccgttgaaacactaaatcagcaacattttaggagaataagcagtcaaaaaagagatgcatatggcattcattaaagaggccacacacaggacaaagagtaatttccaaatggatagcaaactttgtaaaaagatctcttgtgagaagtgttagaattattattgtgtactaatataatcatgagcttaataccataaacacaatcattaactatgtgccccatatttgttcattaccataatgg

SEQ ID NO: 299883 - DNA, 2139 bp, Cannabis indica
actacggaaaactattttcagtaccagtttctttattccgcatttaattaatcacttaattaaataattaaactgggaacattaaaatacggaatttcattaagaaagaagataatacaactaagcaaaataaaagagacatatggaaaatccataatagtttccttctcattatatcctgatcaaattaccttatcaatattgtggagccattattttattgtaccctatcaatatttttcctttcacattttgcaaaagctaccaagaaataattactccaaataaatttcgaaagataataataacagaacataaaaaaaattaaaacttatgaggaaaaaaaagttctaccaactgttgagagacgtcatgcttctgaagttgccaattccacaaactcgtcagtacgcttgttaacaaatggttcaaggtgacttttaaaagttgttagaagattttcatctctttccttctacaatgcctgcaaatcgatgagaatgaaattttagtagttatgattatagaaaatccaacacaatatacatattatacatgaaatagctaatatcatagattcaatttctctaatcattcttaacatcaatgttgttactttctaaggctccttctcggccttcttacctttgttcttatccgacttcttcttcttcttcttaaaaccacagagcgcaacaaaaaagttggagctctatatcactgggtactcattgcgcctagcactcctacctcccaccatttccaatccaaacaccgaacaactccaaggtcaaagtcccaaaacataaacaacaggcctccaaccaaaatgagctactgagtgtgtctatgtgagaaagagagagagattgagagagaaaaaattttcaaaaaaattaggatttcaatgagaaaatggagtcaccaattttaacaataaaataaatatcgggttgataaggatctgaaaccagaggagcgatacaaaccccaagacaaatcgttacgaaaaagaaaacagaaacaacaaacccaaaacctagtgtttatcgattgtacctgtcatattaaaccaaaagcctgagtaaattcttcaaacctaaattggtggcagggagtattgatgaaatagaggaagagaaagaagaatcgcaacagacgaattgttgtcacagaagaaaataatcgcagtgttctatttctatattagtaaataaaaaaatacacaaaataatacttacaatttagaaaacaaataacatcttctaatgggtaacttttggtcacctataatagattagaaggagaaagaaacacaaatggtgaaaaatatccaaaaaagaatgtggaagtgcattttaatttgtaataaaattttatataaattaaaaaactaaagagtactatattcattacccaaatcttcttcaacataaaagcaattatcgtagaatttgtgattagggttttcaattattttttttttgacgtagggttttcagaattagaaaagtgtgtgagagatgagcgattgatgatgggaatgtttagcgattaatttaaataagatataagttaacagttctgttaaatcttcgttaaaattaatagtaaaaaatattaaaacatcgttcaaccaacaaaatctattagattgtcactttttatatataaagatatttcttgcaacaccaaccaccattgccgtgacataccaccaccactaccattacacaacaccacccaccatcaccacaatatccacaatttattaaaaaccatctcaatgtcagattcaaacataaaaaaaattaaaattaaagctgaaatcttaaatctcatattcaaagcaagaaaaaaaatttcagaatctcaaatctcaaacaattaataaatgaaaaaacaaatagaagcggaagaaatagtcatttgtgccgacgaacagataagcccaaacgtttctcagtgccgatgaacctctgtccaaacaagcccagacgtttctcggtgccagagagcaaacagagaccacgatttgggcggcaaaatccccaatacttttgttttggtttcactaaatccctaaaacctaaatttgtgcgggtaaacccccaaaaccaggaaactgttagcaattta

SEQ ID NO: 299884 - DNA, 4638 bp, Cannabis indica
taaggttcaaactagtgtgcattgcgtaaaatttttttttattattttatatccgtgtaaaatagattgtttgaataatactttctatattgtaaattattttaaatttttcaaaattttataattttataaaatattttaaataatttcaacacacaaataaaaaaaaaaattaactagaaaattctcaagtaaaaggtgcatgatcaacacatctttttcatgggtgcatattgtagaaacaggtgtagcattttatttgcaattcttacagatggtagccaattgattacattgtccatgcatatttgatttatttcaaacgaaatcataaataattctaaaccaccatatatatataactcagtaacagagcagcactcggcctttcccaacttatagcatgaacgacagttttcatgaacttttcttttgatatataatttttttataagagaaaattaatattaatattttttttttctacgtattttacttttcaaataattccatatatatgctactaactaattatagggtcatacatttaattaatataatagaacctgaaaaggattatctcacatattgaattatgagaacgcatggatccattttagtacaatattgtatcaatgatatcttctttcatacattaaaactcccaagtccaaccaccaaagaaatataatatgcattttctttagtaagctaagcaagaggttaatatagttactctatatgtagatttctaaattccaacaaaatatacattgactataaatgtcagctgcccaaatttcataactgaagaaaatcaagaaatggcgaaccaaaggtgattactcaaatataaacaatggtgaatatatatatatttatatatattatacaaaaggttccagccctgtctatactgcacaaactggatggtcacctatcaaaatttaataattaagtgaccacgctcttattcgaattatatattgggatggattatatacttcttaaacatatacttctaattttctactttgtataaagtttattaatttaaagatgttaaattattgtcacacaaaggtgcatgattaacatggtaggcatggcaaattggcatgcaattacgtacgttttaaaagtgaaaatgaaccacaatacataaataacaaagtatatagtttctaggataatcgatttataattaagataaaacgtaaaaacaaccaaagcaagcagaggctgcagggcaataacaaaagtccaagtccttaataactaataatccacacaattttccatatatatagcataccacttccctactatagaagatatttcatatatcgatatccttaacactcagcaactagttgtgcttcaggggagaatattcgattgaggctagcagccaatcgaaccccaccttgggctagcttcttctccacaacaggaagccgagaaagaaagtattcatctaccaaaacagattacaaggtttaataaatcaatgaagttacatataatagaatgaatgaaacgacgtccaacttaatttgatggtctagttaattaattataaggagatagtgaaaaatacctccaagtgtgatgcctggcgtgacatttgtgtaagcatacttgcaagcgcaaactgtgctttcagaggcatacctgaaatgaaatacttatctcatcatcatgtatagtctaatacttaaaatgtacttaaggaaagaaataactagatttaattttctcggtgcatgagacttattaattaaattaggatataatatacataataaaacttactgaattggacaaacagtttcattatttgggcatactccccacgatgaggcatcattaaaccaaccagtctatatatagcgccataaaaaagaaaccaaacatgttaaacaagttttgagaagattaattatattaatgattataattataagcaagcaaaacttaattatatgaagaataaagatagcaacgttaatttacttcaattttttgatgaagggattgtatcatcgatgaaaggttcgaattataaaatgacttcaaagcagattcaatgatcttgtcgtcccatacctggaatatataattgaacaaattaaaaaccaaattaatcaatttcatgaacactacttaattaaataatcaaacaatattgctacagtgtgaatctagacacattaatttgcttaccctgtggagatttgtcttgttttcgtaccattgtactgctattaagttaccaccataatctccaaggtaacccatgtgaagaggctgacaatatacagcacttacttcagatcactatgtcgaaatttatatttatcatttttataattatacattcatttcttcaaaatgcaatttctcagttaaagtctctagttaatttggagagagaaagtgtgtattatttaattgggtggaaaagtcaacattttgatatcccaatttctcagttaaatactggctttttaagcaatgtctcataaattacattatttttattaatattttactctaacattaatattaattagtttcaattcccaagaattttctttgttataaaatttctatacaagaaacttttatactatgtatttttattacagcaagaatttttgtatataaatatatcctttctctggcagataatatttttattaatttctagtttgaaaattatatactcagtaattttgcaccaaaaataggaaaagcaaacctgatggacatccccaaagaaatgagataagaacataagtgcctcagttaaattgtctgccaaaacaaacaataaaagccacgccatatattagattataattgttttttatatataaaatatattgccaccccatgtaataatattgaagaaagagatactcacattttgattcgagggtggggttgtgataccagatagctgctttgtgtagttgaaaattgccccagttacacatctacctttgctcccagaagggtcatggcagtctcctatatattataattattgtagagatcgagatataatttgcttagttactgacgacaaccttccaaagatttgagcttaatttgcagcctgattcacccttattagttcccctaatattttcttttaatttaccttgttggaaagaaaagttgggggaaaaaaaaaaacttggtgggctagcttgaaatttttttgttttataacattgtatttattgatctttcttccttatttttgcttttaatttccgtcttttaaaatatattccatccgtgacctctattattttcaatcggtacgtcctttacatttaaattcatcaaaaaattaacactgcttaaatgctttcaaaaacattaacagcttaaatatataatcaattacaaataagtactgcttgcaatttttacagtgcagtacagtaagatcacactaaataacccttacttggcaacacattttttttttaaaaaaaataataataataaaagaagtactgatgagagatgatattgatgagaaaatatgttatatatatagacttactgtggtcattgaagttacagacataatcaggtgtatcggcgaagtgtaaagcagcgctccatctatattgtttgcgaatatcatctggccacgagcatactgatgcaagatccccttttgctgattctggaagcaattctttcaccgcaaccgctgcttcctcactcagataaccctaatcatcatatatacatatacacattatgtttgtttacaataatattatatacattgtatatataaagatagataactcacctctgcgatcttacaagtggcataatgaccttcaggtccccaacccagaattcctggaatgaagagcagaaatacaagtttcctgagcagccctgagtctgagccgtacatggtttggtagcactagcaccaaatattctatttttttttaacttgagcttccttttcaaatttcaatttgatttgagctatatttgtacagcatgccaagccaatagatgttttatatttcacacaaaaagtatttttctaattttttcaaaaaaaaaaaaaagtaattttctaatatatatatttcacacaaaaagtatttttctaatatttttatatcaacttttattattattttccaatacataatcataaaagagtaaatactattttaaactctgtattttgcaaaagttaccaattagactctctgaatcctatatttttcaaaatggtacaaataagaccttgaactgattttttgtcaaaataaaatttaataataatctgatctaaaagtgttataacaaaaatatttacattttctgtatctgtttgtgttaggaattgtcttcaagttggttatattaaaaaaaaaaactcaaaaattaagctcaaggttctatttttactattttagaaaatacaatgtccattttgtcatttaaaaactgtatcaactttacaaaatattgtgtttaatgttttaaaattacaaaaatattgtgttcaataaaattaaaaaataaactcaaaattaactaaaaaacaaaccttagaacaacttaataaataacatgaaacaa

SEQ ID NO: 299885 - DNA, 2696 bp, Cannabis indica
ttttttttttttttttttggtctcgatagtttatggagccattcatttacatagattaacgtttcattctcttattctttcaacaactctgctcttcacggaaaactcgagcagagtacaattttgcaaattttctacaatatacaagctttgaattttgctgtcaacttagaatgactactttatctcaatgacaaaataattcatgacattgaataagtcatttctttaccattgcagagccatttttgttattcttttaaagttgtaaatttcgggtatccagattccatatcaaatggccaccacggtgcaacattcaaggtcaagaacaataaaaagtataacatgtcacaactcaaaaccaaaatatatacacatattcatcatatggtagcacagcaaagtttatactccatagtaagaaagctaaaaacatttacaagttttgtgatagttcagttatcagtcagttagtcatcagcaacaacaacataacataactagtgccttcccacgtaaaaggtcagtcaagatttgatagttctacagtaagcatttcaatcacaagcagatgagcaatataaggtaaaaacttcttatctttgtttactgcggctgcgactactactggaagagagtccacgcctcaagccaagaatcagctgcctgatgctgctattcgaggaagtgtcagctagccatccttcttcttcttccccacttgaggatgaagaagtcgaggcagtgttcccatggccgaaataaggcgaaaccaagctatcaaaataggcagtttcctgcaaataatgctctgcgcctcgaatttcaagctgtgtgaaagtgttcttaactgggtcatagctaagaaacccttctcctcctccaacactgatcagcaaagagccactcttggtgaagcacagaggcgtgtaccgtgagccatagaccgatggactcgagccgtgtgaccgtggaactgtgatgagcttcgtccaggttttgtcatctttggttgcccatatatccacatagctcaatctctgactatgaagcacgcaaagctgatctttcaaagtcccaatccacgaaatatttcggttcaattcatcagctggcggtggcaccacgctgaacttctcaaacgataaatcgaatcggagaatcacgcaacgaagcgaatcgccttcttcagctagccagtacaagccgccattggcgttcgtggcttggaacacatgctcgacaaaataaggaggggtgtcctcatcggggagtttcctccacgaattggatgtgacactgaaaacctcaaccttggggacgaaattcggaacctttaatcgacaatacatggaaggaaccctgacgatcttgtaatcatcagtggaagcatcaaaccctagaccgaaaacctccctagtgctcctgaaattagcaggaataggcattttcctgtactccctgatggaagcgttgtacaagagaagaaaaccctgagatccatcattgacaacgcagcagatgagaccatcgcagtgacccttgacataataagggaagtagggaagcatgggaaaatcaagctccatagcttgttgagaagcctcgttctgaggatccatggacaagagagaatccccatagcgagagagaatgatacttgaagccaaacccagatagtactcggatcgaatcctggcgaggtgggttttgacgaagtcgggactggtgataagacgacgccatgacttggaaacgcacctgaatctgaccaaggttttgactggcagtcttctcagaatctcctcaatgatgtccactggaaactccataataataataatgggtttagcaggaacggtggctgggtttgagtttgggttgttctcgcaaggtagtaggtggtttcttttcttttcttttctttttgaggtgggtttggtttggtttggtttcaatttgtgggtgtattttttcaaaaactgtgggcaaagtgggaatgaatgggttaggtgcctcaaaacaaagacatgtggtagataaataagttatctttgaatgtgtgtgtaaaaaaggtggtacacatatatgttgttttagtactatatatgtcgttttaagcttttttctttttataaatttgcttataattaatgaagggggggtttggtttgggtgtggagtggaggaaatgaatatgaaacatttgatttatatttgttcataatggagcaaatatgaaaattgattaatttacgtactgaaactttaggaagctggcgttagaagcacgtaatttttgtaaaatcacccatatgatacctgagttgagttgagttgagtacttttccttctttttaattttcctccttgcttttgtttggactcttttttggttccttttttcaattttgccatttaagcgcgttatgtaccctcaaaataaaatagaaaaacgcgttatgtaaatatgtgattatcctttaaaaaaaaaattgtgattattatattttccttttcttttttcttctttaaatatatatttatatgattatcttttcaataataataaatgtataataatgttacactaattttatgggaattactaaaggcactcgtacactcagggccgtctcaaggtgttgagaggcctagggcgaattttgaaataaggcttttttttttttttt

SEQ ID NO: 299886 - DNA, 2213 bp, Cannabis indica
ttttttagttcccatcaatgggtattacccattaagaagtattccatatatatatatatatatttacactttaaagcatataggtaagcaggatactatgaccaaatcaaactttaccgacaaatatatatatgtgtgtgtgaaagcatgtatatcaactgacatgttataaataagacatgtgtgtgtgcaggggtgtctgttccaaaagtctacaattgactaaaaaattccatacatactaagtcacaaaaaggaatacaatacaaaaatgtctaacaccaaagaaaaaagagtagataaagaaaattctcttgtgaaaaataaaaaatctgagttagtcagattttgaccaagtcaaaataacttagtaatctgattaaaaaactatctttaagaccagtaatctgattaaaaaactatcttaaagaccagtaatcatagcttatgaggaaatataagtagagaggtcaacccagaaaagaaaaaaaggatgttgttcctcccacgattattatgttaatcctttttttttactcacatggtgtaagagctagatacagataaaaggtagaagtcttcttgttccgtcttatgaggcattgatgtggagattcacgaggccctggctgcactaagcaaagaaacattaatcaattcctaacattattgaaatcacttcacacattgcaaattgtaaaatttgccaaactaaccgcattgtaaattcaaggcggtaccattgtggttgtttttatggttgcacggtgtaatttttggtagcttatgcgaacatacgaggttatttagctaataaattttttaaaaaaagttatctttactaatgaaattttcacacaaaagactattttttacaaaacattcttgtaaaaactcgaaattctgatcaaaacacaatcctttttcgctattcagattgatgactacaaccccattcacacaattcatggactacaaaagaaacttccaatcaaatcttcattcacatttcacagtgtaacaattctgaattgaaaaagatcaaattttttcctaagaaatttgttcttataatctgatcctataacaatttagattcaatttaatgtatagacctaaaaaaacaactaaaattgatcaaatctaatcatgatcccaatacaaaattcaaaaaacgaaaatggcgaacctgtttaagacaagaagggaaagtaattttcccagttcgagaaggtgatcgaacgatctctttagcaatatccctccactgcttacaaacacaagcgaatacgacgacgtttcgacgattaggccaacgatcttcgctattctcaactcgtcgaataatctccactaaaatctccggaagcatggacgaccacgacggcgatgacgacgatgacgaagactcgtcgttattgttgttaaaatcatcggcagcgacgacgactcggccgcccatctcggccgagtcgcaacggccacctcggccctgtgtggtggtctgatgatgttcctcttcggggcttaattcccgaaaggatttggagaatttgcgagatcgaaaggctcttctcaaagacatggctttttagggttttttagggtttcgaaatttccattagaggcgagcttttttcggagcttttagacagagagagaaaatcgggagtcaaatttagacgaagaatcggattatggtgtgttgacttagctgtgagggttgaaaagaaccgcgtgatgtgattggaccgagttgatgacacgtggtggattttgatttggtgtttatggttttggtaaatgacggggccgtgagattagtcttcgtttgtgcttagtcagatgttttgaccggtcaataactcgtaagtgttatatgcccaattaatgaagaagattggtaattattagggctcggtggtgcttgagatggtgtaatttttgactatttttttaaactaatttatttttgtaatttttttaatttttaaatcgcacttgtattgtgaaactaaaaaatcgtagatattgtatcgtaaaaaatattgcgatacgatttatgcggtttgaacgatcactaaataattaaactatcacaaatacaacaaagcttgaacaacacttgtcgaaaataccataaggcttgaaaataaatgcgaaaaaaaaaatttaagtttcaacaatataataattagtgggctttgggctgg

SEQ ID NO: 299887 - DNA, 2106 bp, Cannabis indica
aatttttactgtacatcagactgctttatattataataataacctaaaaatttgctgtaaacaaactcaatctacatttaatacctgaaattatggcactgagggatagaatgatacatcatgaagcccaaaacatttacaatgcttgtcctgcactgctcaaatcaaatccaacatctttcaacttctcataatgtagctagcttaaaattatcacagcacaaaagaaccataaagctcccaaatctttatatattaatttcctagaaagaaaaatgaatgtataaatacacacaacgaaacctccatgtagtttaaaacgatagcttatcatcttctgtagcttctattcgattacaaacattgtatttgtttcttataaatgttacgaaatagattagcaagaaaattgttttcttggtgatggggtagaaaataaaaataaaagtaaaaatgagaacagtaatttccttaagataactatgatttagataagtagtcggagaatagtacatacatttcttcgtcttgatcttgaacatcggcagccattaacgggattaagcttggagtagcttcagcgagggtttgaattgaagcagagcagttagcggactgctcttggagatacaagagggttgagtaagaaaacgacttgttggtgcccaaagaaatcgagagcttgacttcatggagctgatctgagaaactcgacatggagaagaagaaccggtggaaagtggaaaccctaattcggagattgtcagctgtttcaattcgttactaattttcgcgccaaaaggctgaataaacgatgaaagagttggcgggttaatgagctctgtttggatatatggatatcgatgctcttgtaaagaataagggcatctcaaacacttttacatattatccaaacataataatattcaattaatacacttttaaaatgaactaaattatctcaaatcacgagaagagtgggcgtttattttacataagatacataaagaattaggtttttatatcgatctattgatcaattgcgaagacattataatttggggtataaaaatggatagtataatgaagaaggttcggaatttggatgcttatccaaaaatcaatgaagatttctataagcgcaccctgagtggtggccttattaccattgcctcctccattgtcatggtcttgctctttctctccgagctccgattatatctacatgcagctactcaatcaaagcttgtggtggatacttcaagaggagaaaccctgcgtatcaatgtacgtcatgttaattaatgcatttttttatattatttatgatcaatctatctttgttattattttacctgtattgatttaattattcattaatactctcttgttatatcatatgttatgttagatcttcttctataatgaaacattactcaaattcaaccatgatgattataagcacttgaaactaatgtgggagctaagggaaacatgggtgattatcattatggcctcccaacctttatttttttctgaataacctcaaaaacttattaggaatagaagctaaaattttggtaattacatggagatttacctttcaaaaacaaagaaaaccattaaactcatgatcaagacaccatttagctaaagtgtgggctgaatcattaagagttcaagaaatccaaaaaaaccgaaaggttaaaattagtagcatgtaaaagctttgaaaaaattgaaagacaaacttttatttcattatgtatggataaatgggtggcaatcgtccttgctaaaagaaaacatttagggctcgtttggtacactgtattgtattgtattgtgttgaattgtgttgtattgtattgtattgtagctcgttttgtacgccgtattgtaatgtattgtattgtattgtattgtattgtattgtattgtattgtattgtattgtattgtgttgttttggattgtgttgtattgtgttgtattgtattgtagctcgtttggtacgccgtattgtaatgtattgtattgtattttattgtattgtattgtattgtattgtgttggattgtgttgtattgtatttgtattagtatta

SEQ ID NO: 299888 - DNA, 1670 bp, Cannabis indica
tttttcaaattaattaaataggaaaaaaaaaattgttaagataaattttttcgagacaagatttgtcagtacaaaaatattaggacaaaagacaccaaccttgtcctaaagataatggtaagtgcctatgcttgtccctatccctatgagatttgtctttttgggttaattaattcaattaggtaaatatctaatttaaaaagtggttatagatatttcaaggttgttgagatattctctcatgtaattgagagattccgtcataaatatgtaaacgaattcagttatagatatttgtttatttaaataattaaacaataatttaattaaaggtatttgactactataaatagaagcctgatttgataaaaatggctaaaggatacatcagacttacctttccaacaatagtatttcttcaagtgtgttgtgttccatgccctcggtaatactgtgtcatccatgtgggccaacttgtaggtccctggcgggatgtctttggcaatctgatagaggccttcccagtttgctctcaagactcctggatccttagtatttgggaggactttccttagcaccaagtctctggtcttaaaggcatgcaggaggactcttgaattatagtatagtgctgcactttgttgatacaccactaatctcatttgggctacatcttttctttcctccatgagatccaagttttccgccattgtttttccattagcctcctcgttgaaattcttcagacaaaacgagttgagtttcatctcaataggaagtatggctttgcacctgtaaaccaaggagaaatgagttttgcctgtgggggggagaggggtgtgtaactatacgcccagagtacatttggtagttcatccacacatctgcctataagctttcccatctttgttttgaggttcttctagattattttgtttgccatctcaacttgcccattagcctgagggtgcactactgttgagaatcccctcttgatgcctcttttagagcaataagaactcagcaaatctccttcaaattgggtcccattgttagtgatgattctgtaaggtactccaaatatgaatatcaagaacttattgatgaaggataccacttgtgtagtagtgatgctaaccaacgcctcggcctctacccacttggtgtaatagtctattgccaccacaacgtattttgccttggctctccttgatggttaggccccaatcaagttaattccccacatggtgaatggccacaggctgttcatgcttgtcagttttgctgaagggggcctgctacagctagcatgccactggcatttctcacactttttcgcaaaagtcgttgcatctttctctaagctaggctagtattatcccttcttcaatactttccttgacatcaaataacctcctgcatagttcacgcattctccttcatgtatttcagataacactcattgcgcttcactttcttttatacaatgtaggagcggggtggagaaacctctcttgtatagaactacatccatcaagacatatctagcggctttatactggattctctgtgcctccttcttatccatagacacaacttcccttctttaatgtactcaatgcacggagtcatccaagaggcttcttcccctctgttggaaattattttac

SEQ ID NO: 299889 - DNA, 1092 bp, Cannabis indica
aatctcaatagaatttttaacggccaaataagttcaagagacataatttagtatatgtcaaagtccggacaaaaaattcttaattagcctatcacttattacacaatgggtgtgtgagttggaccctatcttttggacatttatgagcttacaaattttatcccattacaataaatataaatataatgatttgaaataccaataaatgttacaattttagcttttagaaaaaacaaaaatggagaagaaacaagacaatcacaacaacaacaataacaatggtgatgaacaagaagaattcattttccgatcaaaacttccagacatttacatccccgaccacctcccaatccacacctactgcttccaaaacctctctcaattcaaccacaaaccatgtctcatcaacgccgccaccgcccaaattatcacctactccgacgtccacctcacttcccgtagagtcgccgccggtcttcacaaactcggaatcaaacaaggtgacgtcatcatgctcttactacgcaactgcccagaattcgtttactccttcctcgccgcgtcgcacataggcgccgtcgtcaccactgcaaacccgttctacaccgcggcggaggtggccaaacaagcggcggcgtcgaataccaagctggttattaccctctcgggattcatcgacaaagttagggactttaccggtgacggaataaaggtggtgtgcgtcgacgcgccgccggatgagagtgagtatctccatttctcggtgctgacgcaagctgacgagagcgaaattcctgatgttgagattaagccagacgacgtcgttgcgttgccttattcgtctggaacgactgggcttcccaaaggtgtgatgctgactcatagagttatggtgacaggtgtcgctcagcaagtggatggtgataatcctaactggcactttcatcaaaacgacgtgattctctgcgttttacccgttttccacatttattgtcttaatgctattttgctatgtggacttcgggtcggagcctctatattgattatggagaaatttgagatgaaaaaaatggttgaattgattgagaagtt

SEQ ID NO: 299890 - DNA, 3393 bp, Cannabis indica
aaaaattagactaaatttttttggatcccgaaacaagtcaagggtgtattagtacatcccttttaaaatagtgcattgtagaatcacccaaacaaatgttagaactaagtacttctgttcacttttctctctgaaataaaaaaagtctttctgttcacttttgtttatatttttcgttttaagtaatgacatgacagtactttttttttaaaaaaaaataataatatatgtatatataatatagtattacatgtagatattaattgagagtgaatgaaaattaaatatctttatatgtttttaagtgaatcaattaaaacaataaaataatataaaagattctaaatgataaccataatcatctacactgtctttgttcttcccaattggtttccttattaaaaaaaaactaaaaaacgattattaatcgtttgctttatcaatgaacccaggccaagaaaagctaccctaaatccaccaaaaatctctatcaccgaaacccaagccaagaaaagctcgcaaccctgtcaaaccaacctccgaaaataatatcgagaaacataggccactatgagaagctcagagcaaaaatagaggaaaaagaaagtgttttcttattaacttgaagttgaaaataataggccttatataggcacgagtacaatggctaacaacagattaacaagttggcatgaaatagtgtaactgaaataaccaactccaatacagttggagtaactaactaactgatcctaacagctcccctcaagatagagtgtaaatgtttattacacccatcttggaaacagtgttggaatagggagttggtagtaatggtttggtaaatatgtctgccaagttttgttgagaagagacatgaagaagttgaatggagccttgctgaattttctctcgaataaagtggcagtcgatttccacgtgcttggttctttcgtgatacacgaggttttcactgatgtgaattgcagcggtattgtcacagtataggttagctggttgtttatgggagacaccaaaatcattgagaagagcaaagagccatgtcagttttgaagtagcattagccattgcacgatattcagcttcagccgaagaacgaaaaaccacttcttatttcttagatttccagaatataagtgactggctaaggaagatgctgtaacctgaatcgatcgacgagtgtcttgacagatgccccagtctacatcaataaagaatgagacctgaacattatccctgcacagactagtttcaacaaatcatgcaggttgggtgctgcatcagatgggaaaaaaataccctacccaggggtttgtttgagatattgaagtatcttgttagtggcctgcatgtgtggaacccgaggacatgacaagaattggctgagatggttaacaacgtatgtgatgtcgggtctagttatggttaggtagatgagtttgccaatcaaactttgatagacagaagagtttgggagtaggtttcctttgtcttttctaagtttgagatttagttccataggtgtggaagccggtttggctctcagatatcctgtgtctttgagtagttgtaaagtaaaaggttgttgtgaaattgatatgccctgtgaagttcaaccaatttcaaggcaaaaaaaaaatgaagtttgcctaagtcttttagtttgaacttggcatcaagagtttgggtgaattgtgagatggctagctttttgttgctagctatgatcgtgtcatcaacatagatgaggatagccataaaaatggatggtgtctttttgataaacaaagagttgtcagacaaggactgggtggaaccaccgtccatcagtgttgagcttaacttggcataccattgcctcgaagcttgtttgagtccgtatatacttttgtttaatttgtaaactgtatttgggggagcattatatccaggggaattttcatgtagacttcctaaagaagatccccatggaggaatacattattgacatcaatttgatatatgatctaattgttaatggcagttaaggccagaaacacttttcgagtgttaaaatttgcgacaggtgcataagtttgagagaaatcaacacctgatttttggttgtatcctttagccacaagacgagctttaaatctttccacttctctaccttgattgtatttgactttatacacccatttacaaccaattagtttatggtcaggggtaacttggtaatgatccaagttttgttcttttctaaggcttgtgtttcattgtccattgcttcaagccaatgtttaaattgtgaagtctcagcataattttgaggttcagtttgtgtgtatgctgcaaggacaacagccctaaatgttgtatgaagcttgatgtgagacaagaattgttctatgggatgttcagtggaggccacatgacacacatagtcttttaagtgggtaggtttggtgactagtcgacccgttttagtggtctgaatgtcacgagatgggagtttattggaagtggaagatgtggattataatttattttgtgctattgctggtgcaacaagttgctgacatgggatgattgtttgtgataaacagtgatcaatctcatttgaggaagtggtggagagctaggggtagtcactattgtcaaaatttaggtaagcatttgccccaagtttttagcagtatgactatacggtaaaaactttcctgtgcagctcacgctataatttagttgttgatgacttagtggtatgatgtcgggaatgccatgcttgtactagaattacatttcaaactcaaaaaataattctcccaattttcatattttcgcaacatatcccaacgataattgttttatacaagaaacattaaattacaaagaaaataaattatttacaaagaaataatctaaatatttacaaggacaaaaataaatacattacttgtagcattataataatacttggaagctttgatatccccatcttcatagtgggtaagttctctatacttcctcttgcaattttctcgcttgaaatttgaaatttgatgaagtattgcacttcttcttggtagttttttccatggccaaaaatggcattaaatcattaggatttttgagtttttgataaaatgtgagtgtttaacgattgggttatgtagcataggctatgggtaatgtattttttggctctggttttatgaaattttatgaaggaatggctaattttcaaacttttggttgcaagtgttcttgagctctggaagaatatcaagaacatggataattttgactttccctctcttttcttgctttgattctcataaaactaagaaaaaggtgtttatgaagatagtattgttggaaattatttta

SEQ ID NO: 299891 - DNA, 4856 bp, Cannabis indica
ttgaagttgcttctgtaatttttcccatttttatcctcctttttcttccaggcaaatgtagcttgttcacaaaatagagcaaatttgggaagcataaatacaaataaggaaatcaagttaactgagaagaaaaaaacacctccacatgataaactcataggaaagtgcagcacttcaaaagcggcatttaggaataattctatccttgtttcatctcgtaaacaacttactcaagtatcctcccgttctacaagtctgcatgcttctttggtgagcaacagattggagtcatcttcttctactggtggtaaaactggtaaaataaaagcaaactcacctttggcagacaaacttctgagaagtctaccaggccatagacaatctgctcaggtagacaatctacttttaagattcaaattcagttttaattagctgttttgctagtgcttctccagtgaccatatagatcttatcttgtttatgcagtgctctctggatactctggatactgtttctggtgatttggaacataagggctctgacatgataaatttgggaagcagaaatacaaagttaactgagaagaaaatcctatctccacgtgacaaattcattgcaaatgcagagagcaggaatgtcgtaggaaaatgcagcatttcaaaagctgcaatggggaataatatccttgtttcatctcgtaaacatattctagtgtcctcccgttctactaccagtctgcgtgcttctttggtgaggaacaggttggagtcatctttttctactggtggtaaaactagtaaaacaaaagcaaactcaactttggcagacacagttcggagaagtctaccagctcatagacaatcttcccaggtagacaatctactggtaaattcatagttggttttaataagctgtgttgctaatgcttctcaagtgaccatatagatcttaacttttttatgcagtgcaatctggatactgttacagtttctggtgatttgaaacataggggctctgacaacaggtattatcatttcataacaataacataatttttattggcagccatatttctgcgtttacaaacagatttttttcatgctgtaagatttgtgcaaatgaatctaattgttcaagtttggggaaatgcaggcctagaaaccttcataacatgaataaatcacagcaaagtagcagagttgaatcttcacagaggagttacgacaaagagagaaagcagtacttaaatgccagctgtagcctagtatgtccacaccaggaaacattatccaagctgtagtttcgctcttatttttaattgtagacatgaatacaagctttggttttcattaatgggtcatcttattagtaatatttgatgtaatcgacagggagaggacaaaagtaagagcacaactgaaagaagttccaagtttgccccaaccatgccatcaagcagtcgcaacactttaacatcagttcagaaggtgtgtctttaattaatttttcattagtctgcttaaatattctaagagggccaaaaacttgaagacaatatttttccacttcatttacaagattcagcgtcggttttttctttttattattttctttctccttccattttttttttatcatatattcaatgggaaaaataaaacatcatatcgaatctaagctatatccacaagtgttcaattcctctaactacattattattattattattattattgttactgttattgttattattgtgcataaactactaaaacaatatgttatcatcacttgccagaatgtaacacagcccacaagtctgacacatgctcaaaaggaaaggtatgaaatgtcctctattcctaatatgaattttatatgaaccaggacttcaacgtgtatttggatttatatactgatcatagcgcatagcgccatgttaccatgcagatgcaagatgctgccgtgctggcggtgacaaactgcagttgtttctaaaatgtatgcaacgcaagctcatccggacgagaccaagaaagaccacaaacgtctgtcatgaatggaaagcttttcaagaatttgagatgcaaatgcgtgcaatgaacataaaaccaataatacgatgaaattcaatagggtaaactgatattggctacgaggagatgaattagaagcaagtaggaataactttgttaaaaacatccagcatctatagcatctatagccactacgaggtgcacattgtaaaatacagaaaacttgataaatcaatatgagatctaattgatgcgtgtgattgttgtacagttttatatgcagctgtttgactcataaatcttctgaatttaaaaggaaattggtcaaatttccatgcattcattgccaggaagatcacagtatctcaaaagtgatcccagaaaattacaagcacgtcaaaattacaaatctaaggatattaattcttcttagtgataaaaaacatgaagatctatttacgctaaagaattgtgatatcaagtgtagatcagtacagaaaaagggcttctcctgtcttttcctactttgttgagtatttatcttgttatacttataggtgactcgcgtaggactgccaaaaacgcatccctgaaagatacataaggattgctctttacaaaacagaaagcaaaaaaaatgcagccaaaagaagcaatagaaaaagctaatccttctctaacttacctggaacacaaggaattgtttgctttaggatatagaattggaaactaatctgtacaacttgtaccaaaaagctttcgacattgttgtttcagccataggaagttccaagatagtaaatttgataagttaatcccataaatgattagttcccgcccatataaatactctgaagatgtaaaggttacaagtctgtctgtgtctgtataaatcactccgcgaacatagaattatcccatttctgttattctgtcctcaaaatcaagactagagaatctcttctccaaatctctagcttcttcatgtctgcctatactctggagacctttcaacagagtcatgcacactcgaatgcttggcctaagacccttttcaatcatctcggagataatggcttgggcgctgaccaaatctttttccttcagataaagatctgcgaacaagctgtaaactgcgttgctcgagtaactatgcttaaaacttgcatcaaccacatacttatgcgcctcctcatatctacgcaccttaaagaaacccttgacaaagacagcatgtgttgtaagccgaggtttgagtccccacaacatcatgttatccaaaagctctatggcaaaatcgaacttgccaactttacataagtgagaaataataatctcaaaggttaattcattgggagaacaatccattaatttccttgagtaattcttcagcacgttcaccgctcttacacaagttactaaaaaaaagattgtaagttgtgacatttggtttacaacccagttgcctcatttcatgaactagagctcttgaaccttcaatatcacatctgcgacatgtttctttaatcatgatattgtaataagtcgtgttcatctctgttatctccattacaaacttggccattttaaatgagcctaagctgctaaacatctgaatcaaagagccaactccagaagatcgacatgttccaccaactccattcaatatcattacaacatcactaacgtaattcttaagagaatcctcatctgtggccaactccggtatgaacaaaaatgaattttgagtcaagcaaattccttttttactaaactcattcaaagtacaagtcattgtctcgtaatcttttaatcttccacaattatcaactatcaaactgcaaatatcatagttacgaccaagaccaggtcttgaatctttaatccatttataaaaacgcaaagcagaaattttctctgaattcaataactgcaaaatcagagtgattaaagcatttgatagacttacactgaacccattcaatttgaactccaaatcattctcaccccttttaatccaaccaacaacttcccaagctttcttccaaaatgctttcgatcccgttctttcaggaccgggattcctaacgcgcgcattctcagaagaattcgacattttcagcgtaccagaattggggagctctttgctagacgaagctgagaatggcctgaaacccttacagtggcgaggagtcgccaagtccattccatgaccaaatactgcgaatttgggagcagaaactgagaaggacccagatgaagaaatcaatgaatttggcagattacacaaagaatttgatccaaactgatctgaagcgaagaagctagctggaaagggcagaggtgaggcggggtgtgggagtgggtgtggaatatgaaaaatgagagaaaagagaagacgagaccttgacaagtatctgaactcatttttcaggcttgggactcccattgccatggtgctaactgctaagctatagagggtgacattgagcaagagcaccatacaccattaaagtaatagagaggagttaagaagaagtgaagaatgtagtgtgaggtcggccaagccgccacgatgattccctccggttctcaactgtccctagtagtcgggccttaacccctggctttcccttcctgctttgttcagatgggctcttctttcatggtttctcacaaatccgggcccaagtggatgatccatcaattgaagggctcgatagacaattttttgggaaatttacaaaaatactgtaatttgaattaacttttacaaaaatattgtcacacggaaaagttttcaaaaatactgtgttttta

SEQ ID NO: 299892 - DNA, 2505 bp, Cannabis indica
tacgaggctgcaacttgagtcggatggaccggccggatgatcacaatacaataaatgtttctaatgatttatattggatgttgatttcatgtattaaatgtattatttgacagtaagtttctaataatgtatggtgatcaggttgtcatgagtgtatcaggtccaaagttatataaatatgcgttttattaatatatatatatatatattttgctctcttgcattgcatcttcttcttcttcttaatttctttgaaatgactgcactcttgcatctgttgagttcttcctttcttgtttggctcttttttgaggccgtggccgtgcatgtttctctcaaagaaaaagaaagctaagggtcttttttgaggccatgcatgtttctctcaaagaaaaaagaaagctaccatttgttttatcttcccaagtttgccttttgtttatttaaatactattccaaatgtaagtaaatctcctaagttagggatgcagtttatgttgtgatattgataaaactattattttcatgtagggctgtgcccgctactaatcataaaagtaacctttcaaaaaaaaatcctaaaaaaaacagatagcgtaaaataagaagcaaaataataaagttaaaaaaccacaaaatcgtgtggagccaaaatgacgtcatcttgtggggtcaaaattcataatgacccgctttgaccattcttcatctcaattcacccgcgtgccttctctcactcctcgcgatgcgcgcgtaaacaaaattaatcattatttggattctatttaaaaccatttcgtcccatcaatgaaaaccctccacctcatctaaagtatgatattttccctttttagtgccatcaataattcctaaatcacaataaagccccccaaaattccacgtggcactcaagaatatatgacaaaaataagccgatatgtggaatattaaagctctcccacctcaccctcttctataaatgacccctcctctcttcctctaatccttacccgttcccttctggtttattatctgactctctttctctctctcttttaatcaacacattttctcattttcttacccatttccctctttgaatctttcgtttagcaagaactggctaactctcaggaaattctggaggagagtggttctagtaatcaaagggtggttcgggccctgtatgaagccttgagctcccgagacgtggacaaggttcacagccttctctcgccggatctagattggtggttccatggtccgccgtcacaccagttcttgatgcgattgctcaccggtgtttcatcaccagacgacgtcgttttccaattccagccccaatccttcgcctcattcggacccaccgtccttgtcgaaggctgcgattcagatctgtcaatagcttgggttcacgcttggaccgtgacggatgggataattacccaggttagggagtacttcaacacttcccttaccgtcacccgcctcggcgattcttcctcctcttacggcaaatactctccgctaggattcgcttcgtcgtcttcctcatcaacgtccgagattgcttcgtaccactgcccctccgtttgggagagtagcctctccagtcgggtcggaaagtcggtgccgggtcttgtcctggcgatttaagcgaccccgacgtaatctctctgatctagtgcacccgatcctattgtaatatactacagtaaataaaatcgggtgcttacgtggctggccctggttgcctgtgaacttatggtctgagagtttaattgagaagagttgagtcagaagagtcagggaaatgtaggtcccagtagcgtttggctttggttttcttcctttcgtgacttgtcgtttttactttgtttcgttttgtcttggagtgtgaactttcttattttattgtcgtgtttttatatagtgtgtgctggtttagggtggaaaccatgggggtgatgagttcctattggttgtttcccgaagcttctgtaatgtgttgttctgcttttctaataaacatgcgttttcataatgttattgtcgttttatctaaaactacacatttttttcctctcaaccaaaaggacactattaatttctcttaactagcgactttcgtgaatctcttacacttaaatctatatgagaaaattttagcttagtttgatttttatgagaaaccaactaaacatggccatggtgtacaacaatcatgttagaatatactagcatattattctcttaatggcaatgtgtgtgcatgattgcaatattgtcaggtgagtagttcgcatcccgaccggttcctaatcattttatttatttatcttttttcggataaagtaaccatttttaacttgactgaaaaatattataaatttaataaaagccacgtggacggtggatatgctatactagcaaaacatgtctgaatgtggcccacacatatgggccagaattgatgaaatgaagagagaactctagcctctgatt

SEQ ID NO: 299893 - DNA, 1526 bp, Cannabis indica
gtcatagaacaaacaaacatactgacaatacacacaatatattagttatgagctctatgatctattctatagatatatatatatatatatatatatatatatatataatcaaaattaaaaagatgcgaaacaacttacttccatggaacatctccaagtagcatccaatcaccatctttgtcttgataagtaggagcatattcagatccactgtaaccttccgtctccgagtaattaccgatacaaactcctccgaacatattctccaaagccttcaccaactcaccgtagcttttatacaccttcacgtcaatcttcctcaagtaaggagctccatcaacgctcactttcacgtaacttcctcctcctcctcccgaattcgaaacttccactaccgacaccgaagaagacgatgaatactccgtcgaactgctcgtttttgctttcttcatcgccgtaataacagtttgatgatgagtattgttcttcctgtaagatcgaatcggcggccatccaacaaccgcttgctgttgcgtactactcttgttatttccggtaataagaacagatctactacacttggtggatttagatctagaatcctcagctaattcctccgccgcagctctcttgttagaacctggcaaacccaaactgaggttaagagagtcatcgtcgtgatcttgaatagtcgatttgacagtcatgatttccatggaaaatattttgagttacagagatgtgagaaaattaattgattagagagaagagaaagtggtttgtgtttggtttgagagaaaatggtaatgggaaacaagcttttatacataatcaatcaaagggatggatctttgattgagatttgtgaggaatgatagggtgtgtcacacgtcttaactccgaagacttaattggacggctgggattttggtttcgggaaaggagaggcgttggattggattttgattagataagatgatgtgggtgattttgattggtggagcatcagcatgtgaatgagtgagagtgggacccaatctctgtcttgctttgtcgagtgattgccttgtcggcaaacgacagtgtatttaattaattaatattctcattataatcttgtctgttgcttaattagtaattacctatagttgaccatatagtactattgtctattgcattaagaaattaagtattaacttaataaccgtcttaactatatcttatctttactattattattattattatattctacttattaattatataagtatagtagctaaggaaggactagctagctaggctaatatatttatttattgttgaataaaagtgaaaaaataggacactttttagttagattaatttgtcgacaaaacatatgatatatatatgagaaatgctaaagggcactcctcgtgcctagcaccctcctacgtgtcaatatcgttattggtgtaattaagtatcgggtcccatatagtttaatataataatttttatagagtatcgctagccaattgcaa

SEQ ID NO: 299894 - DNA, 913 bp, Cannabis indica
ttttttatttgttcacttttcagttcctcaaccaaaaaacacagcaccattaaactaaacccaaaagaaagaatacccatctgaagaaagaaactgataaaaacaatttatacagcttaattacaaatcacaattttgtacaaatccataagaatcgtctcaaagcataaagagcatcaacagtgaagaattcaataaagaaaagctgaagaaatatacttaatgttacatttatgtatatacatatacctatttgaagatggaggaaatgagaagaatccgatctgaatggaagtttttggtttgggaggttacatgaaagaatggaacgtaatgattgcgattaaggatgaattggaattggggtatgtggaaaatggaatgaaggaaagggacaagtgaagtgagaagtgaatgaatccaaaagaacaacgttgttatttgttttggtatcgaaatttcaattcaaaagtttcgctttcagttaagaccaccaaccaaggaaggagttctttctttcttgtgcgagcctaattctcatgcccacttcgttactgccacctcgcctcactcaaatttcttatatatattataaaaatattttgacacgatttttcttttgaaaaatactgtgttattataaaagaacggtagaacacaaaacagattaattaaaaataatagtgaaataactacaaaataatcgtaaaacaatagtaaaaacttaacacaatacatcaatatttttgaaaaaaattctagcccatagtataaaagtaaaaaagttgagattttcagtatatggtataattatccttgagaaacttacaaaaatactgacttttggcccaatctttacaaaaatactaccacacggcggaaataatttttatactgtcttggccaatttttt

SEQ ID NO: 299895 - DNA, 1226 bp, Cannabis indica
acaactaagaaaattaatagtatattattcatactaaacaattaaacatagcagaaactccagctatgcaaaaacaaaaagatgagatttgagcataaaaacagatcattcaatgcattcccagagcaattaaagtttttgagccaatacccaactgcctcaacaagattaaaaatcacatttttaacacagaagaaaaaaagttagaagtacctggagagaagggtatttctcagaaacaaaaaaagaagatgagatgaagccctagatctcttgtaaagttgaaatctttttccatgattattagagaaaataaggaaatggggtatgagagagagaagtgggaggtggggttgttatgtttaataacaaagaaagtagaaagtccaagcaatggcaatagcactggcaaatgacaatggcagtggcagcatggagaatagagaatagagattaagagcttagagagatgatgatgatgatggtgggggtggagttatcagtggtaggtagttgatgatggatgggggcactttcatttcattcatatacatataatacactttgattagattacaatttacagtaaaacaaaagcaataccaaagtctatatttttataaatatataaatttaaaaatggaacctttgtctttctttgctttgctgtttcttcaattctctttcttttcctctaatagtataatagcatcttctaatctaatctttgaagctgatgggtatctgaatttttaatcaaaaatcaattttttttcacatttactacatgcatacacagttaatgaagttaattaccaaataccaatcatttataatccctttaattgcttccccttagctttaaattacatctttttttgctagtcaaactttacatttttgactagaatcttattacaatcaataattaaataaaaaaaaacgtaatgttaagagcaaataactacaattaagggatcaaaatccatatacatataaaaaattcaaattagaatgatttagttaaataattaaataatttaggttgatttgatatggtgattaatatgtccaaatttagtatgttgtaatagtcaaaaagaaatagactagacaccatacttgatagaagagtccatacctaaaatgatggtatgaatgaactatgaataagcaaccacacttttgttattcagatcaaattgaatgtgagtgaagtagaaaac

SEQ ID NO: 299896 - DNA, 2027 bp, Cannabis indica
ttttttttttttttactaattcttccaaagttggaggaatttttaaagtttggagggagaatgtctttcttcatctcttctctccctcatttaatactattttttacaaaacaagtgatttaatcttttcttctatcactctccatccacccttcttcatccttccatcttttccttaccaaactaatttaatgatgggaaagattttttctcttagaccatctccagtgggagatataaaagttgtgctatatttggcacaaaaaatgacattattttgaactagttaaccctgccaactcagtcaacccgaacccacagacccgttaacatgcgagctcgaaactcgcgaacccaaaccatttcacgacccaggtccgggtacagttttttgaacccgaaatctggtcaatctacccgatgtttattcctacccctaatgatgtaaagcaagggggatcggtcgaaaaactctttatgataaatactctcattaatacaatgactcgtggactaaggctcattaatgtctcaaccacgtaaaaatcttttgttataacattcattaattacttcatacatctctaattgttggttgtcaaaaacttcggtcaatattttggtgctttcattcacagttgtaggaagctttctaaaagaggaagtggtaaataatcttttggtataatagtaaagacaagaaacacttcacattgacaacaaccagatgacccaaaggatcctaaagaggaagaagtagtttttagggtggatgctgaaagagaaggagaaactaatgatccagaaaatttaaaccaaaaagaatatgaagactacgatgaagacaactatacagaattagttgaactaaggcaaaaggttgttgaccatgaggttgagttggcaaaacaaaaagaacaaaacaagagaatccaagagatattgattgtcatgaaaagggaaatagaaaatgcgggcatctaactagatctaactgcaatcccatcattacaagagaggactgaggaagaaccctctcagcccgaggaaggccaaaaatagaagaatatggaacctagtcccatcaggtatcctctagaaaggcctgtcctggaaggaaatcctacgaccgcgcctggaaagaacaagaaggcccaggatccacaaatattttgttctgatctcccacaagggaagggtccacagggggtagcccccaggaccgtggagatcaaaagagtgtatccgtgcatcaagagctaggaaaacaaaaggtgtttgccaggaaagatccccctgtcgatgtacgacacacactcaatgccaaacacggggacctaagggcacaccttgatcaaagaaagaacgtcgcaccaggctccgagggtatcccaaatgaaggagtcctggccgaacttgctatcctccagaaggacatagcaaggatctcttggaggcaggagggagacgactcagaatcagattgtgaggactgggagccttgtgcaagaaacatactagaggccgaactcctaaagaacttcaagatgcttgaaacgactatgtacatgggtgacacaggtccaagtgatcacctgtctagattcaatagagtcatgacagtcatgagggtcaccaatgacgccaaatgcatgtgtttcccactgacattaggaggatctgtagaagaatggttcataaatttaaaaccaggatctgtagattatttgaataaattgcaaactaatagtagaaggaaatttgttatagctagaaagataaatcttgaagttagttccttgaataacatcaaataactaccaatggaaaccttgaagaacttcatcgagaggttcaaagaggaggcttccaagaccaagaaagtagatgactgacaacagttagtaggggtgttcgcggtgtgggcggtgcagtttttgattatttttcaaaccaacccacacatgcaatttttttaattttccaaaccgcacctgcaccacagaactaaaaaactgcaccgcaaa

SEQ ID NO: 299897 - DNA, 1675 bp, Cannabis indica
tttgaattggtcaattctaattaaacgtatgcatgcattgatctcatacatacatatctgtcgctatagcgcatgcgtcacgttttaatagttatgatgacacattaaaacaatgagatatatacagagaagaagtaaaaataaaataaaaaattgtgtaaggactagtaatagtaatattaacactaccataatatatttttattattataagtataattaaatgttatattttatatatttgatttaataattattatagaaaattattaactattcacaaaatactactacctatatataatagcaatgtttttaatttaaattaattaaattttactgcatattaatattttaatttttttttttaaattattcattcaaaaaatattgtttaaatatttgttatgataccaataatgctaagatagatcaacatattcgtgatgcatctatgttagtatatagagccatttatgtatattctatctaatcataatgatgaattttaattggaaaaatctgtttaatttccacctatcaattttaattatggtagataattaatgagcattgctattaggcaccagtggtgcttagcactttctcgacatgtcacgttgcgattggttagcgatgctccctaaaagttattatattaaattatatggaacctgatacttagttggactaataataatattgacacgtagaaggatgctaggcaccactcctttagcatttctcataattaatttatccaaatggataaaatatatgagagactctcttgcataatatattcaagtcaataatgcattattaataatttaaatgactgtatcgagcttctccgaagatgaatggaaaattgtggggaaattgtttcgtatttattgataaatgattgacttgggagttggagggtcaggtgatggattatgaaatgtttaaaattaaaataagaataaatgggtgttgtaaatttgtgggttgactagtaagactaagagtagagtagagtagtgtagagtaaggcagtggcttgtggcgcgcgcgcgcgccatgtttgtactttgtagatttgctcctaaacaattggagcctctaattttgggtaggtgcattgactaccacgtcaactctagtcttaggtctacggttaatttcttcctacgtacaaaagctctaaaattttcatctaaattctaaaactattttaaatgtagctaaaataatttaaaaattaaaataattttttttattattgtagctctaattgtattttctattatagttcctctccaggatccgactctaaaatataatgtgtcatgaaaaaaaaataaaattttgagcctttatttaaaaaaatacataatatgttttaaaattaataaaagaatatataactttaaaagagaatttttttttgggtctctaagctaggtgggtcctaggctttaattaggggtgcacattaaacccaaaactcacccacctggcctaaaacgcaaaaaatccaaaaaatcgaatttcaatattagtacactcgattcgggtgtaacccagttatgtactaggccatgttcagatttaatattttgaaaacacaaaacccgaaacccggttagtatttttatgtatatatattatatataaatatatgttttat

SEQ ID NO: 299898 - DNA, 1854 bp, Cannabis indica
aatcacgtaatacgcctatgttagttacggtgttaaatattactactacaaatatactatttatctttatttttttcatttattaattataaatgagaagataaaattattttaagagttgtatcatcgcttttattgctcgtttaaaaacaaagactttagtattcggttattttctaataatcgaaaacaaaagtcttcgtttgtacataaggcgataaagaaactttaagtttctcttattccttattcggttatcagagacccgaaaccccaaaccctaaaaccacaaccctcgacaacgacgacgactgcctccctcgacagccaagacaacgcgactgttcaggcgagacaacaaagattgcctctcgcgtgaaggcccagacaacaatgacaagggcttcgtcttctctctctccttcgatgaataactctctctctccctcgatgatgacaccctctctctctcagctaaatctcataattccttatttgatggtaagttttttctctattcctcatgtttctctctaaactcattattttttgttttcttggtgtgatcatttcctccacatcttcaagtcgtctctcactatcttagtcactgatctcaaatcaaaaggaaaaaaagccaatcaaggtgttttttttcttaggttttactatcaagaatgttatattaattaattttcatttgtatgtatttataatgtaatatttggttcatattggagaaaattaatgatgtgaatcatatcaaattttattttagcatctcacttagtaaaatagattcttaataatttttaatgactgaaaaatattgaaataaatattgttagggtctttgtatttattctgacattggtgatgaagattggaaattatctcattatttggtccttgaaaaggtactcttatatcgttttatgattgtattttcgtttcatttaatttttattatctgctattttgatgtaagtaaaatctataataaaataatagtggactatgatctaatgttacttttttatgagttaaattttaggagactcgatattacattatatcaataacaatttaatatctaagtttaagttgttttaagaaagttaaccaacagtgttaaattaaatagtattaattcatctattatatttatatatttatgtgcatatatatgaatacatacatctatttagttgacaatgagaagaaatatgattgaatatgatattacatatgagattggactacaatttatataaacataaatttgtttgcatgcatatgttttattggttaagtattaattttgttgttgtctatattcatgatatatatatatcatgaactgcttgaaaaatttatcaaaattattgaagaagatcttgatttaaatgatattttctgtcttgaaattgttgttaattattcaagtcttgatatttattaaaaaacatattagttgtaatgataaatcatttgttattgaaggtgttgattctacttttaattaatgaaataaaatttttattgtgaatgttaatataaactttattaaataactagtaacaaattattatataaactttgtaactaatcatttattaaataagtagtaactactagctacataaatttgttaacaagtaaaattttttttctttaagtttttttaataatttcatttcttagtaagtttaaagttaagcatcaagaatcttaattggagaggagaaatattttggcaagtgttgattgattttctagctaactaaaggtatactttttctaacttttaggttaaattaattatgaataagcatgttagatgaatttgaatat

SEQ ID NO: 299899 - DNA, 4339 bp, Cannabis indica
cattatgttgctgtttacaacctgaaagctttgattgtctttctaagaatttctatttatagttaccactaattcaaaataaataaataaaattgaaaaagcaaaattaattaacagtaaggtatttgttattctttccttatgtagatgggtacaatattaatttcctccagctagaagattgaccaaagaccaaaaaaaaaaatgatataattggtatatagaaacctggatgtgtcgaaggatcttttcgtgtttcgtgttttgtgttttgtttggtctggtcttttttcttttgtgcttattctctttaactggttggtccacaattttaaatgattgtcttacatgtgacatgtgttgtttgttttaattttcaggtaattccatttaagtttctctaagtttaacgtaattgtggttccgaagtttcatagcacaccagatagaaacaatggggaaacatttacagaggaatgactccattgctgagggaaactatccaggctgtttgtgtggcataatgcattttcttgaccatcatcattggcaaagtgtcaaaaacttgatcccacataaaaagaacggtggtaaaagacgcatcaaatgtaaattctctcatctttttatttatttatgtttttcttttactgttattttcatttcctcatttctttcatacatgtgagattatgtaaactatatctgtaaaagctttgagaatgaaagcgtttgtgaacttgtgacttggcagttttatctgtttatgctgcacatctatacttctcttgaattatgaacttatagcattaagttatgatgtttgtagacaaaggaaaaaagaaaagaatttcgaagaacagtggctctgatgaagtgtttattgttgattcagctgatgcagaaccctttcttgtaagttattatggtatagcattgatgtttaaactgaatgaaagttgctcatattggttggttttcttaatctttatataaagctcctaaatgcatgagttaaattgaatatttcaggtcaagcaacagagtacagattcagttcccgcaaggggaagatctggaaaatctcgagttaaaccgcatagaggctggattctgagcttcccattgcagtcatggctgcaaagagctaatccagtcgatttagaatcttcggaaaattatataggtcatacaggtaatggtaagagaaaatcaggcagtgtccctcagagtagtggtactgcaaataatacaagaaagcaggttctttgtgcagaacataatagtgatacagtaaaagatagccagcttagtgcagatatatccaatcagaaacatctcaatgaatgtgttgacatactggagatattcaaggttaacaaggaattttttttgaagttactccaggatccggatgttggcaaaaaccaattccatggcctcaagaattccaatatcaaggttcgtttaaacaaatcaagatcatttccagtacccaattcttcacaaacaagaaatataaggcctattagtacacttaagcacaagcaaaatgaagtttggttcttccttaatggagaaaaatcaatagcaggggctcaagcacaacagttggaaggttcagaatttcaaaatgatcaatatacaaacgccataacaggtgatgttgataaaatagacagtgtcaataaccatggatggaatcagttggtcttggaccgtttcagaattatcaagcagaaaataaagcaagcactcaaggaaagcaaaacagaaaatggccacactactgaagctggtatgctaagtgacattttcgaaggtagaaaatctatcaatgggagagagatgtctgaaagattggagataactattggccaagatggtaacaagattgataattcgaatgatgatcttagaatgcaaagactccaacgtgtgagacgaacaacttctctaaacgaatcattagatagatatactcagttgtttgagcacacttctggtagtaagaaagtgcctaattacagccactctaggagcttaagagtgacaattgaagagaaagttccttctaatactcgaaaaaactgcagaaggaatctctcccttcctgatctcgacgacttttcttcctttctgaatggtgcatcccatgacgcatttttccgtttaggaatgccgattaagactctaatggctggtagtcatagcacaagtaaagacagagacaatcatagtggaccatatcactctgaacccttggagcctgttcaagagattgaattgcaggaaagtgaaagcagtgcaaattttggatacacagacagtttaactgtggatggaagtaaaaagagagcctctatcacagacaccattgttaaggatgaagacaagtcagctacagctagagaaagcagtgataaccaagaggaagaaattaatgtgacaatggatccaaaagaagagcttttacatgaaaattatgaatcagttattgaaaatcgtctttctaattatttaaccagctctactgagttccccacttcagaaggtaatcacaagtttttgttaattctcaaactttttagctaacagctaagttgacagtctcaaggcttatctataagctaaaatgtatcttgttgtgttcattactctcatggctaataaaactgtttcagaaataaaaatcacaaccagaggcagcaacttgtcttgtcactttgagaccgaaaatgcagacttcaactacgttcaatttctactcaaagtgtctggcttcacgagcaacgacgagcatgattggacatggcactcggtagaccaaccactaagtccttcccttttcaaggagatggaagaagaggaggactgctttggccatgatctcatcattagtgaacaagaggaacaagaagaagaagaagctgcagacactactggcttcatcaatcgccacattctgtttgacttggtgaacgagacacttggagatatgattgagaaatcgtatacatacttccccggagggttttcatcgttcgggtcatcaattcgtggaacacctaaggggcaacatctagtggacgaggtttgggaaagaacgagcagaagtttgagggtgaggccggagttggaccagacactggacgatgtggtgggtcgagacttgaccaagggagatggttggatgaacatacagtgggagatggaaacagtgacgcttgaacttgaggatttgatctttatcaattattggatgaaataatgttttagattcttcttcttcttttcatttttcaacatgaaattttgtaatacagttacagtatgcatatgtaaatatatagatatatatatttcttgatcaaactaggtaggataaacataaaataagcaattcaatcatcaaattttaataaattaccttaattctgttgtttttttagcttttataagtttgtaactttttttattttagagaagatggacattcggacaaagtccattacataaacatataacttatagagcaaaattaagcataatagacttaccaagtggtctacaataaaatgaaaaaaaactccaagaacaacctcaactaaaaatctaataaactcccagcaatcaaacataaaaaaaagtgtgaagaaaattaggttttcaaatcaaatgaacatgtaaccgaatcaacctatcaatgacaatcaactaatgatctttcaataataattgggacataacaatcacattattcatatacgaaataagagaaataatcaaacgatcaactatggcaaagcatccaaaagaactgaacaccacgaaacatagggccaatagatagatctggccaaaaaagagaaaaatatctctccctcaccgaagtaatttgatccaatcaatgaaacatcgacgcaccaaataagagcaaactccactccatttgccaaaatcatattaatcgctactcatctataagagcggtcccaaaacaccattattgcagaattaaaactaatatgaaatatcataaaactaaaccaactgaagaaattaaaacaaggcccaaggggcacacctactaccaaagttattcttatttttatgatttcttcattgttttggtattgtaaatcttaatctaaattgtcatctttaggaataagtcaattagatttcacatttacaaaatacttatcttacacgagctaatactattaaattgtcaaacagatgaccatctgttagggatgtgtccatttgaaaataattactaagtgtgatcaataatgaagatttgaaatcgatactacataatcaataacaaaaa

SEQ ID NO: 299900 - DNA, 1073 bp, Cannabis indica
taatacactattttcaagttacgataggatctgacattttgaaataaccctacaaggtcaaatccaaaaaattgtggatcttttgacagaagtctaaaactttaaaactcgaaactagcacacatttggctaaaatgtccaatcaatgaagatcaaaagcggaggggccacatggaactatgcctacattaagctataatgtttctcatataattctcaatgtgagattacgcctaataactattatagggggtctcatctcatgtgaaagagtaaagaattggttaaaaaatttataatggttagcattagaaaaagagatgtccaaatcaaaattaacctgataaaacaccctgcaaagaatcgagcattatggatattgcaagcaggggtgtcatggaagcgaatgactttattattgcagaattatcagtgaatagaccagcccagaagttgtgcccaaatcctagagccattacaactattgtagcaagaagtacagagagcttgagggaaaccaccattgcactcttagcttgctctggatggcctcctcctaattcattcgataccctcgtactgtgtcacataacaatttacatcatattctttaggtaaaaaaaaatgtgtaaattaatattatggctgattatttgagtgtacatagtttggtttaccaacctggcagaagcacttagaccatatgtaacattgtatgcaattgtttctgtgtttacactgaaaacagaatcaatggcaattaacgagctacagagattttttatttttcttcaaataattatgaattaattaatcaagagaaattaatgtatgtacggaaaaataaagctaaccatattgctattaaagaagtggttgatttcgagtttggcatcagtcctgctaggaacactagtatctcaaaagcccaatattccaagctggacaaaaacaacacttgaatgttaggttgtaaccaagcccaataagaatggaggaaaataaggaaattacaaattttaagggttattatattttttgtgctaagatatgtttttttattaaaaaataat

SEQ ID NO: 299901 - DNA, 5144 bp, Cannabis indica
tgatgatgatgatggtgatgaaggtgatggtgataatcatggtggtgataataataatgtacaagctgaagatgatcctgattttaatattgacagtagtcttagtagtactagtactagtgattgtgatgactgtgattgtgatgaagacagtattgatgaagaagatgatgatgatgatgatgatgatgatatatgattattatcattatacaaaagagaatgcatgagataattaagagtgagggagggagagaataattaattaaaactttgatcgatgattaataatttctgatctgtgtgtctactctttcttttaattaataataaataattgttattataatttttatgttttattaattttgttttgttatttattctagtactgtgtttaagatatttagcaaaagattttcagtatttttacactaaaaatatatggtctgatggacaagtaataaagcccttttatgaattaagttggattaatcactatatatatatatatcatggaatggaatggaagccatctattctacaatatatagtttataaatagatatataatagttgttcaaattaagaatcaattgttaatatatatagagttgataatttgtgtattggagaaggccttgatcctttttgactcgatttttctaataataatactcattcagtcagtgtccaaaactactccaatcaccaggtcatgctcgtttattgttattatgtatgtgaacaaattaaacgccgtcgtatgaaggaagttgagagtcctatagttgtggacacttgttgttgaaaactgctggggcttttttgatcttctccaagtcatcacactacaataaatatgcatctgtgactttttccataatacatcatactcactattgaaaaaactactattacaataaaattgaaattaaaaaatatgtatatatatgtgaaatttaatacgaaaaagtcttttgatcatcatcatcatcatgtatgttataatgtgtatatatatatagagagagagaggcaataatcttgtttggatctggtcatttggaataatgtaagacattataaatcttgttttgaattgtcatttgaaatctatatataaagttcagtagattgcattggggtttggttttaatgtacaatatatatatatattatgtgtgtgtttggtttcatatctttttaaattgtacatagaatatataggacttactgaatgaactgatcgtctaccttcatatatatatatatataatcatgtcatttttttattgattctctaaatggtccttgtctttgagatttaatgaccgaaaatttcagaaatataatttaactacgattaaattgaattaagaacgattaaattgaatagtaaattctatattgtgattataatattgaggttagctaataataattgtcgaaatttttgtgaaacaaaaaagacgtgtcatcctttgaagaagaggttatgaaggatgtagctagtcacacacactagcaaatgtatatatttgacattgtaataatttgtattttgtatgatgatatgatgagagaacaatttcaacattaattactgttcttcttcttcatcgcctgaatttcatgaaaaatttcaactttatcagtaataaagtacaaatcattattataacactacttgtttcgaatgtgggaaaaactaatagtagtttataacaaatgaacacttttagctaggatgattaaatcaaaatgcatgcatgggtactgtagaattaattgaatgctgtaattaacaatatatatatacatatatataaactgctaatatatataactgtgtacagtctgttgaatatatagaggcatcaccaacagtgttgaatatatagaggcaccaccaacaaaactatgttggattaaaactaacttttaactacatatatattttcattggaacaaattaaaactatggaacaagtttgacaggccataacataaaagtttctcataattgatatttaattgcatcacaacctcagatagataataaccttaaaataatatagcttgggaaatggggaaactcttaggtgaagtcatatgatcagggccgtacgtgtaatagctagctagtgagatatataagaacctcaatatatattaaagttgtggctgacatcatgcataaagatacaccgatcgagaatgttaaattataaaactttaatatataatcagataacataatcatcaattatatattgtttgatcttctaaaattgagaccaaaaatagtgaatttgagaagatctttaaactggaagtcccaaagcccaacgcaaaaaaagcctacaatgaattaatagtttaaaaataataaatattttaattttaacctcaaaaattattataacatataattaaaatttggatatatatatacattgtctaatctaaatttctgactaattatttttaatttatcgtaattaattgcagccagattctccataagcctgcacttgcactaatttataaaattgttactgatgcacacatatataatcgattattgtccattttttttataagtgatcacaagacataattaatataatgtattgttttgtttattccctttattttatttatctcaaaattccacattaaggagatcaactactgatataaattgtttatagtagctgtattagatttatttattaatcaaaaaataataattaaattaatacaaattaactttgcttaattaataaataaataagaggcggggtaatataggctgaattgtttgtaagtggaatataaaatatcaaccaataagaatgtgccacgtaatgaactatttgtggtgaatactttattgttgttcatcttcattttctctcaaaatttcgcgggttgcgtttcaaactaacttttactttgtcagatcagatcaaaccttttcagattcaattcaaaaatattatcagatctcaatctccaatctccgaatgtgattcttcattttcaatttcaatttcaagattcaaattcattcatagtcatttaacattttgaattaattttgtgaaattcagaagaaggaaataggaataatgatggagcgagcagattcagggcagaagctctactcacgcatgaggctatgggagcttcccgatcagtatgttattgaaccaaccgatggaacttcagctccttatctctctatcaatcgactcgatgcttctctaagcttcattggttcgttcttcttcttccttcgatttgatttgatttgattcgattcgatcccctttctctttcatatataataaatattgtatgtgtgtattatccagatgagcttcctgaatccagttctgttcgagccccaaaaattcagacgatttacggtgttgttggcatggtcaagctcctcactggctcctacttgatcgtcattacggatcgtcaatgtgttggaacttatttgggtcatacaatctttaaggttttgtctttgaaggtttttccttgtgatcattctcttcaaaattcggatgcccaacataagaagatggaagctgagttttctgctctcctcaatattgttgaaaagacttctggtttgtttttctcttatgaaacgaatctaactctcaggtgaaactgaattcttatatttttttttgttaattaataaaaagaatcaatttttcttatctttgtgttctttgtgtatacagtgtacagaaattgcatgatttgggaggtgaatctaagttgctttgattttttttttttttgttgaaatatcagtgttattcttaatgcatgtgattaagggaatttcgtagattttaagtggaaactttccattgtttcttttacaggcagaacctaggtttttgtggaacaattatatgttggaagtactcatagataacaaggttagcctttttttccaaattgttttcaaattcttatgtttctagtttctaattgctcacatttgtatgcttccttgttttgcagcttgatcccttcttgcttcctgttatccaaggaagtatcctttctgttgattagtcttttatctctatttagattactcttcttgattattttttctctaaaatgttaactgttttaaactggattattttcaaatgcattacttttgggggttattattctccttaatcaatcaccaggcttccaacactttcaagcagcaatagggaaggatgtaattgatgtcactctgatttctaggagatgcacgaggagaaatggtatctaaatctcatcttacccatcttgtttgttttctgcaactctatctgcattcttcttattcagattaagcatcttagtacagaaatatgagctaataataactaaaacactgaatgaccactaatagtacacaaaaaattcatcattttttaaggctgagaagcttaaaaagattgacaattcatcatttatgtatttatgcatacataaataaagcttggccctttgatcatatagttcattgactattcaggcccgtttggcacagcttttggaaacgctaaaagctgcttttcaaaaaagctgtgacaaaaaggtgtttggtaagcagttaaaaaacagcttattgaagaaattatagaaaagctacagctaaaagctaaagctggtacaacccaacttttagaaaaagctgttttgattaaaagactctataataaattatttttactaaaaatttatttaattatttattatatattataaaaaataaaatattttttaaatgaaaaaatatttaaaaataaataatatttaaatttctaatttttatttattttaaaaatattttatatttatattttattattaacaaacaatatcaatttatgtttcttataaactacaattttatcttttacaagtgataaaaatataatttaaaaatattaaaaattattttatcaaatgcatataaatttatactatagaaaaaataattaaaaatatataaaaaataaaaatttatataacatatttttttatatatatttgtgattataatgaactagattaaaatattatcattattgtaatagaat

SEQ ID NO: 299902 - DNA, 2383 bp, Cannabis indica
gcgttcattccgggtcgtttgatttctgacaatattcttgtctcttttgaagtcttacactttttaaagaggaaaactcaggggaaaaaaggatttatggcgctcaagcttgatatgagcaaggcctatgatagagttgaatggccttttttggaagctatcctgactaagatgggctttcatcagtggtggatttctcttattttggtgtgtgttcgttcggtccgttatcatattacccatgggggtcagaagattggtccaattgaagcttctcggggcatccgacaaggggatcctttgtctccctacttgtttattctttgtgctgaaggtttctcggcccttattcaacggtatgagatgagaaaatggatccatggttgtaagattgcgcggagtgctccctctatctcccatatgtttttcgcggacgatagctacttgtattgtcaggctactgagggagaagcctctcaaattatgactttgttgaggaagtttgaaattgcctcgggtcaaaaagtcaatttagcgaagtcgtcaatcttcttcagcaccaacacggaggtggctatgagagatcggatcatgaggattacgggcatggttcaggctgatgataatagtaagtatcttggtttgcctagtacaatgggaagaaataaatcttcgattttgggtttcttgaaagaaagggtgaggaaaagaattgagagttgggatgctaagatgctttctcgtgcgggcaaagaagtcttaattaaaactgtggctcaagctcttcctagctatgcgatgagtgtctttcttctaccgttgaaaacttgtcacgagatggaaagaattctgtgttctagttggtggcactcttcttctagtcatggtaaaggaatccattgggaatcctgggacaggatggtggcccataaacattctggtggaatgggatttagaagccttcacgatcataatcttgctatgctgggtaagcagggatggcgtcttttaactaatgagtcttctctggttgggcgtgttttcaaagctaaatattatccgcaaggttccttcttatctgctagtattggaaataatccgagttttgtctggcggagtatctttgagagtcaagctttgattcagtctggggttagatggagtatagcaagtggggactctgtggatgtattgaaccagccatggctgatggataaagacaatccgtatgtttcctcgtcacaccctgctttgatcggtgctaaagtgtctcaactcatgatcccgaatgctagacaatgggatgaggaggttcttttggacctcttttcggagcatgatagagatttaattcgggcggttgtgatcagttcttctatggcatttgatactcggtattggtctttcgaaaattttggtcagtacactgtaaagagtgcttataaaagacttcaagttctgaacggaaggtggactggtggagataattccggcctgtggagaaagctttggaatttgaaaattccagcaaagatctctgtatttctttggcgtgcatgtcgtaataaccttccaactcgggttaatctgaaggtgaaacatgttaatgcacctgttgtttgccctttttgccaactatacaacgaaacaattgaacatgtacttgttgaatgctcctttgcccgacagtgttggcagcagttcaacacccatcttcgcattccggctggtgtgaacttcgtggactggtttgctacaatctccagtacattgtcttcttctgctctgggaggtatggctgtgatttgctgggctgtgtggaaggcgagaaacgaggtggtttggagtaacaaaaagccggttgcagcagctgttgtgcaatctgcattagcttattttgatcaatggaaaagtgcgaaaactcaaaatgttgagaatgatatgcctgctggtactgtcattatcccgcactgggaacctcctagcgttaatacgatcaaaatcaatgtagatgcttcggtttttgcggctgagaaacggtttggatttggttggttggttagagaccatgagggcagtgtcctttttgctactgctatgttgcagcagtttcaggtggagcctgctatggccgaagcaattgggctcaaagaagttcttagttggctgaaaactaatgattttcctcaagttgtgattgagtccgattgtcaagtgcttgtcaacgctgtgttacacaaagtaactatgttttccccgtttgggttacttgttgctgattgtatttctctcattaatatcttaaggaatgtttctcttgtctttgttaaacgatctgcgaacaaggccgccaattatttggctaggcatgcttgtttatact

SEQ ID NO: 299903 - DNA, 1721 bp, Cannabis indica
attagctattaaaaaatattattttcccatgtaattactaactattttgccaaacaagatattaggaattcatatgtaattaccacttcatatccaaacacaccttgcattttaaaatatagtgtaattactaaactgtgtaattactaccctagtaattatcttacctagtaattacacagttactagtgatttagaggtaattttcgttgttgaaatattttcaaacatccaaaaaagtacaaaatgacatgctgataactatagtaaatagttactacttatattttctcaacttttatcgattcattttcaaaacgtttcaaatcactcccattttgactttgaaccatttatacatccaataaatgataaaattaagtcttatatttatagggacacgattttgtcccgtgatgtacttttacgaaatgtaatctgtggtacattagatgagtcttagggtacattagataggtctcagcgtacgttaccattttttaactctaattacccataaatcaaccccagcccttagatcaaataactctcccatctaacgggtgtcgtacatcacagaatacattacgtgaaagtatatcacgggccaaaatcatgtccctatatttataatagttatcatttatttatagcaaaacattttttttagaatattaaaacacaattatatagtaatacattttactaatttaagaatgagaataatggagattcgacttataagttttatgttcatcaatttacaagattggtaattcctttcttgatcatcgtctatacacatttgtaattctatgttatatgatacaatttgacaaaatattatttgtcacatatttatcacagtactatctcatagatgaaaaacctataatcctacccagaatcatgcttttacttcaagaatcactggatttaatcaaagaactctaaagcaatcataggtccgattgaaatgtatcaaagaaaaatttcctagtactatactcaaaagtcaaaagctaaaagtttgaagttggggacctcatcttaagaagggtatttctgacatctcaagaactggtaatgggagtcctaggacctaactgggaaggaacgtatgaaatccagtatatggttcgtgatggaacataccaattgaaaatacttgaggagtcagagattccatgaggttggaatgtggaccacctgcactggtactatcaatagttacaggtggtcggatctcatttcactcgacatattttaattttcttttttatttttcaaagaaatgtaagtatcagggcacgaccctggcgaagataatgttatgaaaagaggaatttccaaaaaatatgtttaaagtcttttcgaatttttatgtatgtttctacaagtgataaagaacccaagttcttagctcactttgagggtattacgtacagccatgtacctctaaaaatttacttagtacgatctagggcagaagtacaaacgaaagtcaaaggtttaggcctttggatcagaacctcgaggagtcgggactaagttacttctcatcatgttagatcaataaactactagttggctcaggtcgataattgaaagaattccaggcttaaaaaaatcaagaaatggaaatttttaagaaaataaaacaattgaaatccaagtggtccaggctgctctgtgttggaagttattttaccaggatctta

SEQ ID NO: 299904 - DNA, 1273 bp, Cannabis indica
aaaaaaaactagagttttcatcaccaaatttgagccaagtgattttgctagtttgttgtaagaagctagcatatcttttttggctattaaaaaacaagtttggcctacttttctgcaacttggagatcagtatcaagagtattagccactagatttgattgagccttaattaccaattctttagcaatttgaaacttcttaggaatatcccccggttcccttctattaaaactctttaaacagtgtttgaccccattcaatttaccaatgatacatctcaaccctctcctatttatctgcctattccagttctaaagagcagaggctttgtactgagggtgctccaatcagtaattaaagaattgaaatggcttgatacctatattcctaattttcacttatttcacaatacaataacaaaatgatctaaaaaacttcccaattcattactgattcagtatccaaaaagacatccaaccagttttcatttttaaaaacacaattgagtttagaaaaaattctattttctagtttatgtttattggactaagtaaataaagatctcgaacatttcaaatcatcgacctgccccctgccaacaaacattgagcatcctctatgtcattcagggacacaatcttgccccctattctatcttcaacataaaatgtagcattaaagtctccaagcacaagcttggtagaagggctacatgcctaattggccttaaatttactccaatattccttggtcggacccatgtaatcacattcttcaacctctactgtacacgatttaccacctgtttacaattatgtttctgtctatagagttgattctaggtcagactgagaatcgtgtaatacctcagattgcagagcttccttgactggctagatcgaaggaagctcaactgaattaacatggacgatgatcctaatgtcaagcttctgagattctattttcttccgccccatggagagagagagagagggtcttgcacgcttctttaatatcttaataacatgagtatattattacatgagcaataataagtttaattgtgatttttcttttttgaaaatagatattattaatcattagcaacaaacatcctcatcaacttgatgagcaatacaataagaaaagggattatttcacaaaaacataaaaacaacaaaaaatttacaaaaatacgatttcacaaaattttaacatttttacgattttttttgaattttatttacagaaaatacagtctttttatgttgta

SEQ ID NO: 299905 - DNA, 1879 bp, Cannabis indica
aaaaaaaaaaatcgttacacagtattttagtaattaaaataagttaatcagaattttgtaagctacccttttaaaaatagtactattacaaatgttcaagcgggccgcatggtctccacgtttcgtttatgagtggcattctattattgggcattgtcttggagtagctgtactcacgcctcggtcagagtgcgatgcaacggcttgaatctccacgccacctgtggataatatcaaattaattatctacttaagaaaacgtaaaatagaaaaactgtaactgataatatcaataaaatactttctacgtaatatatacgtggttattcgcctcgtaattttctttttatatagagagataatattctatgcatcactataagctcatatgaaacttccattttcatatataaaagccatatacaacaatttatatatattatgcacatcctacattgtagtctatggcatatgtacgtactctcactcccctataaataatctacaactatcatttctaagcaaacttctctaacctttatctctaaattttataacgaaagggctcttcaatatcatcatctatagatatcacattattattattattattattattactgtagtcttctaatatttgtaccactataaatctactagctttgttgcgtaatgctaaacaaaacagcgtttaagtactggctctaccttatggcgtgatcatgagatggggtgtctattcctagacaaacatatacatgccgtgagtatttatgggaccacctaaatgctggtttgtttagcgttaagctaacaaaacttcaaataccggtcatgcatgtgattggagtaggaggaaaaatagcaataatatatagttagcttcttttcaatgagcaagtaagagtagtaataagtataatattgtgataaaaaaagctaattttaaaacaaatttgtttgtactccactccccatcccctctaatctctttatctatcttactctctttcttaccaaatacaaacttaaagattcgacattgagggtggtggatgatttgtgtggtgaccagttgtaggcggcggaaggactgtgatcatcaaattttggctatatcataatgattctctttttattattattattcattaagagaaatagttatagaagaactaaaaaaatatctctccaaacataattccctaaattttcactataatttgagatcacaatgattcttcttaacaacttaactgaaccttttatcattatttttattattattattattattaaaaaaaatatgccgtataaatacatttaatttgtttaaactgttaaaactaaatactcaaaactcaaagattgcagtaaagtatttcaaactgaaaaaaatttcaaattaacaatgtcatactgttacaaatatattttggtaacaaaattttttataaagattatttttaacaaattcaaaaagtctattttttttattattatttccattagtaaattttttaaaagattagtgagttactgatggtttgataataaatttatattggtttatatttgaataggtggatatgagaaataagtgtttaatggttgttatggtaattgaagtagtgatgttaattaatagttgttgaaaatgatttttgcttagaagagagggttgtatgagaagatagtaaactttattgatagtttggatgttggttgtttggtgttgttttgttacactaactcctcaacccaagtttggtatttataaggagctaaggatgatactacaactttctaaatttttcttattttgaattacaatttaactttctaagatattctataattttctaagtttcttagctta

SEQ ID NO: 299906 - DNA, 592 bp, Cannabis indica
taataataataataatgaaactcagataaataataataataatgaaacaaacaagttgccatgacacacattattgaaactaacaatttatttttctgaaaaatcaaaaagttgaatttaaagtaccaattaaaccaactacccaaacttccatgaaatcaaatacttctctctctcctttttaactattcctattcaattcacttattaatatgtacattgattattgtaactctaatttaattatgataaataataataatgaccaaaacctgacacaaatttcctcaaaaataaataaataaaaacattacacacacaaattacactttcatttttgaaaagctactattttttttttgatgattaactctacattacaatatgtatttctcaatttatttgtagttctaaattttcaaatgctatatctttcttttttaaaaaggcaattatatccttttaaaaaattcaaatattaattttaaaattcaaaatataaacaaataaaaataattaaattaaaaattactatatattaaaactcaaatatattaagagaattatctcatatattatttttttaaaaaaa

SEQ ID NO: 299907 - DNA, 1180 bp, Cannabis indica
aaatttgagtgtaattatactatttaattacttaaaactttttattttaaaaattaagtactaattttttttagagccttttttttttttagatctagttttttttttttttttttttttttttttttttttttgttatttttacgtaaatttcacataaaattctcataataactaacaaatcaacttaaattgtaatcaaaattcacatagcaatccacataaaaactatcggagcaatccaaatcgtaaatttaaaaacaaaaattaaaaatagtatataaataatttatcttttacaaattattttaacaaataaaatatcaagaattaataggtaattaccacctaatatcaaaataaatcttctacttgtaattttataattaggatcataattaaactactagcacctttcaacaccattcaataatagagtggataagtttttgtgagggttaaatagaaagaaaaatgaaaagcaaaaagagtgacacaaagtggtggactcttctcttttaattattcataactaaataagaaacaatggttttggtttctcaacatttgagtgccgccattactctacgaccgccagaactcacagatggcgtcggaattcgctcaaactccttgaggttccttccggcgagtaaaaagcccatctcaatttcctttgccgccacgtcacaggatgcgattccttcacaacctgtaatcgagctcgaattcataggggtgagtagtagtagtagtagtagtagtacattattaagctattttgaagttaataaggtactttagaaatggaaattggtaatttgggtttgatgttgcagccgaaggcaggaaacgacgggtcgtatccagtagagagggccaaagaaataagtggagagaagttgctgaggaacatcatggcggataataagattcagctttacgccacctatgtaagtctttccaaccatctattcatactcatcttcaaataaatcaaataatttagattgttcaaatcatataaaaatgcatatcttgtttaaataaatatttgtctatttataattaaatagtgaataaatattattataaattctgtatttttgtaaaaattattaattaaatttttattttattaaataataaattgaaccatgtaattttttgttaaaataaa

SEQ ID NO: 299908 - DNA, 2868 bp, Cannabis indica
aaaaaaaaaaacaataaaatatagcaactttatgctcaccacgtgttttggttactagttattttatggtcttaatataaaatatatttgcaagattagtaccaatggaatataacaagtagtatatatgcataattgttatgacctgaacctcaacatcgatgttgtctaaaatataattaatattttactctttttttggtaattttaaaattatgaagaaaatgtcttgtttgttcaaataaaataatcaaatatatgaagatcaaaacaaattagtgtgaaactatattcacatagagagaatggctacgcttacggtacctcatccagttcctcctgtgggcgacgattgtgacaatctacacaaagcatttcaaggtttctctttaattatcatcacataatattcttattttttcttctatacattttttatgttctattttttctaatcacgatcgtcaatattatttcaagtcttgcaaagacttaagaatttgaacaagaatctgtgtttattaaagctaaattcgttctaggaagacacaacatttgaaaaggctttgaaagagcaccatttgttacctttaaattaaacatgttcatgtggactactctcaagtttcaacaattttagtcattttaactagaaatttgtcggactaacaaaattaaattgtaaaatttgcagtgtaaatttagtggaaaagttcaattctaggtcagacctgtgaccaaacatgcatattttgccaataaaaaactttagaagtgccatgattatattgatcaaattatgataatgaattaacaaaatttgaataatttaattttcacttttgaatcttaaattcaatatatgatttgatttttcaggatggggaacaaatgaagaagcaataatctccatattggcgcataggaatacaagtcaacgtaattccattcgccaaacttatgttgagacatatggagaagacctcatgaaagcattagacagtgaactttcaagtgattttggggtcagatttatatatagcttaaccattttaaattgaaattcttgcttcatttgattaataactaataacaaagtgaaaaaattgtgtacagagagcagtgcagctttggacactgcatcctgctgagcgcgatgcattgctagcttatgaagctgtaaggaagaacactgcgaacggccattatgttttgatcgaaatagcttgtgcaagaagttcacacgagctattccaagtgagggaaaattaccatgctcgtttccacaaatcgctggaggaagatgttgcatatcacaccgcaggcgattttcgcaaggtagcctctacttgttcttatttagtttgttacaaaaataagcttatatttcaatttcttatggagagcaatatcaaatttattaccatcaaaagttggtgtacggagtctcaaactcaaggacccacacaaacacaaatcctctactaaaatcataccaaacatatgtttgattttacattctcattcccaagaatccaaaccctcataacaaacaccttttgtatgactaaggtagagaagcataaaagaaatgtgaaaacctattttcttattgttttgttgtgttttgagtattttctatcagctattggtgcctctagtgagtgcatacagatatgatggagctgaggtgaacatgacacttgctcattctgaggctaaaatactgcatgagaaaataagtgagaaggcatataatcatgaggaaattataaggattctcactactagaagcaaggcacaactcaatgcaacacttacccactataaaaatcagtttgggaatgatatcaacaaggtaagctcaaattatatataatgtttgaatttgtactttggttggtgcttgtgtccttacaccaaaacacaaaacaaaactcttccaagtcttaacaagtaatgcttgagtacaactccataactcaattggatttgtttaggcatcagagtattgataggcttctggttttctagtctacaagtttgatttccttagtgtcgcgataaaagatttcggattgaaaaatagatcttaattagacttctaaagtcattggtttatgctgtaaaaagaatccaaaaggctaataaagtcatgaaagaagtataaactttgattacaaacggtagagggctcttccaatcgatcacaaaatacttgttactctcattgatggaattttgttgtgatttgtttgtggaaaaacgttatgtgcaggacttgaagacagatccaaaggaagactacctagcattactaagaagcaccataaaatgcttgacttgtcctgaaaaatactttgaaaaagttgttcgtttcgctatcaaaggccttggaacagatgaggaggctctgacaagagtgatagtaagccgagctgaggttgacatgaaacgagtcatggaagagtactacaaaagaaacagtgtcccacttgagactgatataaaaggtgacacttctggagactataaaggcatgctgctcgccttgattggtcatcacaatgcctaagttatttcccattgtgcatgtgttttcttgggtttttcattctaataaaaataaatgataatatggacccctctttgtactaagatttcatgagacagttaaagatgttcttgtcatttcaaaatcactagaggattctgtattctcaagcaaagaaaaaagggaatttggctttactttgtatcatatttactatgttgtgataataaaggctaattagaatttttacccctaaattttagcatgtactaaatcatgcttcctgaattattctggtcgttaaaaattcccca

SEQ ID NO: 299909 - DNA, 2541 bp, Cannabis indica
tttttttcttttcttttttcagtttaaaagatataatgtcaaagttaagtttgccgaaaccctctgtcgtgcgccacatgacttcggtgatccaaccgattctggagaaaggaattgttgatcactcaatcatacacaggatattaatggagtacttgaatattgctgatcaggtgtgttctgcgattgcaaaaatttcatttaccttccccagcagagactgcctttgcttttcaaaatttatattctcttctcctaaatcaattttgtcaaaagacttctgccacagatgtgctccaacaattatctggtccacttcttgttcgaatgatccataccagggatggatctaggcttgggatgctctgtgtcaagcatggcagtgcaaaggtttggtgctaattctcctgatttcttagattctgtcacttaaccagctgtttacttaatttgtttcattcttgtccaatttattataggaaagaaagaaaataataaaaggaatgaaagaccacgtacaaaagattgctcgtgatcaatgcggaagtatggtaaggcttcttgaatttataatggtttcttttgagtcttttttgtatcctcattcctaaccttcatattatattatttgcttcccaggttcttgtttgcattatttcagttgttgatgacacaaagcttttaacaaaggtttgttccttttgtgttgtttggtgtagaaagtggatttgttacctaatggagtcacattttacttcatcttatacgttgcgttaacttgattgcagattgtcattcatggagttcaagaaaatttagaggagcttgttgacgataaggtttattcttttccctaatacttcggttaataataaatccttaaaaggctaacatgtgatattttttaaccatgtcagaattcaaaagttaataggtttagcatgtttaggaatgaagtggtagttactagtttcagaaaataatctttcatcagtaacgctctttaaaatttggacttttactacgtgggaaaaacaattacagaaattttagttcttcaagaatgttattgctgaggtggttttcaaactttttgcgattttcagaatggaaggcgtttcttactacagctacttcatccaaaatgtactcgctatttcactcccgacgagctggcttctctcgatttgtctctagattctctttccggcaaagtaattggaaaaccatttctcttttgtatcacatcagtaattgttattttcataaccctatattcaggagtaaaatgacattctggttggacatgattataggttaagggatcaagcgaggaggttaaacctaatgatgacacagaagagacggaaactgaggccaatacaagctctgaccctgttgagacccttaacatggttgagggtgggaagaaggatccttctgttcggagggaagagttgttagtcaagagtgggctggctgaggtctgttgtttcttcataatgaacaatatcaactctgaaacagagttccaatcaattgtcgcgtctttttactgccttcttttcaatgattatttctgcttgatattgcattgcagagacttattgatgtatgcattgaaaactcagacaaactacttaaatcaaactttgggaaggatgtgatatacgaggtactcaaatactcgagatatttaattttgcgtggttctgtaaaaccatcgaattcttatttttttacttctttattccattttctgtttcatgcaggttgcaattggtggtgcagatggcattcttaaaccaactatggaagataagttaaacgccttacatgaagccatagcatctgttgtagcagagcctaaatctgaggaatcgaaggaggaggaacacgtccttgaaaattttcattctagtcggaccattagaaaactaatcttggattgccccgcctttgcttctacactatggaaatctgcattgaaaggaaagtgtgaaatgtgggcctcaggtcacaggtaaagctccaaacactatctcccactcttcaagagctaattgtataaatacttattctactatacctgtttttgtgttgtgtttgcagtggcaaggtcatttcggctttcttagaatcatcagattctgcagtggttgcacaggcaaagaaagagctgcagcccttgatcgatcgtggtgtactcaaaatcccggagaagcaggcagtcaaaaaagcttaattcaatttgaaaagatacgacactggctgctcaattattatcagcacagaaatctccataaaatattgtagggaatatgaaattttgtaccgtttattacaattttgagctattataaaatttgatttttttgagttatgtacatgagcatagttttattaagagtgttcaacctatatgttgttttgtttctcatgccatgcaaacatagatcaaggataggctaattaggattttttgtctccttaactttaacatgtactaaatcatgctccttgaacttttctgactgttaa

SEQ ID NO: 299910 - DNA, 2662 bp, Cannabis indica
tttcactcctcttgaggaagcattcaaacgagaaatgagatcaataaatatgttggttttccctgggatagacatgctacaaaagcttcttggggagcaagaacatgaggccttcacgactaccagtaaaggtttagtctcctgctttctattgactttccattgacattttttacagttctatagttttgatttccttatcttttgttcttttatcacccttgatattaggtatgaagcaaatagaatgcaaaggcaaaccaagtattaagccagaggcagcgaataaatcagatattgattctccaacaaagagtgatcctcatggtggtgatgatgctgatttgcatcattctgatgaaacaactgaggaaattgctgttgtggaatctggttcccattgtgtggatgtgcttgttggcactcctttgccgggtagttcattaaatgcttctcctgaacgtgagattccaaatcctattgaagagaccacatgttctgactctccttcagcggccaaaatatgtgaagctacatcagactccaaaagtcagcccccctctacaccaagtcttgatggtgtagagatggaaaataaacctgtatcagctcatctcggaaatagcactgtttctttgcccagaaatccagatgtttctttaaatgaaatttctttgatggacagttccattgaagcttcctgtgaagttaaaactcaagtttcaaacgaggaggctatacagtttgaatctcatttaggggccaaatgtgatttggaaagtaaatgtctgtctaaagaaactaatcagttggattcttctctcaaagataatacagagtctttgaatgaagatggtatggatgatccccatggaaaggatgacaagaatgcgattgttgtacctgcttcgttctcaggggaaaccatagctgagaatgtttccgaggaagtcctggaaaatccagacatccccatctctagttttaatgactctaatgggagttccgtgctgattaaatctgatttggaccatcaaattgactgtgataatggaaaagctccagaagctgcttctgatgcaatggattgtgagtaatgtatttcccattacattctgtcagttacagagctaatgaacatgaaggaacatctgaatccacttcaatgtatttgtcttcaactcctccgccgagcttatcttttgccaatccttgcacatcgtcataacacagaatttttcattcagttaacaattttaagggtcttggcaccataatgtcagatgactcgtttctttcatggataggggtagtcattaggggaaatcattcacccctttaaacttacttttctcttaaaaacactgattctgaagacaatatcttatccttcggagttgaagtttcgaaatgtcttgatgatgccagttataagaagatgtggatttgctgctggggatacaaagcaaacatgtgcgagcttaatctgttaggccagtccgagtctgattctgctgaatgttgcgaatttcttctttagtgtcttgtctgcctgaaactcacaagtaacaccgagtagtttgtaagaaggttttagaggtaatcctgtcatttgttcctgcatcagcacagcaaagagaattctcgtgagaattgattgagattgtcataattccttgaatgctgcaagaaatgatgtttcaatggtactgtgtcaagtagctaagtttcaagaatttagtaaaaatatgtgaaattttatgttaggccatttgaatactgcttgagctcaggttagggtttcaaaattttgtaattgtgtactaagaactgaaaagggaatcttcaattgaagaagttccttcatgcatgattgttattattatttttatatatatttttttcttgcatttgaaaaaaatttttattctgcaaagtgttaaatagacatgtagattgtattagacagtgacagtgggcatgatttctatgtatttacatgagggattttttttttttattaatatatacttttcattatatttgcagttattatgatataaactttttatttacacttttacaaatttaatttttcataaatttgattttaaagttttaaaattacaaacatacgattatattgcattatgcaaattaacccgagaaaaactgtaaataaattataaaaacaaaacaactaaaatataacatcaaaaaacaacccattgaaaaaagaaaaaaaaaaaaccacaataataaaaaaaaaaacaagagaaacaactacaaataaaccataaaataataataattaaaaaaaaatcgaaaagcttataaaaaatataggcaaatgatatatcaagacagttccacataaaacatcaactaaacaatagctgaaaatacattaaatatacgttcattttaacatggttcggtaaaataattacaaatcactgattcaattcaatacattaatatcaaaaaaatatacatctaaacaatcacaaataaaatctaacatcaaataaataataattaaaaatcacacatatatatctttatatattaaaagtgcctatctaacggcattggtttaatagaatatacttaaaaataagaatattctgttaaatttaacgattaggtttgatctcccgtt

SEQ ID NO: 299911 - DNA, 2797 bp, Cannabis indica
aattaaatttaagtatttatttgcaactgggagttaaacttaggtatttatgccgcaaataactcaaaaaaaattttatatcatatattatgagtttgttccattggctaaaaaaaagtttttcaacaaaataataataataagaagaaaaaattgagtttgacttaaatatttagtgtaaaaagataaatttattttattgtgatgtcttaactatcagtttcgatgtagaaagtgcccaagtggggttatgctctgttgcggttattgtccagtttctctcagtcttcttcctcgtccctttgttttttgcttctctaactactatgctcttcccatgatctcttttaactgcctacctccaattctttctctccatgatctcctttttttcttgtcttctcctatcaacattgtgcctagttatatccagaaccaaagcatctttgctttattcctccatttcttattttctttcttcgattctctgttttccatggattcaatcatcaaggatatgcactcacatttacccttatatgagaaggagagagtggtccacaccctcacttaggctgatcttagtcattcgcatcacgccacaaaattttttattgttgcccgttgtatctcaaatgctattaatcctaaatcctttattaagaaaatggaagaattcaagactaacaaataccgatttaatgttcttattctgaatttcactctgaaatgttcttgttaactcttggttgtgcaggtgataagcatcagattcttgaaggtgaaccatggaacttcaacaacaacctaattattttacactcaccatctgctctacacaatgtctctaaggaagacccgcataaagtccaattctgggtgtaaactcataaactacccttcctcagcaaatctcgtgttctttctaaaaaggttggagaatgggttggtgattatattgatgttcatgaggactctcttcatgagggatggggaccttttatccgaactaaagtttggactgagattcatcaatctcttatgaggggcaaattggttaaccttccacaaattcgagatgaacattggctagagtttcggtatgaaaaattgcccatattttgcttcaggtgtggattattggggcacccttttgaacgttgtgcctctatccttgaattggttgatgatggcattgaccttgaccttccttatggacccgaaatgattggggacaaattaccaaaaatagggtataatcgatatagacatgatttttccaaagtcaatgcctaccctttcttaacccgtctagctgggaaatccatatgctctacctttcctctccttccacgtcccatacacacctcactccttactagtcacgaagataacctacctcaaactcttgagacaccacttaaagaacaaatccgtgaatttccttcaccctttccctcatattaccaatcaaatataccttcatgtgttgctaattttcttccctttacaactataaacacctcttctacaccagactgatccactcatgctgctcccaccactgtcacgacaaactttattgctacttatccaccaactgaccgtcctattggcatctccatttctccttgactggtttccactgctgccattccctctgctgttcacacaactcttatacacaagggtaaatctattgatattaatatttcaacctcttttgctactagttttgaggcagtcattacttcaacaatagccaaaggcaaagctatttaagatgttgattcttatctgcattttgggacaaataataagactttcaaaaggcaagttgacccatataacttttagaaattgttgaaaagatgcagaagtaatattcccagtcgttcaattattgatggtactgtttcttagtgtttctactttagctatggagtctactgagttgttgccatcttctacagcgggtgttgctgatttgcaactctgctcacaaccatgaatatcataagttagaatgctcggggtttggataacccgagggtatttcgctgcttgcgtttgcttgttcgtgagcaaactccccatttgttatttcttatggaaactaaagttgctactggttctctcactagattcaaacattccttacattttagtaatagcttagaggttcctgttgtgggtttaaaaggtggaattatgttgttatggcaagacaatattgatgtatctttgctttctatgaatacaaattattttgattgtatgtgtcttttaataatggccctcggtggcatttcttggttgtctgtggttttcctgagatggttaataagaaacttacttgggccttgattaatagccttgctgatgtttctccgttggacccttggatgttcgttggtgacttgaatgaaatttttctgacactcataagaatggtggacctcttagacaagataatcatatggatgctttttgctccactcttgataaatgtttattatctgagtcccctatactggagatgattttacttgggctaaaaataaaaataatgctaatgctttgaaaaaagactagactagtgcttcactaatcaagtttggtctgatagtctcttactcccatcactcattcaccttgactattatggttcagactactgtgccctcttaatcaatgtctacttcacattgcaactcgatcctattgttagacgcaggtttcgtttttgatttgaaaagatgtggctcaatgactcttgtgttgggttttatgccct

SEQ ID NO: 299912 - DNA, 2170 bp, Cannabis indica
aatatctcagtggaatttgaaacccattaacatcttgaaagatttcacaaaaaaccggatgcggcctacaagtgcttattactataacatgattatttttctaaagcaaaaaaaaatttacatgttcaagtacagacttaatgctgtttgataaaaaaaatgtttagacttaatgctttgattcaaataagatccactcaatccatattaataattcctttcaagaaacacgtatataatagatgacttaagcagtccaaaggaattcagaatatttataaccagctcattagagctgaatggtgggcatggaaggcaaaacataccgtgataaagttgccggtgttctggccatcagcccgcatgtagttgttggtagatgtgctgtgaataccagctgggatctgcttagtaatatccacaggaggttgaggagcaggagcaggagcaggtttggcagcagccacagtagtcacagcaggtgcttcacttggtgcagctggagctttgtttgtggctggtttgttgggactgggagcctctccactaccaaaaagataacccaaggaactttggccaccaccgctgctatttccacgacccatgtcttcttctaagatagtatcctctgatctctgggttacaatagatgaaaatggaaaaaaaggtatgtagtttaatccagaatgaatttctcaaagaagcactaattatcaaacacatccaacccatttcttaagcaacgcttgaaataaaccatgatttagcgaccaacaaagaagcattctcaaaattcacaacaaccatgtcgttgttgtccccattgtcatgattaccagtaccatatatgtttaaatactttcttgctatagtcaaataatacaataacaatgctacactccatgataccggactgatttgtccctaaaccatcaacgactaggtagaagacactaaattattatgattaaggaagttctcttaattgcttcactttaaatccaaagcgttatcaagacaattacagatatgacttatgagagcatcacagcaacaacaaacaacacccatcagaggcacagacactggaactaatatctttaatcaggatccagaaaaaaacgtaatgaataaatcattcttattcatggattacactctataagacagcttaatgcctaagcaaacatgtaaagaaagtaagctcactatacagaagatgcagaaaaccttcaattttttatacccaggacagaatccgagaacaaaagacactaaatctcaaaggaaagtcgcaatcaaccactagtaagtacaccgcaaatgcgaagaactctaacagatctaagatacaaaaatgcatgcgattcaatcattcctataatttcacaagagaaaaccccacaaaataattcacagaaaacatcagttcatacaaccattgattttgttttttattttttgattttatttttttcaaaataggcgatagggacagatgaaggatcatatgaaattgacagcataatctcttgtacgaaaccctaattacacaaagagagagtaagatctagggttaggttaagagtatgaatacatacctggctgatgggatcagatctggacccaaactccgaaccagagagagagagtaactacagcttctactgagagagaaagagacggtttggaaagagggagatacaaaggtatatctatgcgttattatataccgccattatattcatttttgaataattaaactgtaaattattttaatttccacccctatatatcctatttttacttcttccccgttactattcctattttaaagtttttattgtttaatttatttttagatactactaaaattaatatccattttacataacagcaagtaaagcttgtacacaattatcaaaaaaaagtaaaagcttgtacacacaccatgtagtttctctaaaaaaaactggtatacaggacaccacttacatccactttatctataaaaattaaatatatttatcttctgtttaagttttttttaaaaaaataataaaaaactaaaaaaaaaaattctataactacttttattttttaaatttaaaaaataaaaatataaatttaagaaaaaattaaaaaaaaaattgtgtctatcatttattat

SEQ ID NO: 299913 - DNA, 4276 bp, Cannabis indica
gatatattaagtaaataatagtaaaaataaatagagactggccaactggttttttttgctcccatgagtgagctactggttttttccaggttgtgagagtttcttctcgtgccagttgctgtgatctgtgtttactactggtttctttctcctttctttatttctgagatggaggatattgaaagttctcaggacatgaggaatggggagagtgttcctgcttcggaacaggatgttgagctgcttaggcaaaagtttttggaggaagtcactcttgagttggaacctgacttcgaaatcagtgaggaagttgcaaaaacaggtgttcttgcaaaactctttggtaataaagttctttccagaggaagagttaagcagattttggggggtatttggtctctgtcaggtaaatggcggctgaaaactatggagaatggactttggggtattttctttgaaaagcaggaggataaactggaagttttgaaacgcactccttggattatttcgaatcagctgttaaatgttagagactggccaactgattgtcactggcaggcggtaaatatggctaaggcgacgttttgggttgagattcacaggctgcctactccttatttggctgcccagaattctgcggtgattggaaggaaagtgggaacttttttagaacatgatggtgcagctaacggtgtcattgctcgtcgaggtttcctcaagctgaaaatcgatatactgatagaccaacaattaccagctcgcttctttttgagcatcaacaggggccgtagggagtggatacaattcaaatacagaaagcttcctactttctgctttaactgcggctttcttggccatgaaaggagtgtttgccgtcaaccgaaagcttatgcttacccacccataggagaggcagttcccctatatgggccgtggttaaaggcgatggttcctattagaagctgctttgactcccgccggccaacgcttatcagaagtgctgagattttaccggcggccattgatcgtccagatggtgtaacggttcggcctggtacgattggcaggaaaggtacgactataccagtagacgtgggcgtaattccctctcatggtactgtgccagacagcaacattcccactatgcatggtgaatgtacgatggcaaataacaaggggacgcgtggcaatctccagaaaggggctggcatcaataaacgtaaatccgcacgttttaaccctttggaggtagtctctaaccaccctattgctaatttggaaaaacatcctagtgatgattatgttattctttctctaatgcccaatgtgggcccaactgctgaacaaatggtggacctgccccatgagtccatttctaagtccaggacccctcatcgacatcctgagcccatcattttgcccaagtccaattctgataaagtggagaaattagctgaacttctcttgggctcctctatctcaactgggttggttccaccctctgactttattgggcccgattcaattccatcctctgatctcttgggctctcccatttctcctggcccaacagcctgtaagaaaaggaaagcccctggaagtgtgacaccggttcttttcacccctaggacaatagggtgtgttcgacatttaatctggaagttgataatctgactttttccaaaggaaaagatgatcaacataaaggtagtgcgagttctgaaaaaaagaagagagggagaaagaactgtcaatcgaacacccgttctcattcaagacgactaacaagggcgagtcctttatctatatccgagccgccggcaagtaaaatcccagtggaagatggaatcgaggatttgtcttctactcaaggaactatggttattgatattcaagtggaggaaaattttcaagtgggcgaggaggcggcccttatcatgccccctccttcccaatgagaacactttcttggaattgtcggggtcttccgagaccgccggcaatacaagcccttgcggcttgggttaggagattcaaggtggattgtgtgttttaatggaaacgaaattgggttgtgatcagatggagtctatttgtcgggtgctgaattttgatgaaagtgaatttattccttcgattgggagatctgggggatttggccttctgtggaatactcaagcgggcattaattcagtctccaaactggatactggttttcaatgtaaaatttgggaccctgatgaagcctccttctggactttatttgcaatttatggtacgccttatgatgatgatgagaaacaatggttttgggataaacattctggtgtaattaacttgtgctctgggccctgggcaattgttggtgatttgaacgtgttgttatcaagtgaagataagtcggggggcaggaactttgttcctagagatggttctatcctgaacaatttcttgtatgaaactgggggtgtggatctgggcttctttggctgcaaatacacttggaaaaacaagagacagtcgggggacctgatcagagaatggctggatagagttattgtagacactgactggatgaacctgtttcctcgtgggggtgtgagaaatcttccagttctttcctctgatcatggccctattgtttttgattctgtgatggagagatcttgtgggtcgacgccatttaaattttatgaagcttggttcaaagacgaaagctgcctggagactatttttcaagcctggatctcctctgattctgtcacaaatatccctaaaagatttgacgttattcggatggctcttcagaagtggaacaagagagtctttggagattgcaataaaaaactcaatgccttagaatttaagctcctttctctgcaatcgtgtgatgtgaactcaagtagtgtgatggaagaagaagcagtggaaaaggagatagctgatctttgggagaagcaagagcttatttggcgtcaaagatccagggagatttggttgaacgatggagatcgtaattcaaaattctttcaagcttcaacgatcattcgaagaaagcgtaatcacatttggtctctcaaaaacgaagttggctctgttgttttcaaagagaaggagaaaggggaggtcctcaataattatttcaagaaattgttcacttccactaatccttgtttccctgaggaccttcagggactaatttcggaggctatttctactcaagaaaatgaggctcttatgtccatgcctacttttgaagaaatctctcaacatgtttttcagatgcatcctttaaagtcccccggccctggtttttctggatgcttcttccggaagtgctggaatacaattggaatcgagacttcgaagtgcatccagtcgatattcagaactggtgagctaccggcttcgattaatcacaccttcctttgtctcatcctgaagtgcgagaatcctgactcggttgacaagtttcgaccaatagctctctgcaactttatttataaggtggtgactaggattatttcgcaccggctgcgctctataatggatcgtatcatctccccatttcagtcagcttttgttcctggtaggtggatagccgaatcctctttacttactcaagaattagtccatacaatcaagtcgaaaagggggaaggggggattaatggcagtgaagattgatgtgaataagacttataatagacttgagtggaagtttattaagaaagttcttgaggtatttggattccaccctcactttattactctgataatgaattgcataagctctgtctcgtactctatcttgctaaatggccggcctttaaagaagttctcaccccagagggggattcatcaaggagaccccatgtcaccattcttatttattctgtgtaacgaagttttttctagattgattgccgaggagcaagctcttgggagggtgaatggtattcgtattgctcgagatgcccctgctatttcccatttgatgtttgcagatgacaccattctgttctgcagagctaatgtgaaggaaattgaatcgttggccaactgtatgatgatctatgaaagttggtctggccagcaatatagcaaactcaaatcgggtgtcctcttttctagaaattgctctcagtctcttcaaagatctctcatggacaaattgggtattggtttgatcaatggggaggaaaagcatcttggctccagacacgccagtagtcgcgatgtaacaccctaactaacttaggcgtattacgtgattt

SEQ ID NO: 299914 - DNA, 3428 bp, Cannabis indica
tactttttcttcatcgctattcggaacatcttcgactcctttcacaatgttctttcctaaattttcagcaacgtaatcagtcgctgcacaccctccatgcccatccattactgcaaaaaaggcctgcgtaccgtacgtacatgattaattcacttaatttagtcattaaatatatgataattaatgtagttatcatatatataaatataattatatttttatgtaattaattaatacttacttgctttgaatctcccataatgtcaaccaaaactccatagccatcctccatagacatcctcattccctttttagctgccaaaaagaaatctctgccttcaactacctcaacttcttccttatccaacctccttgttctacccgccttttcatcacaaaattcttggccttctccaactgcagggtattccggcacaaccaacctcgaaggcctctttcgtaacctgcaactaccggagtttttattacccttccaatcaccgccttcgtttacgttcatcatttctgatcttgcactcttatcatcacgaattatgaccttctcttgaagaaagaaacgatgtcgtttgggatcatcatcatcattttcttcttcttctttatgtgcctcaatattcttaatgttgtattcatcatgatgaatattgtcatcattagaattattattagctaatagaggtccaacgaagagtgggctgacccatgagagatttgaaggaggtggagagtttagggttaaagccatgcaagtgagagggtataggaaaagctaattataataaattaaagttagtttctagcattaacttcttctgtctttatatgtatataaatacataaagatttcgtgaaggtgtattgttgaattgtatgagatgtattttgttgaagaaaaaaagtgtgggctagctttagctctctgattttcatatatagaggactatggttataatatctaggagcctttggaagacggcaagaaaaggctctctatgtatacatgtgacattaatcaaggaaaagaatatttgatgatgatgattgccaagtcaaaggaaaattctttatgatctaacggctgagactgagacccttgtttacatggcaaattattatatacagtgggatgagagagggagagagatgagttttgacactttcaatccttctatgataaggaactagtcacggattattaggggtcggacggtaccgtccaagagaataatgtgaatggatgtgattgggcttctcttattcgtcaatttagttacccaaaaacggaaactaataacattattataaatgtacgttgacttggtgaataccatattttatatatttatatataatatcattatacgatcatagggatggatggatccatggtattttagtaattttaaatcggaaaaagtgtatatttgtatttttttttttttttgaggaaatgtatatttgtatgttgacaacatagttttataaaaatgtttagcaaggaaatgttatgtttataggtataagacaatatgtatatcatgcattatgagatataatattggcaagatgaattgatcatgaaattatggtcatcttaaattacattttatatattgtttaaaaaatggctaaaacgtaggtaacgacaatgtatatgtaacgttccagatcagaaagatatatattttttttattttttaaagtgttattaatatattgactgctaaggttaaagagttggaaaaagtcgtggaattattaacggcaagaacatcaataaaaaatattagattacggtcttcttttttttttttcgttaatttatttttacaatggaacatttcaataataattaaaatccatttacaaaactgaccttgaccatattcaatatagctcataggagatacaagtacactcttattatgagggagaccaaccgaggcaccgacgcgtattataaatataaatgcaccattttgatttacgtggtgtgtttgtttataacacatgaggagttcatccaattcaatctgcactattttgctcatattttattcaattttcactaagtctaaatttcattttttagatcaaattcaatctacattgaaaaatcgagtttttgcaaatatcaataataaatacgaaattataatatatatatatctattctatataaagtgtgcctatataactgaaattctatatagctgttcccctttcgaaaccctagctatctctgttccttcacagacaaccatccgaatcataaatcaacatcaaagaagtaagtgaaattggaattcaaaccttaaagggtagataagcagatctcgaccgatttcacaggctcttccgtttcaactatggcgtctcaccggttcaattcttcctcaaatccatcggaacatgtaacctttacaatcgcgatgccccagatctggtcgttcgtcgagccaatcggatgctggttcaagacaatggtaacaggtgaggaaatttcgacaaatacgacattctcaacaataattgtgagtcttttgctgtctattatatgtctaaaaatcgtttcagtgctcaagctcactctctggagacccaattttgaattttcttcataaatattactgagaaacctcttatatgtatacatattttcatgctcccactaatcccaaaatctatatctgaaactttggtcattgatttcaaatgtcaaaatgaacaatcagattccagccaagtatattggcattcgaatgaaatcagccaattaagggcttcttctttttaacatatccgtaagtctatctaagttttttttattattttttagaaattattttccaataaacatggcttcttttgctccttcggtctctctctgtcctaaaaattgcggggcttgtgcgaagggtcaacggagctgcaatgggcgtaacggttatatggaagcaattgactgcaacgtttcgatgatggcagcagtagtgagatgagtgatgggtctttcatgcgatttgtaaatcctttcttcattctttcatttttattatttaatgtttagaagagtacttgcttccatccatgagttgagttttagttttgatatgttgtgaattctaatttcatttatatttatactgtttttttattcatatatacattttttttttttgtaaatgtgaactattttgtcgattggtatatgactatttggatcgcactactaataaagttggtggacttatttcactatacgtgtaatattattggttttgaaggttttagcttcatacagatgatggtaatatgcatggtgatcaagtgatgtgatgttcgaaatggagaactttgaagttatgaagcaaattggaagaaaagaaaaaaaataacatactttt

SEQ ID NO: 299915 - DNA, 3279 bp, Cannabis indica
atgtcaaatttcccaaaataattgagtgtcagtgacaaaaataattatttgtcaatatcttgtaatatacagtattttggatttacaaatgtggttactactctgcaaccacatatcaccattttacctgtgtaaatggtgttacacaaacttaaatttaaaattcttatttgctgtaaacttattatgcggattgagttttaaactactttattatgtgtcgataaggggttaaaaatgtttgcaactccaaaattatcttcttcaatcccatcaaaaccatattaaaggttaacctccattatgtgggtgtttaaatttcaatgggttgactaaacacaggtggatcttatgttcacttgcaaggcacgcctttttctatcaagaaatacacatagatagaaatctaaaaggcttcattccgaagctatttgcatagaagttttcttagagcttgtttgatacactcttatatattgtattttattgtataatgttgtgttagattgtatttattatattagtattatttaatacaacactatgtttagtattgacttgtactaataagttatgtaatattataaattcttcacaataaacttgacccaaccccgaccacgacttggatcaagatccaaactagaaacatgccccagactcgaactcgaaccgagacctagattccaaactcgaaccagaatcccggacctggagtcgaatacgaacgcagaccccaaacccaagatctagacccgaacccttgacccatttggatgataagagccttttaggctctaaaattattgatttctccatagttagaggatgttatttcttggtaattttagtgtttttcatcgttttttgaattattcgggttttggaagaaaagttatttttatgctgtaaatcacccaacagttgttaaaaatctctctcagaataattaatgacaagaagcatctcttcaaagcaaagtccagctagtgcaaatacgatcccagccatttcgtcaatccttttgctgagtacgatgatggggataatggtgcaacaagaaatggcggtgatctatgcaacattatataaaaattcccacctagatactaaatgaatagttttaccaagacctttcttgcaatcaacctttgcaattgcaactgcttctctcccaaatgaagtaaagaaaataattacaagagccattaatttcaatgttgaagtaaagatcttgattgaaaattgtctctgcctcaacacaattctttcaacccattgagactttttataatttcaaatttgtcctcgaatttccacaacagagaatgataccatttgcatcttgataaatctcatcaaaatgagccaagtaaccccctcaaagcgatacccaaatgatggagaaatagagttcagaagacttaggtacttttatcgtagggaaacctgatcgtggagaacccatcttagttgttccttgtctcgcagagcacccaacgttgccctatctgacgtccctggggtagatttggagatgcgagacccctgctgaattgccacgttgattgaagaatggagaagtaatgcattcaattcaagttcacccccaaaatttactaagtataaattttggaggccacatgattacatggaggaaagatctcaaaatgcaattgagtaaaagtatatgggcaagaaaatgaacaacccaattgaagaataagtgtaagtcagtacatgaacaacccaaatgaagaatacttggactttgtgatgagaattttgagatacttgaagatgaatcctaaaaattgtctgctattcaaaagaaatgactacagagacatcaaaatgtacattgatgcagatttagcaggatacattacagatagaaatctagttacatggagaagcaagaagcaagtcgtggttgccaaaagtagtacagaagtagaatttgggaaggcatgtggatccaaagagtaccatctgatttataactattgtgacaatcacgctaccataagtattgctaagaatccagtgcaacatgaccaaacaaaatatattgagattgatcaatacttcatcacagaaaagattgataactcgattgttcagctgaactacactcctactcgtcaactaatatcctcaccaaagcacttccaagagtctactttgaagaattgagttgcaagttagtaatatacaatttgtgcacccaaacatgagtatttcttagttcctatctattttcaatctttcctagtttttagctaattagttgtaacagtttcaagactcaaaagctatatatatgtatatattttcttttgaataaataagatttatcccttccgaagtactatgttccttgtagagttttgcctcctaaacttttctttattgcaaaattttcttaaattataaaaattgttgcaaatatcccgttgcattcaagtcatttatttaaacaatttattgatataacagtaacataacgtcaatctagtccaattcaacagtccaaataaaaaataaatacgtaattaacagtctaatgataaattatgagagtatttacgtgcattcttagagttactgtttgtatttttaagaataattagaaattttctccctaaaagtttgacaatacatcttccccctaaaatataggacttgtcaaaaattttctttaaaatataatagttatataattatgtcccttctattagattttgtttcttttaccgttaaaagttatcatttttatctcttgaactttgatcattccaaaaattttctcgctattattaaaaaaataaattttaaaaattataatattcaattaattccgagaaaatcaataaaaattattaaaaaaaattgataataatattaaattaattaaaaaatattaattttacttaaaaaacctaaattattcctacaaaatattttcaaaatttatcttatttataaacacgtatattaaaaaactaaactaaaattattgaaaattgaataaataatttaaacaaactaagattttttaaagaaaaaatcatttatttatatttataaactcatatcttaaaaaataaagaaaattaattaaacaataaagatataaaattattttgaaaaaaagttagatattaaactagaaaaaggatatgattacttaaacaaatttagatttatagagaaaaaatagactcaagcttgttcctgtaaaatttaatttttaatatattttttttatatcaaaat

SEQ ID NO: 299916 - DNA, 2520 bp, Cannabis indica
ctatggctttcttctgatagaaccccacttgggttttttgctactcatgtcttccgaatccgacacgtctgtaaataaaacaaaagaaaaaccgatccgatcagtaagtttggaatcgtaacctatcagtaagctattttaaaaaattaaataaatatatatattgaaatatgaccgtttgatcatcactgaccttgtcagtctgatccaacattttttttatcaactatttcgaagatctgagatcaacccagttgagataaagacaagaacagtaaagggtatttaaaaagattgaaagaaaaacgaatgatttacgaataaaagggtcaaaacagagcaatcagagaagtagtgaaagagattgaaatagatctatttgatttcgatcgaatgatcaacatttgaggtggaaagagatcagactcaaaagactactctactgatatagaagagcagaggtaagtgtgattgaaaatagagaaaagctatctggtttgagcagcaatggaggaaaggtatttgaataagaggtgggaatgagagaaagatttgaatggaaaaggaggggtgtgattatactgagctgcgcggcagaagagagaaagagaaagagagagagaaaatgatgagagggaatctaaaccgacatacacaacaacaccagccgcaccatatctgaaaatactctccttatataaaaaaaataatggtacactcgaaaccctagccccttctgaaattttgtgaaatgtcaatagtacccttctctaagagggaaattaactttttggtcttgtgtgttgtgttgtgtataagtataacaatctcaaccccgccaaagagttttttctttttgggatgaaataatacaaaaagggcgccatttgttgttggtcattcattatttttattattatattttagatttatttatttatgaatgaattaatgaaagtaaagtaagtgagagatggtgagtgtgtgtggtgtgggaattggaagaggatggatatggagagagtgtgtaggttaaagattttgggtcctatttttgtgagtagtcaagggagagagagggtattgtgtcattgtgaaatgcaccgtttcataggtcaaacccaatatcgtgagttatttgctatgttagctcttcaatgtttcacattggcggcttgaaaaaaaaaaaaaaagaacactctatttagtttagctttgtatgttgtggtctctatgcaaattccttccatttatttgcttaaatattatgccaactttagtttcttaaaatttggttaattaaactttagggttcttatgttttgggcgaatttcaaaacccgtttggtacgttgtattatagtaaataataaataacaatatgtgttagataaggcgatgttttgtattaattattacggccacaatttttaatacaatgtaagttgtatatttaatacataagaaatagtattagcttgtattatgatatttacaaaagattcgggtcaatcccaatctccgacccagactcggacccgggacccggaccccgagaccgaacaagaccagacttggacccgagattggactagaccggacccggaccccaagatcggaccagaccaaacccgaacctagactcgagattggagcaaaccggacccgacccgaacctggactctagaccccggaccacgaacttggacctcgaacccggatttggacccgaacctaaaccccggacccagacccaagaactggacctgaaatcaacttgggcctaggacccagacccgggactctaacctctgagtttgggacccgaacccgaaccaagacctcggacctgagacccgaacccggaccgggacctggacaggacccggacctatagtcagtgttgggtcgagtttatcgaaaatatgttataattttacacaatctatcaatacatgtcaataccatatatagtactgtgttaaataatacaatacaatacaatccaatacaatacaatacgacatactaaacaagccctcaatgtataaaatagcacaaactcattgaatggagataatccaataataaaaaagacatcaatttagtttgctgccaatgtaaagtatttagggcccgtttggtacgcagtattgaactggctaaattatctagttcagtgttttggcatgttggaaatctggattactaatccaactaatcacatatatatgagattttttttaatcgttttttttttaaagtttgattttgttaatacattttaaatttaataaaaatataaatgaaagaattatttcaaatttctttataaaattttttaccaaaaatttatttattaaaattagtaaaatgtataatttttaattatcatacacaaactttcaaaatttaaaataatattaattaaacaatagttacttaaattgattctaagagaaacaatatgacaataaaattatatattctttttaaatttttaaaaatttaggggaatta

SEQ ID NO: 299917 - DNA, 595 bp, Cannabis indica
aaataaaaaaattccaaaataaaatatataattaatttattaatataattacatgccaaactctaccacctaatatatataaagagaagagagaccgtatatataaatatagaaacaaagaaatgtaaaatggaagaacaatatcacatgagaataagcggtgggcagcgtggaggaccaacgactggtggggcctgagattgggaagaagacgttgagaagataaggagaagacttagacgagaaccctaaaattaaattggtacaaattgaattttattattaaaataagagtaatttgtcaagttaaatattcattaaactaacaaatcatcttccagcataagctagttaataggtatggcaaaaaaattcatttattcatattgggttggagatctaatctgaaagattattactgatacttatcaaatcttggattatattcgctttgcctcacctaattgttttaccaataggatctcacctgatttatttttagtatattaaaaaaaaattcaaccttatccaaattaattcttacaaaataacatatatatataaatactttttttaatgtatattactggttact

SEQ ID NO: 299918 - DNA, 2418 bp, Cannabis indica
ggatgcgtgtgagtgaggacaaagcacgctaaaaatacttgtgttggtctgtacggtcagtcatcagtccatgaagcagccagagtgacgtactcatgtataagagccattcagtccgtgggtgcaagggcccaatggaggcttgaagcggggatgttacaatatgtgactaagaaaacattatcaatatataatatatgcgatataagtaaatattttttcttatgaatattgtcaatttatataataatattcttaaattgatttttaaattacaaattagtgtgattataacttattaggttattttaaagactaatcatgacttagagttatttggaaagattttagtacattttggtagaaaatagtaaaagttgacaagcttcattttcttataaggcataaattaattataaatttttacgaccttggaagaagaactggacatagagctaaacattttttccatgcctattcaaaccgtgccatgaaacttacttaggcttaccctgttttattagctgttaaaaaatgaatgcttttggtggtataaaaaatcagatatggaaactacttaactcatggaaagagcaattattctcagttggtggtaaagaagttcttcttaagcctgttttacaatcaataccaacatctgtaatgagttgttttcgattgccggtaaaattgtgtcaacaaatagagagccttatggccaatttcttgtggggctctttagcctcaagtaattccattcattggaagaattggaattttctatataaagcaaaagtgcatgggggcatggggtttaaaaactttattcattttaaccaggctctcctagccaaacaagcttgaagacttttggaaaatcccaattcccttctctgtaaagttctgagacatagatattttcttcatggaggtcttctaaacactcaagagggatgtacaccatctctaacttggaagagcattgtttggggtaaagaactattacaacaaggtttgagatttcgaattggtatgggcctcaatgtaaactacaaaactaatccatggataccagtacaaaccttttcaaacctcttgtatttaagagaaccaatccatcactaatggttgctgatttgattacacctcaaagacaatgggttcacacgactttactatctaatttctgtcaggtggacattgatcgtatctgcaccattcctctgaacttatttccctcagatgacatccttatttggcatcattcttcaacacgttgctataatgttaaatcaggtaataatcaatttacatctaatttagctgcaagaaataaaaccagtacctctacctctgctgctaattggtggcaattttttttatcctcaaattaccgttgaaagtgcgcatcttcgcttggaaagtcttccatgaaatttccaattgttgttatcctttgtaaaagacacattgctgatgacccaaaatgcttgctctgtcacaatcaattggaaacaataaatcatgctttgttttggtgcaaccgtgctcaaacaatatggaatcaaacagatcttgtttttatttccatttgtcttccactttgaacattcaagattatctagttcatttttcaaccaagctttcaaaagattaatttgagcagttcataatcatcctctggtgcatctggtttgaacgtaatgctgaaattcatggcaagaaagctaagcctgctgcattattacttcagtttgctacctcctatctagcagactactagaaagccaaaacaaattcggccacaacatcaaatgctgcacaatctcagcccaatcaactgttaacacaaccttctgtaaaggcccctcgtatcagtagtaaaccaaagtggttggctcctccctctggacgtctgaaattaaacacagatgcggcatttgatgcagcaaagggacgtattggaattggtgcaattttacaaaattcagctggcaacatcgttgcttctttcattaaaccaatctccagtaattttaattcagaagaaatggaagccttagccattgtccatagcctacaatggctccttcaaagtaacctggatgtccactttgttgaaatggactctctcattgttgtcaaaggactgcaacaaacggttgaataccattctacttttcatgccattttaaatgatattcgactttttgtacccaatttcccacgagtacttatgtcacatgtttatcgaactacaaatactgaagctcatgtgttggctaagtttgctcttacggtggatgtagattgttcttattagttggaggaatatccacctccacttatgactattatgtaacttattgtttaatttatataatggtcttttctaaaaaaaataaataaattacaatt

SEQ ID NO: 299919 - DNA, 2093 bp, Cannabis indica
taaattaaaaactaaattaaaaaaataatatatggagtaattcccctatttgtattaaaaatgaacttcaaattgattatgttttaaaaaattaaagaaaattgaccactttttataatacaaaatttaatcaattgatcagcctttccacaaaacaaaagattcgatcaataattttataaataaaaagaataatatttattcaatcaattaaataggttggcgaagtatatgggatgaaaaactctgtacttttagagctttatttgtattaaaaagaaaaaggagtattattataagtcactaatggattcgataccaaagtatatcaatataaggaattcgagggggaaaaaagcaggtaataacgcatctcatcaactaccatcttaaggttaatatgccccaagatttttttccttgggtagattttatgtctcaagattgaattataagtaaaattgtataatataaatcccacaaatcacgggtaatattaaacaaaatacagacaaattctcgtttttgatagatttaattacaccaaaataacatttatccaattaccaaaaccctattaactactgtaatactcacacatgaacaatcacacacacatgagcatctgggacatttaacttcacacttgtatatgggagttggaccacataaagaaaagtccctttataaaaattatttcaatatcaatacaacaatcaatatagaagaaacggaaaccaattctaaaattgaaatgataacaagcaacaacaacaacaacaacaacaacaaaaatcatatattttcttttctggtaggtaacaaagtctgaattaaaacacaaaattaggctatttgttattctagtaagtcgatctccaatcagtttcacgtattcattatgactaatccaaaaaacaccacgaccaccaaatattgatcggcaaagtgaaaatgcaggtagccgcacttctaacacaatggagctcttttccatttttctgttttttttttccaatcgttttcatcttagaagatagaaaaacatgtaataagagatcactttctactgtcaactgaaattcaaaagaaaggaaagtcgtctgtccaacccaatagtattttttacaaagacttacaagtgggcctgcccacagaattgcagcattccaagttcccagctcacacaggcacccgtctgcctcgataacggtcgaaaaactgcatcaccaatgaatgagttggttactctcagttcactacttctattcacatctatgcagaccccacaaacataaccaaaactactgtgcatcagtttgtgagttattattcttctatatggaattcatagtgaaattttgaaaatacagaaaagtacaacaggatttttataagatatgcattatgcaaaattcctttcgtcgctctaacactaacactaacactaacagaaaaaccatatcgggtaatgtctgagcaagtgtggccaaacaatgaaatcatcaccttataattgggatgcctaaggaaaagactaaagccccagaccaaagtcactactagcacagtattacaatattacagcaccaatctcagtccctcagtttttcttattgtgagcacaactacacatgagcatcaaatccctacgattattgccacctttaatacgttgcagataatattttcatctttaagcatgttttaaaacacaatcaatgtttgttaaacaaagaaaaaaaacacaatcaaaggttcttcttatatgtaaaatagaaccacaaatttagctttcaatgcatataaatatagatatgatgtattgttcagtacaaatcataccttcttctgtatccacatgatactagtgttttcagtaaacacagcgaacttacttggtgcagttacacttttttaatcagtttcttatttgtttaataaaactgtttaaaaatattttccaaatacaagttcaataaaaatgttttcacttttcaattttttttaattaagaatcaaaatttaaaaaaatttgaaaacaaaacaaaagtcactttcaaaatttttttaaacagtttttttttcttaat

SEQ ID NO: 299920 - DNA, 3817 bp, Cannabis indica
ctgtgccacattaattgtcagaatattttgacaattaattcaggaaatcaaatcaggtaatgaatatagaaatctgaccatatatagaatattacataattgattttgtccagatttaatgaatataaaatattcatttaacagaaaatcaattatttatttatttccttaaatagaaaatcatttccttaattagaaaataatttccataaataaaatattctaatagttttcactatcctctttttgctgaaaatttgacatgtcaagtagtttcagcaaaaagaacaattaatttatagagaaggaaaacaaaaaggctaagaacccttgtactgactttcacagtatgaaccaacaccaatcatttgaaaacatttaaattacctaatactaatagattttcttgatgttcattgacttagccaataatttatggcctcacaagtttaccctttctttaaaaaaagaaaaaaagtcctagtgaataactaggaagagttatctctattgttgtttttctttgtttcaacctgagctgccctgtacttgtacttacttgcacaatacagaaaaatgcagaaattgattacactaagagctgttagcagccaatagagataatcaaatctaccagtgtttatattctgggacagccatgatggctcccctttctctggattccccgttacagatttgacaatgctgttgattatggaggccataaagcaccccaaaccacctgcaagagcagcataagccgatcctatacttttcatagcatcaggagcttcctcatacaagaactctagcaaaccaactatgcagaacacttcagcaatgccaatcaagcaatactgaataagcaaccagtatgcactcaagtgtggcattggagttataaataccaactcgtatccatgcttaatggcatagtttcttctgtatttttcaaaaatggctgcccatgccacagacaggatggaaactgctaatccaatgccaatcctctgaagctgtgaagcgccatgaggatggcctgtgaagcgtcgggacagtggaacgaaggtagagtaatagagtgacagtatgaggaaaatgcttaggccaggaaacacaggcatgcatgtcactgggagttttagatggccaatgtgggtgttcattgtgtatgcttgctgcactgacagtgttaggtactcggtcaacactgcagtaaggattattgtacatgctggtattggaatgagtttcaaaaggatcttcacttcctctacttgagtcacagtgcagagcctccagggatttggctcaccaccatcttctttcagctgcagggctgccttatccaaaattctgcaatatttgacagaagcaacgtaaatcagaggaaaatctgagtttgagtagagttcatagacgaaagatcaccaaatttcacattgaatagatgtaaaaatcaccaattcacttatagaatccactaattttctactgattttaagtcagaactttatagatattaaatgagcttctgatcaaaaatgatagcaattcgaaagagaatccgttgttgattttgaattggaaccccatacattttagcaaaaattacctgaaatcctctgtgtgcactatctttccactgccctttatagcagattgtttgccagggacctcatacaagcctatgaaatcgccactagagaaagaagtgtttctctttcgaaaagctgcaacaagaacttgagcaaccctggttagagggctacctccaggtaacctatgccggtacataggagtaccaaggaagaacaccaagtttgataatcccatagctgcagccagtgagccaaaggcggcaccccacccgagtttaatctgaatgtagaccactgctgtgaaggcaataatagccccaatagtgactgaaagataaaagaagttgaaaaacctatcaagatgggttttatagtctttgctcttctcatcaaactgatcagctccaaaggaagaaacacatggccttattcctgcagctccaaacccagttatgtacaaaacagtgtaaaggtaaagcatctgccatggctttgcaggctcacaactgcccaaaagcagagatagctggtcgcattggtcctggtttggtgtgaaaacatccagagcagcacacaaagtgatccctgtcaaaccctttacaaagcaaacaaaagtattgaatctttttcttaatcttcagtgactaatggaaaataaaatgataaatgaagcaaatcccatttccccaattccttaccagaagatatattgttgtgaagattgctattgtccaatatctaccaaggtaagcatcggctaggaatccacctaggacagaggaagcttgtgatatccctaagaagttattaactgcgtttgatgagcttgagaagggtctatgcataacatagaacataaaagccaccatgttcacagacaacccaaaataagccattctctcagccatttcattccctacaacaacaacaacttgttaagaaaaaaccaatctgtgtaataatgttatgggaagttaaggaagactacatgttttaacattaataccaaatatgaagaaggctgcaatccaaccaccagtctttgaaagatcagcaattggtttgcccctgatattaacaggggtagttccaccagtatagccacggccaaaagcagtgcgtcggtcatctgactcaatgaaataaattcccagtttcttcctttctgaagttgaacccacactgaaactagtgccactagtgatcatcacaccacccccttctggcgacttgatttctcctcttgcacccatctcagtactctcctagatcaatagccactcttaataagaaccatatttctcccaataaccaagaagattctatatgtatatatatagatgttagataatatcatggcctatgttttatgggaccatctatatatgtgtgtgttgtagttatatttagacctacaaatcagctgagggtgagtgcagattgttgctctgctcagctcaccagtatatgagaaatatctaaaatttagacagaagttggggaagtaagccatatatgaaagaaatgaaagtaaagagttaatgaaggaaagggaccataaagagagagagaaagagaaagagcattaaatagcaaactttgttggcaggagtttgttgaatgaaggaaatgaaagggccccatttataccattgtcactattataagtaatagacaattagtagtgtgtcactcgtgattaaccaaattggattatgcaagtagtcactctcactctcactctcacactcaattccctataagtagtggttaagccacctataaaattcaatttaatgctgtataagtatgtctacctaatatgattaatcaaaataagctatgtatatgattgatgtcggtgtcgttgtacctgtttgtagttggatgatgttattggtacaagtgtattatacattattttgtcagaaaatatccttaaataaatgcccatgattctcctactcaagttatagctatatacagtaaaacctctatctaagagtattctattcaaaaataacttctaatttgttataaaaaaatcaagtctcaatttgggccaattataaataaaaataacctctaaattgtaattagttatatattttttaagtcccgtattaacaaagtatacctctatataaaaataattacatattaataaaaaatatacatatatttttaaaattatttacgtagaattaataatttta

SEQ ID NO: 299921 - DNA, 1570 bp, Cannabis indica
tctccaatggttacgtccatctcttcagcaacacgcgagaacagacatggcagccactctacgaggcgtgggtgcatgcaatcatctatttttctttcttttatctggagtttcaatatcaacagcttaccaaacaaattgcgggatctataacatcaagcatctacaatcagtaacatatatgatatatatatatatatatatatatattgtacatatacatatacttatataactttcatagaaatatatgagatcaaaatttgacttttgggttacgatagcactatataagacgtccaaaatgaatggcattactgaactaaaatatgttaagtttctacatctactcgtggcatcaccagaaaaagtggaccaagataaactcatacattttctaagatatcaaaactcattagcattggaacggttacaattatttcaggaacatttatagcttagacaatcctaattttttgtaccttcctttcaatacgtcaaaactctaccgagtctccaaaattaagtaaataaaaattgcataccatcccttcaagttcaaaacaatcaaagcataataaagctttattttatactgtaatttcgagtaaagtaatgaaacatgacaaacatactaacctgggttgttttaccactaccagtctcaccaaccaaaatcaaagtctgattagccttcaatacctgcaagaactcttctttctgctgccagacaggcaaggtcttcctcttctcaagtatatcaaagtacctctgcgagtagggcttgccgttccacatatttatcagactattcccggcgttattactcatcagaccaccgttcgatttcgtgatcttcgctgagacagaggtctcatccaccacgtcaaacaaactcaccttcctcttcctctccgtacccatcaatcaacacaacactgcgaatgaaaccctgacgaaaaaaaaaatgaaatttccacctattggaatggagtagggaacaaattcgggagaactattctaggctctagcctatagtattgtaatttataaaaagagcaaaaacttaccttgcaacttgaggagtggttgtgcaaccgattaaagaggaagggtcaggcgtcgggcggtggctctgcagtgacccttgacttgaggcttggtgtgtgaacaaatgagggaaagagggagaagagtggttgtgtgcttgtgtttaaactgaaacctgaaaccctaatttatcttttattatttccaaaggaaagtttgtcttgaaaacgttttttaatgtatcattcaaattattatttatagaggtatttttgtaattaaagttttaatttatattttgtatgtaataattaaaaaaaatgtatgattcatataaatgatatggtgatgttatttataaatttgttgggcatgtaaaattaacttaattatttatttattcatgtaaaattaattttatttatagaaattttaagttatatatatatatatgaatatattaatgaaatttttacatgaaaaatccattttgacacaatttattacctaaatacctcta

SEQ ID NO: 299922 - DNA, 1762 bp, Cannabis indica
gcccgggtgcgcgacgaaaccctagctatacccaaagctaaagtaatttctctctttctctctctgtgtttcaattttacgttatttattatagtttaattcatgtcaggctgtaatttgggtttctggtttgttgggaatattgggtaattagtccaatcagttttgaggccattcttagaacccgaaaagatagagctgaagtgaaactcaaagtgatgaatttagttggggtcttggttatgctctttctacattttagcgacatttgtaaataaactgagatattaattgaattaatgtagctctactatttaagctgatggatgattagaagttgagaaagtatgggtaaatctagaacaagcaactcaatgaaacttctctaatcttctataagaatgggaaatgatcaacttttatcgtgtgggcactctatacgctgaaacgatttctagaaattagctgcttattcgagactcgagagtagatttcaacaaatgacaattggattgtacaatgtgatggcagaaattgattgatgcctcgctgaagcagcagaagaagttgcagagtatgtctggttttgttccctcacattcacatattcctgaaagaacgtcaaatatgaatctggacagtaatatacggtatttagttcttatttttcaataaaaataaaaattggctatgaatttctttgtgtttggttggttgagcttgtatccctatgtctttcaggttgcagtcagaatactctaaactggatgcttattttggttccttgaagcttgaagaagagcctccagctccagccaaggtgacaaacttgtgtagctttcccatttgtcagcacttctaataatttggcttgtttcttgaatggattagatgttcaaattcattacaattagtcaaacaaatcactagttcatcatctatctggaagaataactaatagtaataacacaaaacatctgctgccttattcatgtattgaacttgtgctattctgcacatatacaaataggtgatgaaactacaaggcaataagatagattggtgaagtgctcttcaatgtgcccattttctaattcatgtttcgacataatggcgtattgttggcataatttcctttttggaaaaacagaactttatctttaacctggaaattggaaaacagtacctcgagaaactttgacaaaacacagattggtatatattagaatcaattttgcttttttcgattattgcaggagaaaaagggtcgttcccctccaccattgtggtttataacagacgatgagctcgattccttatcctcgtgagtacttttcatttctaagctttacaataaatagcaagagttagtaccagttatacaattttattatgcatttaaatagttatctatttgacttggagtaatgaaactgggaaggaactatgcttcaatactaaacatctacaaagtttgcttacaaggaattatatagttctaattctaagctaatcgtgacataatattcctcagtttggttgaagccatgcagtgagatggatatctaggatttgcatattatttcatttatattatagctccaagtcctgccaattgcagatatatgaaaggaaggcttactcttgataaggtcaatgcagcaatcagtgacatggcatcatatgctgaagccaatgctcagattatagctgctccaaaaaagaaggttctgcccattttctctatttatggtccagaact

SEQ ID NO: 299923 - DNA, 2907 bp, Cannabis indica
catatgaccatttgattttccagatctgatccaacatttgttgcagcaagatttgcattcagatcaaactctttgtctgtcttctcaattttggattcagaggcaagcaggagagcttctatttcagcaactgagtacccttcaattcgagtattcgaagagattatgaatgtatcattcacttggcaatcctttgaagatagaagctatgtgatcgcgcgcagacatgacttcaccaacagatgccaagagatcaacatgttgcttcaccttcagcatgtaatcgttcaaagatagtgatcctttcttcagattctgtaattttgttctgaactccaagatcttggatgaaacttgaagagtgaagtgcttttccaaggcactccagatctacctggctgtattacaccccaccatccgagtcaacaagctttcagtcatggaggataggagccaagacaccaacagctgatcttgaacctcccattccacgaactcaggattgtaatttcgagctgatctatcagcttcactcaagaactgcggaggaggagcctgatcttgaatgtatctcatcaatctgttgcctctgatagccacaaggatatgttgtttccataaaaggaaattgtgatcattcaatctgatcgaaatcgaatgattgaagtacaccggtgaggattcatcttccctggatttagatcgagttgcattcgagaaacctggtggaggaccagtggtgttggagctggaattgttggttccaacattagccatattcgccaccaatggtgggaatggctctgatactatgtaagtgtttgaagcctttctcaccatagttgtagagtaacagagatcaaagaaagtaaatgaaagaagaagaagaaagagaagaaagacagagcaaacagagtgaaagaaggaatgaatctcattcattgtattgagcttgtacaacagttctttatatacatcaaagaagacaaaaataagctaacaaaccaaaacagaatcccaacagaaaagataacagccactaactactaaccgactctatagctatgcatgcattatgttataatgtcacaacactcataaacatatacccataaatgttgaaacaaatcttattcataaaacaatttttaagttcatttcaataataaatattgagccggtgaccccaatactcaattataataatttgattatatataataaagttcaatctatttcagtcctcataaattttttattggagtatatatatattggcagccgattttgtacccagaaatacataacacagaatgtattccgttgtacgacaggtacagaataatgtgtctcaaggtatataataatgtgtcccggagtatttcactctaattactcttagatcaactccatccttcagatcaaataactatcccatctaacggttgcggtacatcacgaaatacattccgtgaaatacattaatgggacaaaatcgtgcgtatatattatgacttttacatttgtttatttctacatacaaatccttgatatcgtatgagtcttcctatataaaattaaataataatgaatatataccaaagtattattcaaaaagtaatatatattatatacttatgtcaatatgattaaaaatgatggcattcatgtaatattctatagagtgtgttggcaagtacacgtgtcaatactatagccaaataggcatattggcatgtttctcagtgttgactgctttgaccaaattgtttttgtttttattttattaaattgtttctcattaccagctaagctactcattctggttttggggtcaaaatggtcgtttccaaaaccagcggattcaactgattctgaaaactctttttcaagaatctactaattaattaattaagtactattctataaagttaattacatgacactcattactaataatttggtttgctttgctttcactagtaggatctataaaaagctacataataataataattaattaattttgtattagttggtgtgagtggtattagagtttggatcgtggtttaatatcaaaacgaggattgatcaccttaaaacgaactcaatgatgctgcaagtgaagaaattcaattttcatttgttaacaatgtaattaaccccataattattattctaataattaaataccttattttcttaatcaccaccaaaatatacatctctccacaatccacatttccattttttagccacatatatctaaatatatatatattttttttcacgtgaattatattttcttttttgaaagtcattaaattactatctaaattcttcttcttctttattatttttttttcctaacaaaacttctatataataaatcatcacatgagttcaaaattaaaattatcataaaagattagcaaatttttatcaacaaaaatcctttataacaaaaatttgagggtaaatttaaaaagtgagatccatttagaaatacaaacttcaaggtcattaaaatttaatttgccaaatatggataggttcgacattcttattcatatttcttatttagtatctaatcctcatactaaaagttttataagtgtaatatataccccacaaatacaaaacaaaatatacacaattttttttaataaatttaatcacataaggcaccatttttttgtaaaatatttacatttttatgttcaaagaatatttttttacatttttacggtttttcaaaaaataacatgaaaacaacataaaattaacaagaaaacaacataaaagtaacatgaaaataatatcaaaataataacaaaaaaacaataaaaaataacatatatataacaaaaaattaacaacaaatgaacaaaatttcaacataaaaag

SEQ ID NO: 299924 - DNA, 1206 bp, Cannabis indica
atgggctagtaggcacctatcttctgctggtagagcactcctcattcattcagttttgattggaataagatcttacaagatgagcatgttcttattacctcagaaggtttctaattagatacacggattatgtagaaacattatttgggtgtaaaaggaaatttcagtaaattgcatatggcttcatggaaactaatttgcaaacccaaaaagtttggtggtttgggtttcagagaagggccaaaatggaacaaagattctttgactaagttcctttgggcttaatctttgaaataggatcccctttgggtaaaataggtgaattgtgtctacttgaaggctaagatgtttggtctcttgaagctaaatccgatgtaagttggtcttggacgaagctgacttaggaacatcaggaacaaaacagaaataaagaaggctagcatcaatggaaaatttactatgagcaaggcttatggtttccatttggaatggagcatacaagtatcatttgggaaggttgtttagtattctctcatagcacctacacatcgatttattctatggcaagtaattcatacaaaccttcttgctcgagacaatttaattacgaaaaatatatatgttgaatctgctatttcccggtttgtgagttggaattggaaaatcatgaatacttatttttccaaaaaacatttttcatggattttacttctcaaaatcagtgaggctaggaagccaaatctggccgaatcagtttgaagacttggttcaatggatagataccaagaggccaaagaggcttgtgtcgaatgtctttttacggaatttggttaactaaatcatatttgagaaaagatgtttagctccttaatgtatagatgatatagtgaaagagaattaaaagattagattgaatcttgtaaataaaaagaagttaagtaaaattgatagatccgttctagcaatggtaaaagtattgtgaatttgtatatatctaatataatcataatgagtatgctcgttgattgtagtcagtttgattaatgaaattttatttctttataaaaaaatatatacttatttattactttcttttctttttttcttctacgatttatatagatattaaatataccatggtctttttacctatcacaatcaagcttctacgggagaaaagaaaaaaaccctcttccccaaatctca

SEQ ID NO: 299925 - DNA, 2505 bp, Cannabis indica
tatggtttcatgtaataagttttcaaaatgtataaatttttaaaataatttttttttgcacattttttgtaattattttgtttttgttgtacatttatgaaaaaagccctaaaaaatttgtgaaaaagtgatgtaaatttagcacatagtaaattttgtgccaaataataaatatattactttttttatttatatttatgttatttatattattttattagtatatttaattataacattaaattataaagtatttatattctttttttattgttctacatattaaaataataataaaattaatgataaagttggtagtttttttttaaaataaaaacaaaaaataaataataaaatttacatcaaaattttataattgtccattgaaacacaatattaaaatttactacaaagttatttttttattgctaaatgtaacacaatatttatatctcctattagaatttgaaagataatgattcaaattcaaatggttttgtccatttgggttggaaagatattattatttatttatttattaaaaaaaatgcttaaaggaaacttgtaccattcctatgtaccacattgatataaaatataaatttgaaatttacataaatgttataaatgttatttgaagattagtgggtagggtttaacctaggggcggagccagagtcgaaatttaaggggggccaaactatattataaattaagtgacagataattcaaaatatattattaatatataattaaaattaaaatacaatacgtctctcttagatatcatgaaagtcatatataagtgaatttatactaatttatttaaccatttttttttatttatacacttagcaaacaatcacttaaaaatatatcttttattttgttgcgaagtataatcttcactatattcatactagaaaaagattgatttgtactaactgtagaaactggaagtgtaaaataagagttactactttatacacaaatttaattttgtttgcttttttagtttttactaacttctgacataaataaatcagaaatggttgctaaaatagtaaaatcaagaaattttccactttttttaaactaattttttgaaaaatactgcgaagtggtaatgatctaactagcaaataaaccaaataaatattattaaagaatataaataaatactttaaaagaaaaatgacacttattattctttttataagggaaagtaataattgtatataattttacttcgactattttaaaggagccaccatgtaataattattaaaaaagttcatttacaatatactaaattttaaaacttagaattacatatatgctaggaggcaattacaatatactaaagtttaagacttaaaattacatatacataattacatatatatactaggaggaccatggccactataaacaaccatgtacctccgcccctgctttaacccaacaaaaaaatattgttaaaagatttagattaagataatattggaattttctttctagatcaagtttagtttagagtaaaacaatcataataatttgggtgtcttcaatttggaaatcccatccaaaaacacaaactttcattttaatttttctttttctatttttataccaactcaatgagcaaaaaccaatatgaatttatggtgttaaaaaatagaaattgattccattcactgattcgtatttaatttatttgttttctcttccatttgagttatatatattttgaaacaattaatttcgactgggaagaagaacaaatgagtggagcttattcttgtagttattgttgaaatagttcttttgataattgagtgtggccaaaatatactacatttgtattaattaccctcaattgatatgtatttcgtaattatctaattttattttaaattgacacgtattgtggtaattatctaattttattttcctccttaatgttattatataattttttattaatacttggtcttgctcttgtcatttcgtaacttgaactaacctctttgtagattgatatgtttgattttaaacttaacatttatctttaacaaagttttagattttttttaattagttccctttcaagcgaccgagatattcaaatatcttggtcatctgattgtggaggctaattgaggtatctgaaatatgtctgtcttctagttggttagattattagttagatgagatcgaaggcattctataccccactttcttttttgttgtattgtgtatcttagccttattcttttagtttttgctaattcgtcttaggtgcaatttatttagggaaacttataaaaataatggaatttaggttagttacaaaatactatcacacggaatttttttaaaacaacagtggaacgcaaaacagaacaactaaaaacaatagtggaacaacgaaaaaaaagcaacaatcaaaatttaacacagtacacagtattttagaaaaaaaaattccgccccacagtaaaa

SEQ ID NO: 299926 - DNA, 2082 bp, Cannabis indica
atatattaagtaaaaaaattatattttgagggaggtaaaaataatccctctcacataataattttgaatgataaaaattataaatatataataaaattatcaacaaattttattatacatggttgcttatgggtttactatatattattgtatgtgtattttttatatttgtcacacttattattggttagataagtaatacagtgtagtgtttaaaaaaattgacttaagcttatcaaatatcaaaagtatttgtttaattaaagagagagagttgagtggagtgaatattgatattttgacttttcaaatggcaaaattgtcttcttatcacattatatttaattttactaagggtaaagttgtcattataatacttttataatagtaagatatattaaaaaatgggactttttattttttttaactattaaaattttgttcggactatattgagattattttatatatatttaaaaaaatttattgttggatttattaaaatatatataaaaggtgatgaagtcttagatactcgagaagctatatatatcccttaacatttttgtttaaataaacagcattagataatcatatccttttcatatcttgtccttattatattacatcaccttgcaattataattactcaattaccactccggcccatcgttattcatacattctctcttctagcaactctcaaatatcaaattaaaccaaaccaatttgttttttgttaattaatgatgatgatgatgcagaaaatattcctaataattttattaattcttgtatctgcttcatcaaatgtttgtgttggtagtagctgtaatgaaaaatgcggagacatagaggtcccgtatcccttcggcatcgatgatgtaagctgcgccatgaatgaagatttcttgctcaagtgcaaccgcagcactactcaccatctcactcacgttaatggttgatggcaaaatgatcgaggtaagcaacatcaatgtagagaaagccactattagagttgtcatggctgatgcactctccttcgagtgttatgataagagcggtggtttggtagaactatctggccctaaaataatcacattgaacaactacatgacgttctcaaacactgagaacaagttatggctttcggctgtgatacgatgataataatggcttctacattacatgagcatagtatcgcgagtggttgcctcttgcactgaaaatttcaacatgtcatctgaaatcacttgctcgggcttaggctgctgccacactcctgttcccaagcatctgaagcatttttcactagaaaccaccagcgtgaataaccataccgatagttattactttaatccttgcaggtatggattcttggtggagcagtgtagtttcaacatctcccaaatgagactcgattttaggccccaccaagtaaagaatcctactgttgtgctggattggattgtgggaaacaaaacctgtaatgaattcgaacgtcgtcggtcattgtatatatgtggggacaatactaattgcagttattcggagaatggtcttgggtatcgttgcgtttgtaaaaacggatatcaaggaaatccatatcacaaacaaggctgtcaaggtacttaagtaaatatatatacataatgtttgttgttgttgttgttatcataattattaatcttaattaatttgtaaataatgatatcaatgagtgcttggagcctcaaaaatgtcgaggaggatcttgccagaatacagatgggagttacacatgtaaatgccccctgggcatgcgcggagacgccagagattattgtgagggatatcacctcaccccaattattgttacaggttatattataaaatgctatgatcatatatataattaattaattattcatttcggagagtaattaagtaataattaacactatttcatatttgtgtacagttattggagggatcattttattggccacaatagctatacttgttttcaaagagtttaacaggagaaagagagaaaaaatatttaaaagaaatggtggtttggttttaaaaaaccaaagactt

SEQ ID NO: 299927 - DNA, 2007 bp, Cannabis indica
aacataaaatgttatttctgatctttattaactagtaaatctgattatattgaaattggttttatttagggcacaaaacccaacagtctatgtatgaagaggtggtgttactggagaaaaaaaatacatggataatgattttgaaaccaaaaggaaagaaatttattagatgcaagaagattttaagagttagggatggagttttacaagttgatcctaagttctacaaggaaaggcttgtagtgaaagtatttacacaagagaaaggagttgattatactaaaaaaattacaccaatggtcaagatgaagacaatcagaatgatgttagctttggcagctcagtttgattgggaaattgagcaaatggatgtgaaaaaaacattctttaatagtctatttgaagagacaatttacatgtctcaacctgaaggattcaaggtggaatcaatagaaggagacctagtttgcctattgaagaaatctttatatggactcaagcagtgtccaagacaatggtacaagaaattcaactcaattatgacaaagattggctacacaatgtctaggcatgatacttatttgtatttcactaattttgacactaaaaatacaacatatctgctcatctatgtgaatgacatgctcataatgggcaaggacataagccagatcacaaaattaaagaatgttctcaagggagaattggagatgaaagatctaggaccagctagaaagatcttgggcattgacattgtcaaagatagaaaagaaagaaactaatgttgacccaaagcacctatgttgaaaaggttctgtagaaatttaacatgatagattcaaacgaagtaaatgtacctctagcaggtcacttcattcttacttcagaccaatctcccaagagtgattagggaagaaggacatggaagatatgccatatgcagaggctataggtagtgttatgtacactataataagcactagactagaccagcagacattgatcatactgtgagtatactaagaagatttatttcgaaccttagagaagaacattagaaaggacttaagtggttgttgaggtatctcaaagctacaactcagattggtttaaggttcataaagagtgggaacaaggtagaattggaagtatagtggatgtaaattatggatcaaacagagacacaaggaagtccataaccagttgttgttttcaactaaatagctggtgctttagttagaaatctcagctgcaaccagtggtagcattatcaataatagaagcaaagtttatggcaactacagaagctttcaaagaagttgtttggatcaagggaatcctaattcagctagaaatgataatgaaaaagttattatatatttagacaaccagtcttctatacatcattgcaaaaatttagtctatcatgtgagatcaaaatacattgacgacaggctgttttggattagagataataatcaagatgcatggaaagatagaacttaagaaggcacctagtgaagagaatcctacagagacaagagctaaagttcttttagtgagcaagttctaacattatttggaactactgaatatttgctctacttgaagatagttggatcacttccatgaggttttgtcttagttagtgcaccagttagttagttttaattttcctatttaaatgattttagtcattcttgtattgtaacataattcatattgaattgagagagagtgaaatcgagttggagagagacatagaaagagagaaaaacaaagtgaagagaattggaaaactgcaccaagatcattgttctttgagttaacactactacaaaattaggctttcgaggcgatttttaaggccattcagcgtcagttttggcaaaattcactactgacgctgtttcaggtgatgctaaaagggaccctacggcgtcagtgattatgaaataaccgactccgtaggggtttcctatatttttttttttcagctataaaatt

SEQ ID NO: 299928 - DNA, 2834 bp, Cannabis indica
aaaacaataaaaaaataaaaaaagaagaagtatgccgtgtgaacagtgcacagcatatatgccgtgcactgtagcacacacgacaatttagtgtaatatttgcagctacgttggaggattaattgcacgacatcaccaaatttgaagcctcgttggtgatgctctaataaaccttttgcaggctcatccttaggttggttggccacacttgataacaactttgctgtaacactccataagccacaaccaaaaagtatcatgaatatctataccttcccccactatttcctccaagaatgaatacatcacaattaagccatatctacaattattgggattagcatatctataggtttacaatattcaaccaaatccagtatcaaatccaaacgagcgatttcatcatggtagtcatatatggtagttttttacaatattagaccttctaaacacaataaatgaattcgtataccttgaatatcatcatcttttcccactatatatagacacttctgaggatgttttatacaataaggacacattttactttatacaacaaggacacattttacgcccttctttataaaaaggacgggcttgtttcttttgacgttacttacgattcgtcgacccaacaaagcttaaaattgcttgttggtgctactccaagcaggcccgaccctgggcataagcgggctaggcctgtgcctagggcccacctatctcaggggccccaaaaaaatatttaccttttaaaattataccatttttttcctgattttgaaaaataccatatttttttctaaataagggcccaaaataatttttttttctatggcccactaaaagtcagggccggccctgactccaagatataagtattattgtgataagtatatctaagatcaacttttacaagttcaaaagtatgtcacatacaagaaagatagagaacaagtgaccatgaaatttagagttttcaaattgaacagtgagagtattcacacagtgaaaggagtaaatctcagctcaaagggagactgagggcaatgattgtatttatacacacaatgattacaacgacattatgccaggtggcagagtacaacagaaagcagagagaataaaagggaagaggcaataacagaatgatacaggacaaaatagtataatagcaaatagaaagttctatgcctaaaccagtattaggaaaagagccattgtattactctaattaatctgtcttaacaccacccttcaatcgcaggggtgagttgatcacaccaagtttgtcaataaaagctttgaatttggagtgtgcgagcccctttgtgaaacaatcatcaacctgttcttgtgagggaatatatcaaacttccactatcctttgaagcacacggtctcgaacaaaatgaacatcaagttcaatgtgttttgtgcgagcatcaaacacggggtttgatgccaaagctttggcactcatattgtcgcaccaaataactggtgtagaaggcagcttgaaatgcatttattcaagcagggacttaatccaaatgatttcagctgcaacttgggccaatgctcgatattcaaactcagtgcttgagcgagcaaccactgtctgtttcttagaggaccaagccacaaaagactcaccaaagtacacacagtaccctgctatagacttcctatcatcgagacaacatgcccaattagcatcacaataccccgtgattgacaaatggtcactgtgctttatatgaattccatgatgaatggtaccctttagataacatagaattctcttggcggcactccaatgagttgttgtaggacttgtgaaattggctaagtttgttgacggaaaaagcaatgtccgatcttgtgtcagtaagatattggagtgcccctataacacttcgatactaagtatgatcagccaattcttcttcatcctgcagagacaacagtttttctcctatcatgggcgttgtgcacgacttgatgtttgtcatatcaaggcgggaaagaagctccataacatatttcccttgagagagatacattccagtggcatctctaaagacttcaattcctaggaaaaagttaagagtgcccaaatctttcaaggcaaaagttaaatgcagcttgtcaatgaacttgttaagttcttgagtgttgttacctgtaatcactatgtcgtcagcataaataagaaccatgatgacaaactttggagttttcagtaggaagagagaagtcttagcacgtgagttaacaaaactccatttgattaaagtttgtttcagagagtcataccaagcccgaggggcctacttcaaaccataaagggatttttccaatttgcacacataatcgggtttatctttgtcctcaaaactaggtagttgtcactgttagaactattattttctgtagtgacaaattatgtccagtagcattccagttgcgtctgggactcgtagtgttttgtctggggttcgtactgttagtgttagtccacgtcagcaaagatattttaggttttaattgttcagatggtaacagctgtctatttcgggtttcttggtttagctgggtataaatacgatttctgggtattttgttgacgaattttttgatcggagatttgggattacgtttctttcgtcttgtttcttctgtatgttccatggcaggtcagatcttggagcttgaggatgttcatcaatggcggatgaatttggaattgctgagttcaaactgaagggagttcagtgtcatcttcatcatcagatctgaagggatttcaggttgaagacatgttgaagaag

SEQ ID NO: 299929 - DNA, 2752 bp, Cannabis indica
ttcaaaattcctgcaattcagccattttttacttggcaacctcctccaaagggttatttcctaattaatactgatgcctctcttgagtatggtcaggctggttgtgggctaagcgttgttataagagattctgaaaattccttagtggtggctgaagttgaattgatcccaggttgtctttcagtgctgttggctgaggctgctgctatccttctaggcgttaagctggccctccgctggccaatcttgaacgctcaagtgggttcggacagtcaatctattgttaaagccttaaagggtgatgctacaaacccaacgaattaggggcagctggtgcaggatatcattcatttgagggtttattttcagtctttggattttttatttttgctagaaattgtaataaagttgctaataatctagctaagtggagtcgtttgactcagaagtccgatgtttggacagacatgttaccaaattgtgctgctgctcttttattagcagatgtgcctagtgttgctcaataataaaatttctctttaaaaaaaaaaaaaagaattctctatttttttagtagtgcgagtgtgtgtgacagagagatagaccgtgagtgtgtgagagagagtggcggctagttggtgtgtgtgattagggttagcattaggattttctaataatttggtgtcaacttattttcttgtttttactctttttttattatgtttttagtttttctaaaaaaaagcctatacgtgtgtctgtttataaatgacacaattgagttctatcaattgcaccaattgtaaacaaacacaaagctgccacaattgttaaaaatatagtgtaagttgataactgagtattttttttttcttttttgagaaatgatgcaattgagatttgagaccaacatttttcacttacatttatttgtactaaattgacgcaaaaaactgatgcaattaattgtagttttgtagtagtttcttttacatgtttcctttatatataagtattttttttaagaaaagaataatataatgaaaaaaaaatagataaatcaatgtataatgtattgtaaaaatgagtaaaaaaaaaagagtaagttttattgatttgctttaaaggattgaataaaaagtaaccattgctctttccgtcaattcaatagtgtttttgtgtggatactatcataatatatgttggcctgacaaattttgacactatttaaaatcacttattactcacatgattacccatgcctttcatttcatctcatctcatctaatctcatgaccaatatcacaactttccctctctgcatgctggttattaaactttagagtaccgaaatatgttggaccttttgtgcattaaacaaaaacacgaataaatatatgcaggacctaataatcatgaaactatatcaagttccatgatgaattatatatatatatatacatagcttatagctagttattattcaaaatctcatatatcagcaaacaaaaatgagagtattatttaaatgtaataaaagtgaagagaagtgaagagaagatgctggaaatgatgagagagaaaatatataataggccaaattaagagtgcagacagtggacagactcaaaatctcatcgtaccaattgtagtccaatcatacaaaagtaagaaggatttatgtgagtgtgtgagagaggccccttcgctgtcaacaaaaagggaaaaaagatttgtggggttacttggctttattttatacatccttttcttcctacactccaaactaaaaatgctcctattatatgtatatatactcaatctctttttctctctctctatatatttagctatatatagttagtgccaaagagagagatatgatattcttaaatgaaggccactcaacagacaacagtagtagtgtagttgaatgaagacaattctgagatgtctcttcagtacagtatatagtcggtagaggtgacaacaacacaaacatcaatgccacaacttttatcactactcgtgattatcacatgcatatgtatttatattgcttaatatgtatatatatgacaccatgacaacattgcttatgtatgtaattatatcattcattgcattatcatacaccccattttaataatttaatatatagttacaactactcagtgtggtagttaattactacctagatttttttctttatcttttggtttagtacttttgagtatatgtgattttagtaatgaaaagggaaaagaaaaaagaaaaatatttttgtttttggtgttttagttttagaaaatatgagaatttaaattctcccatatttgtaaatagaagtgataagaatttaaattctcccatatttgtaaatagaagtatattatatatatatagatgtgtgtgggatagactttatatgtatatcagtatatgtgtttttattatatacaaatatgtcttttcatattaaataaaaaaacaatagtgaaatatcgagtatttagccttctcttacttgccacgcattttaggtaagctttcattatattacttcattttttttttcttttcgtctaattgattagttcatcgatctttattaattttcttttgaaactaagaagtaaaacttccaatgtacacttaggcacaagactttagatcatggacggacccacataaaggtgagaggtgactaaaaaaattaaaaaaaatgtacatatattttaattaattaatt

SEQ ID NO: 299930 - DNA, 4081 bp, Cannabis indica
tggtatgttctctggttgcattatgtttagccaacaatttcatgcttgggcacatggcaccaaaagccgactaccgccactcgtggcggctctacaagatcttggcatcatcgtgtcgcggtcacagcatggagcgcaccaccgtgcaccatataacaataattattgcatagtgagtggtgtttggaatgaggttttggacaaccataaggtttttgaggcattggaaatgctcttgtttttcaagctaggggttcggcctaggtcttggactgaacccaattctgattggagtgaagaaattggggaccaatttcaataattctttgctttagttaaaattagaattcagtacaactaattacatataataattacatgtatattgtgaaaaattatttaaagaggcattaatactttgtaattgaatgtgtctgatctttttaattcgaatcaggacttaagaatgagtccccattctttctattttattttgtctttgttttttcttttaaagaagttcaccattcttttaaaaagataataatatacatatgtttgttattagattgggctgaaattgattaattagtattgtaccatgttaaactttctagacattgtagtagaagagaaaacgaaagaaaaggaaagatagagaaaacagaaaacaaaggaagaggaaagagtgaattgaattcaatgatgaaagaacaccatacattatttatatacacaactcactaacaaactaaatagacaaaagaaagaaggagaaagacagttagaacactaactaattaactaattggcatttctaaccaacttcactaacattaataacataattggtatccgtaacactctccctcgaacgtaaaataaaagtatcttcaattctgagtttgagtcgaatatgttgaatctattgctagaaatagagttggtaagaccatctgcaatttgatctatagctggtacatgtctaatgtcaacaacatgctgcagaatcttctctcgaacaaagtataaatcgagttctatatgtttagtcctgatatgtagaaatagattagcagttaggagcacagtacttaaattatcacatcacactattgggatcctaggtagaggaacatgcaattcaaagagaagagaatggagccatgatatttcagcaacaacatttgcatgtgatctgaactctgcttcaatactagacttggaaacaatatactgtttcttggaggaccaagcaacaagatttgtgccaaaataaatggcataacctgaagtagatctcctgtcatcaacatctgctgcccaatcagcatcacaaaaggttgtaatttcaatatgtgggggtttcttcaggtgcaatccaatgagcttgtagaggattctacatgaattgacagactttgctgacactgaaggagatatcatgccttgttattgttaagtattggagagctctaacaatggacctgtacagttgaacattctcaacaggatcacttccataagctgaatgtttgagtccactggtcataggtgcagatgcagacttggctctttgtatttgagttttgcttaacaagtctctaatatactttccttaagaaagatgtaagccatctgcagtgtattggacttcaattcccaagaagtagtttagttcaccaaggtctttaagagagaattcagtgtttagattggaaacaagttgcgataatactaaagtattgctgcctgcgatgagaatgtcatcaacataaaccaaaactaatattatagcctaaggagaatgttgaatgaacaaagaatgatctgactttgatgagacaaaaccaaacttgtaaaaagacagttgcaatatctcaaaccaggctctaagtccttgcttaaggccatatagagctttatgaagtttacaaataagattaggcattgttgtaacttcaaaaccaggtgttgtgttatgtacatctcctcttgaagaacaccatttaggaaggcattattgacatccaattatctaattggccaaccttaagagagagaaagtgttaacacaactcgaatggtgactggttttacaactggactaaaagtttcagtgaaattgaatccaagttgttgatgaaatccttttgcaaccaagctggctttatacctgttaactgtcccatttgtgttttctttctctttataaacccattcgcaccctaatagcttgtcttccaggaggcatatacctaaaaagattttaaactttatctggcgaggttttcatgagatacttcctactaatgttagtttaaagaaaaggtatattattaaccattccaactgtccagtatgtggttacaattctgatacaaatagtcatgctatttttttgtactgtgtttaattagaaggtgtaaaaattataaaagttcaatctcttaaacaatctctttatagaagtttcttttcaataaataattattaaagcatcaaaaatgttaccacaatcagaatttgaagtattccttgtggcagcttggtatatttggggagaacgaaatcaagtagagcatggacaccaaatttgttctcctgaatttatagtttcatgtattcaattcttttctaatgaatttaacagtttaaaagagaagactaactgcacatcaacgtcaatgggtacttttaaattaaatgtgaatgcatccttgaatgatataagtgctacaattaggattggagcaattatttgaaactcacaaggattagcaatgacatgcatttcaaaaaaattatttggtaatggtatccttgattaatgttttactcaatagggattttttttgttatgatgttgtttctcatacttctaaataaggatatcagataaagttcagatatttatgtggctagtaaggacgaagagaggtttcccttctatccaagataggctcaacatttattttacttttaatattatttgtttttattattattagtttaatatcttggggtgaaccttattttgttctatgttggttttgtaagaaatttcacagttatctaggctgaagcagtagctcttatgatagcgttagattggtcacttagaattggtctccctctttattctattgaatatgattgcctagttgtgatctctgctttcgctaaaagatcatctctttttaatgaccttggttctcttttagatgatatttctagtctactatccaattttcttgaagcgttaccgattcatgtttgtcagttggccaataaatctactcatgaattatctgtgtacgcacttagggtggatgttgataaaactgaacatttcgagcaggttcgactcgaatccgagcaacccgcctgaacccgaactggtgaactcgcaaatttttttttgaaaaaaatgttcgggcatgtcaggtttaacccgataggggttacgagttaagtttttaggagtaccgaatttcgggttgaacccgaacccacccgctaacccgcatattcaattcattgtatattttttattttttttattacattatatatattaattaaaaaataaaaagaactaaaaataaaaaaccttaaaattgttatgttatatatgtttaatttaataaatacaaaaaataaaagaaataattatttgaataaaaaattaatttttttaaagggttgaccgagttgaccgggtcagcctgccaatccggtcaacctggccaaccgaaaccctccaacccctgacccggcaacccgccaacctgccaacccgccaatctgggtccgggttcggtttcatttttttgaactcgaaacccgtggacttgaaactcgctaatccgaaacccaataaacttgcccgatattcagccctagatgttgagctagtttggatggatgattttttttcttttcttttcgatgtactcattgctgattttttcaatgaaattttgttcatcgttcaaaaaaaaaaaacccttatatctagtcaatgatatttaaagtagaaaaaaaaaaaaaaaaaataacatttacattattttaaaaa

SEQ ID NO: 299931 - DNA, 1117 bp, Cannabis indica
gattaaatccacgtggcagatatcggcggcggcgggaccaactactggatgaccacccatcatcatcatctcaaagggttgaaccgacggactcatcccaggtcggtgatgacctgggaaaagctcagtaggttgtgggattgccggaaaatgagaccttgttccgttcattaactgccttagatccgccatgccgtactgatcctccatttccatggagcttattataacaatagaagctcttttctcttactcagctcactctctctctctttgattttttttcttttatacaaagaatgaaagaaggataaatctttagagagagaaaggggagagaagagaagagagagagaagcagcggtagagtcggatcgtgtcgtccacgaaaaagctatacaaacttaagaaacagcacattggtccctcccatattatgtgtatctacaattttacgcgactgtgaaaaacgacaatcgaattctctatctttctctctctccttaaaacgatgtatagttttgtgtcgtttcaatagacttgaagtatcggtagtagtagagtgcagagaacaaacacgtacaattgtgtgttttcagagtgagagagagagagggtgtgggtgtggcagtgtagtgaagtgatggcgtatgagggaatgacacgtggtgaggtgtagaggaggagtggaatacagaggagttgtgctcctgatgacgcgtgtacagtgcttaggatccgacctttttgaccattttctttctttctctctgagctaagacactggagactctctggctggttccagcgtactacaggttccgaccaattagaggtttccacgtcagcctaaataaattcctactttctcaccctctgtgggctcgtgtgatgaagttaagcccaataatgttcagaagtgctaaaatccagtccgcacttttttttttttttttgttaatgttataattaaatattatttgtaaaaaatatttttaataaggaaatttacacccattatttatttttttctatttttttttcgtttggtactgtgacacggtgaaatttacttttgttactaattttttttttagtctagtatactgcctttgtc

SEQ ID NO: 299932 - DNA, 2229 bp, Cannabis indica
aaaataacagtgtgcgtggccccttgagaagtaaaagtatggaccactcactcataaggtgaagtccatggcctaataagctttcttgtctacttcgcgttaaaggtcatttagctatgtgtaaatcatataagattagagatctttgttgcatatgctaattgattgattgttttagtgttttaattcttttggtgtctccttctttgaaagccaaagtagatggtctatatgaatatatgattaatacctctaaatcttttataatataaatataaatatagattttttctccttttcttaattgggtaatcagcaatctataccgagcaagaattattatcctattctgtgtatttttatggacttgtttggcttcctattatttcccattgaatgttgtataaggaaggtggaagctaaaggaaatggctggttataattacttttgattgtctgagtttcttatgttcgagtagtgtgttagtttttgcagtaattattttattctactacgtgtctactcaggttttcacaatattgaaatctaagtcactgattatctgtcttcttagactggagcaatgaggcttggtagggatgctttggttcttacccagactgctgattccagatcactagcttttctttctcagtctttgaatgaaaataaagatgtatggcactactttcactataaatttccatacacaattttcttgacataattgcttacagttaacatcacttttatgaccatttgttgcaatgcagaatcttgagattcctattgtaagctaccaaaggcacgggcaggttatggaagtagatacaaatgtgcagcctgaagctttagcaaagtacaatttaaaaaccattaaagagttttcaccatttaacaagtatcttattggtgaaaaggctgccctttttcatgagcggacaggaacacaaatatatatatggaatttagatgagtggggttcaaattatagtcttgaatggtgtactgggttgaatgataagagcactgtttgcgaaagtgacatatacatccgttctagaaggattagatgtcgtcctggtcaagtcagccaacaggtgtgtcatccgtaccttgttgtaagcttgttcaatttcccaagaagtgaacaagcctgttgtaagcttgttcctgatcaagtcatccatggcttataatttgttctttttggttttcaggttccgttagattattcacttcgatcttatctggaagttctttttttcgtcccaagaatgaagatatatgttcaaggttcactggtaacatatccttctggttttttggttcttggatgattttagctttcccccaagattctttttaaatcttagcttctaaccaaaacaggttaaaagtcgacctttggcaaagtctctcaataaaactcgtgtagaaagtggaattataatgggaaaaagtgttcagttgactcttggtaggagccaaatagaatgggaccgggcaaactgtggtatgtttttgtattggcatggtcgtttgattgaggtgagcagctttttcattaattgatttctatttgccttttcacttttctcagtcacgttgttcattgatatacaatgtggaaacaagaaactatcttttttgtttgtgtaagaaagaagtgtagaccatgaatttttagttttactgtttaagtctactttagaagagagcttatcttgcatttctttttgtttttggtgtggcaatgacacttttcatgcattgatgcaaatttaggaagacgaaatttttttagaacccgatacaagcagttatgttggatctgaataacatttgactttgtatacatcagatttcccaagtgatacgatgtcatgtaaagggcaaagggaagtgatagtttagttgaaaaataggaagttaatcgttcaacttcaagtattgtatctgttaaaatacttgaagttgaacgatgaacttcctgtttttaattaaactatcactcccctttgcccttctacatgacctgctacaaatagcatatgacatgctgtaattatgaatgtagagcaaagtattggatcagatttcccaagtgcatttgaggcatagttgtattataaaagtattctaatttatatgtcaattcatttagctgttctttcatgcttgtttatttcttctgccattttatttctctctctcactctctctct

SEQ ID NO: 299933 - DNA, 1956 bp, Cannabis indica
ttttttttttttctattttgtattaatgagaataaaaattaaatttgaaaattttcattattattttaataaagtatgggtgttgaagaattattaaaaatatgggtccagaaattttttattttaaaactttgtatgaaaatgtaattttacaattgtataaggggtaattatataatatttatctgtccatatatacattatatatatacatgggatgcataagagttctccattggaggcaaaggccaaatattgaagttcaaacttgatccaaacagtcttagtaaatttagttaattgataagatggtgagcgtaagagtagatatagtctccaaagagatgatcaaaccttctagcccaactccagatcaccttcgctcttaccaactctcctttcttgatcaaatttctcctccactattcgtcccttttgttatgttctatgacaaagagaaagatagtactaataattataatgatgttgttgaaatatctaccaagctcaaaacagccatgtctcatgtcctatctcaattttatcccttagctggacgactcaacgaggctactgcttgcgttgattgtaatgacatgggaatccctttctttgaagccaatgtaagttgtcaattatctgagttcttagctcaaaaccccattctacctattgagctcaacaagttcatcccattcaaacctgattatgaagaagtgtcccatctacctttaggcatccaactcaacatcttcaagtgtggctctattgctattggttcatgcatatctcataaatttgtagatggcatatcatattttatgttcctcaatagatggacagcaattgctcgaggagatcaatatcaagaactgcgattcgaagcagcctcactctttcctcctatgaatttatcacagtacaactctaaaactggctttgtaaacaaaaatagcatgagttttacctctaaaagatttgtcttcaaggcctctagtatcaaagatcttaaacaaagatatgttgtggacaataaaagtgtttctcgtgtggaggctttgtcagctttcatatggaaccgttttgttgctgttgatgatttatccaagaaaactaataattatgtgatgagttatccaatgaatcttcgaaacaggtttgatcctccactcttagactgttcatttggaaatattttcagacttgtaatgtttgatgttgatgtatccgaagataatgagtgtgagatttttataagaaagcttagagaagaatttagtcacattgatggcaagtatttgaaaatgctacagcaacaagagggaatggtgaaacacttggattttattaagaagatgactaatgaaaagactctttttagtttcagtagttggtgcagatttcctttgtatgaatcagattttggttggggaaagcctgtttgggttggcgtgcctccctttccatccaataatttagtcgtgttaatggattcgaaatcaggtgatggtggaatagaagcctttatcaacttagacaaaaatgtcatggataaacttgaatcggatgaagagtttctggcatttgtgtctgtttgatattataattattattattattattattattattattattattattattattatgttagttatgttttaatttattattttaagtgattaattattgtgcctaattttatacttttgatataataaattattggtcataattaattagctagggcatgtgccttcaacatattaaagcatatctaacctctctataaatttataatattttattttattactcttttacattatttaattatttgtagtacttttttgtaaaatgctttaatagcgagcaactttaaaaattattaaaatcatattatattattatttaatatatattaaatagttatttttttaaatgacaaaataa

SEQ ID NO: 299934 - DNA, 3733 bp, Cannabis indica
ctagatcctggtaaaaaaaaaataaactccaacatatttgtgtagaccaaaatcgacaagtgcccttgggtttaaaaatagttccattggaatacaacgacaattggtaaacatatatgggctacttttactaaaaaagaaaatttttgggtgaagtggatctagaatatgtgtatgtaatatctcgaaaagtataattatgtttaattgaatatattttattaaatatgtagttatatgaataaaaaaagtaagattataatcttactaaagttaattatgaaataattagagacttttgagaaaatgactaaataatcgcaattcattaattagttacaaaatttttattgaaatatatgagtattgtatatactatttttgaaataaagtatttttaggttcggtgactggagaaactcgatcgattggccaagagagtcacgacagtaatagaatgagatttagtggtaccagaatgttttgttagaagttggtgttgtcagggaatctcagactaatcggttacgatcaaattactcataggttagaattttttaaatgttaaaccaatggtagaatagtcttttctttggtttagttaggtttttatcttatttaaaacctagttatttctaggctgagttagtataaaggttttatttattaagtatatcaaaaacaaataaaaataaagaaaaaaactatttcactctcatccttcttctctttctctctctcgaaggccttagaagctaaggaaaaaacatcacttttctaaatttcttgcatcgttcagccaaggaaccttgctcaaggatagaattaagagaagaatactaaggtaagtgaagctctacccttttccctttgagattcttgatgaaatataaggttttggtctaattttggtttagggttgttctatatagatgagttagtgttagaatatttttaccaagcttaattattagatactgtgtagttctagtgcttgaatatctgttgttggttggaaactcaagtttgagttcatggaactcaaggttgagtatccatggtaatttcgtaattttaaggtaattaagtgatttgattgtttagatttgttgtatggatgttattaagctattctagaaagtttgattaggtttgaaggagatttggttggatttgtggtgtaaaactcgagttgggctatttctgtaaggaaaaatggcttaccgtttttacagaacagtgaaccgtttttctagggctgaacccagaataacagtggaccgttttaggaaaataatagaccattttggggtgtttccagcacctacgtttttttttttgtgttttatcgatatttagggtgttatcatgctatttatcgatagggtaatttctagttttgagtttaagtcttagaatgagattgattaagttatttatcaatttaccattgtcgtgacatataggcttgagatcgtcaggtattattccactcaagttggcccacacacttaaacttggacttaaggtaagaaaagtcaattgtgtcgtattgcatggctaattaagatatggtactaattactgttaatttggtagagttataactctaatttaaaattattgttaggttttttacttatcggttgcctcattaggcaacgatagtgacataagagacttgttggaaacaagagttaaggatactttataaaatatcaaatattagcttatcttattagacaaataattcattattagtacttgggttatactgtgatcaactatatgattgtatgtttaagagtatgcttgatattatgtaatgattcatgttattcatgagatttgtgtttctcactttttttgctaagtcattgtgacttatgggtactttgtggtgcaggtaaggaaaaaggaaaaatggatcaaccatgagtcagaggtctcccgacgaatatacatatcaacctcgttgtattttgtgcttagttgacaggatctgacttttgtagtattttgaatatgtattaatattttgtaataaaataattaatacagtgatattttagtaaagtttataggaaaaataggatccctaacttggaaacattttgaaaagaaaattaaattatatattaaagaaataattactaaagttttaattaatccacaattttattttaaatgttagtttattattataaattaattaaagcacacacatggcgcccttacgagttaggacgttatagtgtatatgaaaaaggaggattggtgagcatacaatgctctcttacaaaataatggtattggaggaaaattgtagatgtcaagaaaaaattcatcaagtgcttcatctcattgcaatcctttttctaatgaggaatactatgtcaagaaaggcaatcaactgctatgaggtgaaatagaagaaccaatggtccaaagaagtttggactcgatcgattgaatataccaaagcataactttatgctatgactgatagtttgggatagaatcatgatcagaccaaggagaggttaaagaaaataggtattcttgacacttctgaatacctcttatttggaatgcatgaggaaactttgcactatttattctttgattgtgaatatagcttgagatgtttgtagcaggttagagagtagacaaagtggcaagcgaaatctaacattttcacagactccttcagtggattgtcagcgacaaaatgagtaaattaaaaaattgttatatagctataataacaaccttaatttatcaaatttgacttgttcgcaatgatattttatggaatcacaagctcattagaccgaaaataagtgtaaagatgattaaagatagtgtaaaaaatagaattacataccattagccatctaaattgagccaaagtgattgtgagtggtatagcacgttgtgatgaataatcaaaagttgtaattagaaattttcaagccttaacaggtgatgtagtttataatgttttggaagtaatacaagtatttgattcataaaaaaaaatttcaacacgtgacaatcttatcagtatttaatggtgttgttaaattaggtattaaagacatataataattaagacattgagaagtattgtcgctattttttaaagtttgagaattatttggatctaagtgaacttttttatgagttttgccacaattttctctagaggtatacataatcaatgggtggtggggcagttggctagtgcataggtctcatagctactgagttatcctgaggtcgagagttcgagcctttctcaccccaatttcatttacattcttctcatttaagaagcgacactgcaataaatgcaaacactcttaaacgacattaactttcacaagaaataacacgaaaatagaatagccaaatatgcataaatgacattataattttgattttaaaaaagaaaatgaaacaacactacaatagatccaaacgctcataaacgacattaacttttacaagaaacgacacaaaaatagaatagccaaatatatataaacgacattaaccttgatttgcgactaattaaaccccacaatcaataacatcaacacaattgagatcgattgattatactaatttgtataatttaaaaataacatgaaaataacttaaatattaacaataatattttttcacgcctaaattatgcacaatgtataattatttttcaaccataatt

SEQ ID NO: 299935 - DNA, 1577 bp, Cannabis indica
ttatagattaataataataagtttataaaagcacacacgtggcgttcctgagggtcagggcgttacaggtcgcggcaaacgatgaccttaaaattctggttagtgaaactcaattacaatcatgttccttataaaattcaacagggatatgctttctttgaacctgatgttgacaaactacattggaccaaagaggtttggggtagattcaacatccccaaacattgttttattttgtggttggctgttcaaaattgccttaacacaagagacaagttgaatcatataaccttagtgcaggattactcgtgtgtcctttgtggcttggcatcaacatttgtcttgcatctcttttttgagtgcattgttagaaagaaagtgttaaaagaagttaaaaattggctgaattggaatgcaatgaccacttctcttcatcaattgattaggtgtattgaaagatcaaaaggtagtaaagttaaaaaaaattatttctgttagcttgcattgcagctttggtctattatcttggcaagctaggaatgaggccttttgctctttgaaagttacttggatagaagttcttgtaaggagaatagttgaaagtattaaaaatagatttttttttgtgtttggccaatgtttattggaaaacaagatatataatggtttgaaaagttatagattcacacttgtatagatatttcaggcctattttgctaaagatgttaagttgtaaatggttttgttatcaatgatttaactttctgagcttccaaaaaaattaccaattaaagcacatgttgatagttaccaaaagacaaacaattgataaattttcttagtccataagtcaagtcacatgactccctctttttattaatattattttttttcgaaataaaaaaaaagacaaagaaactaaaatattttatacaaaaatcaagtaattcttaagcatgcatctttccatgtatcatgaaaaggacaaataatcatgttatgcttttaaagatgataaaaatttagtgtctcaaatacaaaccatacttaccaaatattgtgaaaaactaaacaagttacatgacatatcatgtgaatacgaattttttttatttgaaaagaggagacttacaaacttgtatacacttgttaggcattagtgtgtgtatgaaaaatataatcattgtccttttcataattttcatgtttcacctttttaaatttgatcccgcaactggaagttgtcacaccatactgaaagtagcccttttctatggaagtacatcctcttcataactcctaattacaaagttccagcttactcaaaagatgacttttacacttcagtataggtagctcttttaaagtaagggacctaacaagaaactgaaacaaaaatagctcaactttgtattaatactttaatttatcccaatcacacatatgtaagtaacttaaatcttttaacccaccttcaaaagtatgaagattacaaaatactaagctaattatcacccaaaagcataaacattgtaacaccctaactaacataggcgtgttaacgtgattttaaacat

SEQ ID NO: 299936 - DNA, 4704 bp, Cannabis indica
gaaaatttctatgtataaaaacttttttgttttcaacataaataattttacaaaatgaactattttattcaatttatgttcttttttcctcggtttctcctcatctctagtaagttaaagttcaccgatcttaactagaccgccgcgtacacgatctttgataccagtccggtgcgcactgcgcattatccaccgataacgaccgccaccaccctccctctctccactctccactatatatatagccacctcagctcagctcagctcagctcagctcccttgtgcccttcggctctgtctttctctctctctgattcttggttttaatcttcattcattatcattttcatgctctaatttctagggttttacttcctttcttttaatcaagaaaccctaaccatggccgattggcaacagctgattcaatcaatcgttattggactcattttctcttaccttctcgccaagctcatctccatagtaacgtctttcaaggaagagaatctcacactcactcggagccacacccaggacgatcaacttcttcccgagtccgaatccggacgggagactgacggagaatctgttcgccctcctgctgtgggttctggagatttgggcgggtcgcacgatgttgattctgtgattgcggagcacggtagtgttaggaatgaaagcgtagctggtagtgacgagtttgatgatgaggatgaagattcggacgatgatgattgggagggagtggagagtacggaattggatgagatgtttagtgctgctacggctttgtggcggccgcggcggctgatcgactatcgacgaagaaagtctctaatgatgtgcaattgcagctttatggactctacaagattgctactgagggtccctgtagtgcgcctcagccatcggcaattaaaatgactgctcgcgccaaatggtattgcttcactgttactgttactttgtgtgtatatatatatatatagatttatttattatatttttcgtgggtttgttttactacaatgatcatagtttattgcgtaatttaggtattctgatacttgtcttgtcatattgagattgagctctgagactaattaaggctaatgaagaaggttaaggaacaagttgttgatattccaaactgttaacaatttctgtagaagggtaaattgatgctggaaaattgaaagcactattacccagatgttgtttagcaagatagtttatacttaggaagtcattatggatacattacacttttggggagaattaggcgttgtctgttgtttcatcataaattttgtgataggtgttttagagtgatggacttttgaaaatcgaacaacattgagagagagatattgtgtaaattatgactgcgaaaatcagtattatgaggaaccatgccaatgtatgaatggcagacattgagagtctatcaaatttaatggtaagagttcattggttggtaattactagctgtagcattaaattcgtttcatttgagtaatactgtttgtgaaaatacttaaagattatctacctacatttatttgtttggtgaatggagtaaaattatagatttctaagacaaaatttaactgtttggagtttatgcttggttgcttttaccttattccattagggtagtgagaatgttttatcaagatggtttgatagttatttctggatcaacattctaggcaagcatggcagaaactgggtgctatgccaccagaagaagcaatgcaaacatacattgatattgttagtgcactgtatcctacatggctggcaggtgcaagtatggtgagaccgtgattctcttttctgtatgtatttatttagcatttctgttcatataatgactctgtgtatttcatctgtgttaactagaagagcaggggtggagatactggtggacctagtaatgattccagaggaccaatgggaccagttttcagcacctttgtttacgaggaggaatctgcaaatgatttgtaagattcttagaattttaaacgtataagtttgcgtatattatattactagttttctgcacattgatgtaaatgaactttatacggtggaggctactcagtactaagtacttgtacttatacagagagcggagtaagaaaactgcatattacttcttccagaagctataaaattgaaagacatcttttattatgtccagatctttctatggattttatgattttctgattgttttcacatctatacctatagtttactggttattaatttttgtgacaactgttataggattctaaaaagtactattacgtttcagcaagatggatgctattcatggtttcgccagagaaggagaagtggacaatttgctcaaaagcattgaaagtggtgtaccagtgaatctgaagggtttgtttttacatcatcggttacctacttcttttccttcttcacttaacaattttttttcccacatggacacacacataattagtttgattctcaaccaacaagctcctccgacttgtggaacctatcttgagtttctggtggactttttggctgaaaatttatccgcatggacctaacacagttgctgaaattattatacagatagcgagggtcgaactccattacactgggctgtagatcgtggtcaccttaacatgtcagagctccttgtcagtaagaatgctgatatcaatgcacaggtatggaatccaacatttcatttcttagcataatctaatcaattagaccctttacatttgtttcgtcatcctttcacttcccgagcctgcgtagtggaagaacttatgaagattttattgacaataactggaaataatgattcgaaaacaccccctttattaacgaaaactcgtagaaaatgagatcacattttccttgctaaaattctgtaatttttcttcttgaaggacaatgaagggcagaccccgttgcattacgcgacaatgtgtgagagagaagccattgctgaatatcttgtgaagcaaaatgcagacatcaatgtaaaagacaacgacggcaactccccatatgatctttgcgaatcaaactggccttggatgcaacactcgaagaaggagtagtagtattcagttatataaaagaaaaattctggttgtatatggccatgtacaagaacagccaaccctttaatctcatgatattatactaatttagagcctcaagttttttctttttctcttttctaaaaaaggaaggataaggttccactggttcaatagtagcaaaacaaatatgttctttcattttctttggcatttgcaatagaattgacacgtgtcttttcctcaactgctcaacttgacatacttgctcttatcaaaagagtacttggtccctactctgtagttaaatgctcaaatttgttgaaccaccatgtaattgtgctctctgttttagtgtgtttttgtttctgtaaagattttcgtttgtaataaaatggtagtttatgtgtggaaaggtataaataaataaatatagcattattttgttgattaatgatgaatccctattattagcttggtttgggtatatctctggctaagatttctaaacacaactcaaatcaagcctagccggtacatattgtgtgtgtatgtatatgaatgtaccttccaattttaacggtcaataactgtcaatacatggccatgtctgtttctcccttaaagcccagccctattccaatcccaatctttgtgatgccctaattaattaacatggcgaaggcagtgatctatgcccttgtggcagctgccttcgtcctcctcatcaccttaggcccttccgaacaccaccacaacagcagcggcggtggccatagccattttggccgcgtaaatcgtcgattcgggaacagatcccgggccttggtctttgaccctcttgttgctaaaattgaaagatacacagagggaaaaggatcatcaaatcatgaggatggtgttgatgatgatgaagtggaacaatacattggctcagaaggaacgttgaacataacgttgaggctaatgatagtgttccctatgttggacaaatcaccaaaagatgggttcattaattctttagagctaaataattgggttagaaatatggccgtggagagactcaatcaaaggactaaaaaagaaatgatttcacatgatcagaatcatgatggttccatttctttccttgagtacctccctcaattttcagatgaagatataggtaggtacttctgatatatatatatgtatatatgattgttaaaatcttattttcaaaattatttagaatttttggaaacttaatactgtgattaaaaggggtattgtaagttgtaacagagaaaaatgagatggggcatggagaagctggatggtggaaacaacagttcatcaatgctgacattgatcataatggaaccctttcattaaatgaattcaaagagtaatacatcattaattaccaaacactttctttctcatttcacaattaaattaattaatgaactcaacaatatatgacaataataatccttattttgttcgtatttatgcagtttgttgcacccagaagatagtgacaatgaagaaattaaaaaactggctgttaaaagaaaaactagagtatgtaacatatacatatacatttacattgata

SEQ ID NO: 299937 - DNA, 4127 bp, Cannabis indica
agtatactaactaattttgaggattaatataataaatattataatatttcatatttaaaagttttctagtatctaagtttattttaaataagtaaccaatacatcttatacaatagagaagagtcatatttacaatatcttgactcattaaatgaagaataatcttacacagtaaaaccttcatctaagaatactctattcaagaataatctctaatttattatagaaaaataaagttacgatttggaccaattataaataaaaataacatttaaaatataattagttatatatttcctaaatctcgtattaacaaagtatacatctatataaaaataattacatctcaataaaaatatatacatatgttttataaatttatttatgtaaaattaataattttattccaaattgtaatacatgtataaatattatatttactcaaaaataattttattataatgtagtattaaagggtgttcataaaatagctaatccaatccaatccgcacgatccaatctaatctaatctacaatgtgcggatatccacacttgtgcaaattggattagattggaaaattcaaaatttgtacttgtgcggattggattagattgaaaaattcaaaattcttacttgtgcggattgaatgttgattgacatataaaagtaaccgatcctccaatccacacacatttataaaaaatgtaaaaaattatatatacaattaatattttaatgtaaaaaaaataacagttaaaagtctaatacatattgttatccaagttttctttcgacagacacgtggcacgattaaagtagggacacgacttctatgtagggctttagagaaaattagaagaaataactctcagactcagaaggcaataagaggtaatagcttctggaagctgcctccttcattgagaaacttgaatagcgatgcaagatccagagaccttggacacgtcagctccttgccaaatggcgctcaaaaaacggttatacctttttctgacacaggattagatcatgtcccttgtgccaacccagggtagtgtgcgtacgcaccctcacacatgctttttgtgtaacggcctgggtaattactattttgtaaaggagagacatttagtcgacacgtgtccaaggtcgtacaaagttcctaatcgattgccctacatcacacgatgaagaaggttccctccaatggacagtcagatcatccttttatagtacaagcctttaaatacccgcattcttttgaaggaaaggaggaatggaatatgcgccgtcaccctgcaaaaatacctagttgtgacttctcttatgcaaggctcatttactgtaatacattgaaatcatcgataaagtgaatataatatttcaaattggaatttgagtggtgcaccccatatatctcaaatcaagagcatgtttagctctatctgatgacaatttaaaaaggagtaaataatatttgccaaattgacagccttcacaaagagtttgttgttcattcatggaaatgtttacattggctacattgagaacttgatttaaaattttggtagaaggatggccaagccttctatactagtaatcttttaaagaaactacaaattcatgttgaacagaattagaaattgtagaaaataaaacatgtgttgaactgggaatgttattctttaaacatgagaaggtaagtagagatgttggtgatgaagatctagttgttttcccttcaagttgatacaagtcatctttaagtttctcccatagtaccattccatgtccttaacaagatacacattaacacaaaattcaacaaaaactttattatcagctgtaagttttgaaacactgataagattctttacaatttttgaaacatgaagcaaatcttttagtattaaatcaataccactaatatgacttatgccaatgcttgaaattaattatttctcatcaccattaccaacagtgagtttgtctttacattcatagttggttctagcactgagatcttctacctaagaaatgatatggttgtcgacaccactctaagcataccaattctcattgttaacagtttctggtcttgctatgtaggtactgcgatccttcttatcttgttcagtgtagccatctggtgtactccccataaaattgtcatcatacctgttatagcaataggttgttgaatgaccatacttgccacaaacttggcaggttagtttataaatatgtatacctcctcttcctgcacctcaagaacttggaccacctcggttgttgtttgatctgcttctagagttttgaaatggataattaggttttcacccatgtccccagtgaggagaaccttaatttgaaaggtttgctatggctccactcaaaccaacaggaggaggtaaggtgctcttggatccagatgagacaacactatgtctctcaagagtgttgtcaaaactgagaaaaatttcatgtagttcttgccatgtcatgttagggtggatctaaacaataatagcaataaattctgcatttaggccaaaaatcacattagaaacaagatgactagttgtataaggctcaccagcaagagcaagcatattagcccaagatcttttcattatgaggtaattgtgccttttctaactgtctataacttcaaccttgtatcatcactcttggattttgagtgagctccatagagggtctttaaggctttccaaagatcaactgatgtagaataactcatgacttctgtagcaattgtctttgtcatggattcatagagccaacccatgagtaattggtcacaaacataacatttcactgctcatattccaggttgactatgactccaaaacttgatgacttatcccctgtagtggcttctgctgctatgtactcagtctgacagatcttggttccattgatgaattcttttagtctgtttccctttatgaccatagtcttccatagagtaaaattgttccagtcaagtttcacagcaaaaggttgagttagagtgtttccaaaaggagcattaaagaaagaaggacaagtagagctctaatttagaataggggtgacaacattagtgttttgaggagctaagtttttttttcttctactattgttggattcacatcatctcggatcagggtatgatttgaagatgccattgttgctcaggcgtgggccaaagagctctgataccaagtttaaataggtatggagaatgcagaataaatagaaaacttagttcaaatgatattgagactataattccattaaatatgcaaagccactcattaggtaattgtacagctgaaggaatattcccaataactaatatatatgatgactcacttaattctaaaacattcataacagaaaaagaaaaagccaaataaatctgttaaagcaaaaggacagttagatagagtatttaactaataataaagtaaggagattaaggactaaatcatttctgaacactatcatataaatcaactcctttactttcttaatttttggaagaggatagagatgatagcgcaacttgaatcgtttggtagataattagatgtcattatatcttgttgtaacttttttctgatatatttcttcttctacaataatttataaaacatggccctctctctcaccactaccattgccctctctcacactaccaccaccacaaccataattctagcgttgtcattgtcattaacattagagtcgtcaataatgtcgccactctcatcaaccataattctaatgattcaaaagttattctaaaacttaaatccccatggtaatatattttataattattcactcgggcataagtttgatttatatattatatatatatatatatatatatacatttgttaatctacatgttagaatgtgtagaacctttggaatgtagaacaacaaattttgatatcacaaatatgaagtttgagacttccaatagttaatatttgggttaatttcacaaatgcacaaaaacaataaaaatacggttttacggaattttaaacatttttacgattttttgattttatttactataaatacggtcttttatgttgaaattttgtt

SEQ ID NO: 299938 - DNA, 1731 bp, Cannabis indica
ataataataataatagaaaaaatccttgcatgcgagtaccacgtgggtcccccgtcgagggaggtgggttccgacgaaaaaatacatcgctttctcactcttttcttctcttaaaccgagttttacgctttcccatcgcgcgtgtccttcactctcccttaaaaagaaaccaactcgttagagcgtgttggttagttcccacaagagcgtctagccaaaaagaaaatatcattcctaagtggctgagttgaatttagccgaagccttttagaccggcttgatagaactcacgcctttcttatatttgtttttattattattattgttaattattttgtaatatattttttccaccaattgagatgaaactggtatcataaataagagaaataaaaatgggtaatgaattattttagtcaaagtcgcagtgtgtaatccgtgtcactcattaatgagcattccatttatttagtattttaaaagattattttcattgactttgagctttatttttctttttccttttaaaaattttaaactgctcatcaaattaagaaaggtaataaattgttgtgcgtgaccctattcagtcaacttttaactcctcaacactggcaacgccagctagcaaaattaacgtcaaaagctttcagttattcacaatataaacgttaaatttagattaaatattattttgaaaacagctttataacgtattagaaagtaaattttatcaaaataaatttatttaattaatttcatttaataagaattttgacaaaagcttatagaagccgagagagacaggggacaaggaagagtggatttcacgtgaaagagtgagtgtgtggtattactattactaccgttttgagttaaaaaaaaaaaaacgaaagaagcgtgggaggagagagagatgccacgtcagataagtcacgtggaccaacatgtctaggctgggaacacgtggattcacacgcacactaccccttctaaccatacacgtgggacccactattcttcgggtcacacagtcgtgcgtgctattttgtctctcttctatccgacattataacttctcacaatcatttgaactctcaattctactctcctcactttcccacgcgtctactctggcgcgtttaccattctctgtttcctcaatcatttggtgccaccaacaaacatgcataattacagaaactttactcctatcatttcttttttattatatgaaatatataaagtgttatttacgaaaggaaaaaaaaaaaatcttaagaataggtgtgtatttctcgcatcacacactcattacgatttagtttcctaacaataatttatttttcatcaataaatataaaaaaattagtaatgtgtttgttcgaatttcatgacacacatcatattcttaaattttgaaaataaaagtagtgttctcaaaaaaatttttgaaacaataccgtccccaatttagtttacaatctattttactatttctaattttgtacaatgttaataaatctgattttttttggtgatccatctctttctttttcttcatatttatctctcatctcttttctctatttctaaaattaatttctagttacataaaataaaatatactattgtaatctattttttaatataattattttgaaatagaatatatatatatgttataaatattaataattatgtggatgtccaaattttttatttattacc

SEQ ID NO: 299939 - DNA, 3010 bp, Cannabis indica
aaaaaagaaaaaaaaatcagaatcttcagagactttatacaatactatagaatactcaaaattaacaacctttatcaagatgatgatgagcactaagaagctagtgaaaatagaaaaatattggcccaaattgggaggtctaaacgggagaaaaattatctcctttcgtcccagcattaataatattctttcttcttcctacgatcgttatacgacaacaacatcgtcgtcgtttgtcgttgagaaaggtcatttcgttgtgtacacgagagacgacaagcgttttgtgatgccgttggcttatctaaacgacaacattttgcgagagctgtttaggttgtctgaacaagagtttgggctgtcgaaccatggccctattacgctgccctgtgatgcagcctttatggagtacatcctcaagctcattcgacgaggcgtcgccaaagatttggagatggctttgattcgttccatgaataataatcccactggctgctcgtccttcatttcttcatctaattttattgaagaaagatttgcaagccaacaaatcctattactagcctagctagtcatgtggttgatcattttctatatacatatatacgactcattacaataaagaatatatatatatatacatttaatctacatttatatactttgacaaaacctttttgcgtgttttaaaatcttgacttgatatcattgaattttgtaagtacttaatacggtttcttagattttatattcatactctcttattacacaattaatatatattgtgatctcgtaattaagataattctaatcgtcatcgattccagcaaaaaaaaataaaaaaaatatattacatatctagaccagtttttgatttttagattcaaatttaaatatttggccagtttaagcatcaatttagaaattagagtgagaggtccatcttgaagaagtaaaacaggggagagagatttgagagaagaaactaaaaaaacaatgctagaaaatcttaccattccactgtattgaatttatatatttatacactttttagttttcaagataaaactgtttacaacgaaaacaagaaagcttaactgaaaactaaacgaaacaacgaactttagtacttaccaaagagtttgttggctaattaatggctatcacccccctcatggcctcaaacaaaaaggggtaaataccaatttaagtttagcttttaggtagtgaaatttatccttggcaaggctttagtcaagacatctccaacttgatccaccaaaggcacttagtgcactgaaagttcattgtttaaaatttgatcacaaacaaactgctgatcgatttcaatatgcttgcagcgagcacaaaagacaggatttgcagccaaggctactactccttgattgtccacccaaacaattagaatggcaacaactttcacctgaagctcagttaacagagagtgaagccatttaatctcaattgtagtattggctaaggctcgaaattaaagtttagtttatagatcaggagattaagtttggacccaaattgatgacataatctcttgtggaccttttgtcatcaagatagcttgcccaatcactatcagagtatgcttcaatggaccttcgagtagctggttgaataagcaaaccttatgaaattgtgccctttaggtatcacagcagtattttgcaagcttcccagtgcacatttgttggagcatgaataaactgagaaagcttatttataataaaagcaacataaagtctcgtcaaaattaggtactataaagcaccaagagtgcttctataaagagttttatcttcaaaatgagtgccttctgtgagagcaagtttaagagaagtactagtagaactagaacaaattttaacaccttccgaataaactttgactaaaagatctaggatatatatgctttgataaaggtacatgtctgtagaagttcaacgaatctccactccaagaaaataatgaacttggcccataaaagtaagagaaaatgaggagttgagatctttaataaccttctaaatgagagtagaattaggccctataattaatatgtcgtctacatagacaaatataatgaataggttgttactagcaccataaaaaattataaatatgtattagcttgagaatcttgaaaaccccagctaaatagtgtggtcttgagcttatcatttgaagctctaggagcttgttttaaaccataaatgggtttatgcagtttacacacataagtaagatgattgggatctttaaaacccttaggttgggttatatacactgtctcttgaagatttccatattaagaaaaacattataaacatcaaattgttgaacttatcagttgtatgaaactacaagagctaacctcacagtcactggtttaactacaagactgaatgtatttacaaaatcaatcccaggctgttgaggataacctttggcaactagtcttaatttgaatttatcttgtgagccatcaacattaagtttagctctaaaaacccacttgtgataagagccatatgaggttcataaggaactagagtccaagtaccattaacaatgagagcaaaaaactctttgttcatagaagcattccagacaagattttgaagagatgctttaaatgattttggttctctaggaagcaaagattcaggcagttgatgcttggtagctagccattaggctttaggcttatagatacctctctaatatttgatcaccatagaatgagttctttaaggctcagtaactacaacaacaagttttggaggaggaatctcaaacactatagcaacttatgaagaaggaacatattgaggtagaggttcagaaagaacaacctcatgagaaataagagacgaagttgaagcgaaaacttcaggtaaatgataaggcaatggtgatctagttgtagagagttaaaagtagccatgggaactagtgaaggagcatctgatggatt

SEQ ID NO: 299940 - DNA, 2637 bp, Cannabis indica
tccatgaacactgcaaatgtggtcaatcttgccatttcgacatgcaccatgaatctttctaaaaccacttaggaaaacgtgtaacatcagacacgatccctaaggtgcagttttcaaggggtgtaatcatgccaaaagatttgaaaatatgaggagaagatttacttcaggtaggtttggcgcccaagttggatgaaccatccaagtaagcccacgcgtcacttaaccatgcaaagaaagaagccaaaaagtccccatgcgaccagaacagacttaggggcaaatgttaccccaaaaatttccctaatgacgtggcatggagctatgtgacacgtggcaagcatggttagggctagacagacgaagggtgaacttatggtctactcggaaggtgtcaagcagagcatgcatggactaggacaatccaacatcctacgagtgctggatggaacatgctatatgtcctaccgagcaactagaaaagaaacaagcaaatgaaatatccgaccagcgaacctcgtgagagaaaatgtttagattcattcctacaacttatttccttacaaataggtcaatcaacactactcctataattgaggaattacgagaatcaggggaattagagaatttggtgagattgactcattcaaatatataatgttttattctgtaattaaatataaagattctacatctttttccctataaatagtggatcatattcactattcagggatcgaagtctgtattctcaaaagagctattatgctaccaaattagttgtaatatttagagatagtaagaaactcacttgaccagattcatatgatcttgctatttctcgaagaaatacaacttaaaggggattatgttattaccgattcaagagtagaacctctataatccttgtgtgtcatttatagttcttgttatttttatatttaaacacttgcaattgtcatttcattaaactctgtgttgttgtctaaaaacgagttcaacagtaattaaagtttttacttttaaaaaaaaaaaagaggaaactttattcaaaaaataagcaagctacaaaaaactaaggcaaaagtcacaacacacccacggcaacagctacaacaaccagctaccacaacccaacaacactaccaatttctaattaaattaagtaaatacaagtttttttggcaagctttaaaaggacccttactcataattctatgttgaacaactctcttaacttccaaagttaaacttctagaagaagcacaagtcaactcaaaaatgcagcgattcctattcttccatatctaatataaagtaccagctgtcacagtgttcaggactcaattttggagatcatgagccatattattgcatctgttaaccaattcagatatcgaaccaggtcacttgtattcccccagccaagtattgatgtatttaaacacatgtttagagaaaatacaacaaaagaagacatggtcatgtgtttctatctctgcatcacagattgggcaaagagcattctgcagggataaaactctattcaagaagtctcgagtgagaagttgcaaagtagcaatctgccagtaaaaaaatctgtgcttaggcgtaatttagttatcccaaataacaccttcatagtcatctttagtctcctctatcaacatgttatagtactttttagctcaaaatttcgcacctgtcacaacaagtctcaacttgttctaatttgtactgtcacgaagattcaacaacttcttgaaatactagctgatatcctattttttagggtagctccagatgtcgtggtctttcaaatagatagagttgatccacttcacccacaaacaatcttgtttattagctaaagcccaaatgaattttgtcataagagccttgttccatattttaccttctcgaaaactaacttcactaagacttttagggaggccaaccttttcccaagaagctcggtaaagcttacttctattccctttggtacctcataaggaagtcccaacaactcttatatatggcagctattatcttggaaggaagaatgaatatactcatccaaaaattcctaattccaagtaaaaatgagtgaatcaattgggtgcgaccagcaaaggataaactcctacttgcctaacagttgagattcttgttgatattatccaggatcactccatagtctgaagttttccatttggttggacgaaggttgacccccaagtatttgagaggaaagcaactttcttcgaattgaactaagtcaagaatcttcaatttgatctcttcattgacaccctcaaaataaatttgagacttcgacgtattagcagacaaacctgtggctttgcagaacaacatgaaagcttcattaataagtttcactgagttaatatttcctttgcaaaaaaataactaagtcatctacaaaactgaagttagtcaagcacaggtgtttgcacaacagatggtatccaaacccctttctcccaacaaagtgactacaaagcctggtaagatactccataatcaagacaaagagcaatgggaacatatggtcaccttgacacgagtacccttttttccctttagtaaatttccttgaattctaccatttaataa

SEQ ID NO: 299941 - DNA, 3390 bp, Cannabis indica
cataaaacccaacaaatacaccatgccacatgtcaacgtaggcgttgggtggctatttcagagcttctgggatgtcattttgacacttctaaggttcttgaacttgaggacaaggcatcttacccctgtttttgccattttggagagaatgctcggagtagaattggcacgtgagtgatcaaaaccaacgcaccaggttgattgtcaacttgggcgttagactcaattttggtgctctttgtgggtttctcccagagtttacttgaatcttcgttatttctaatgacgaagataatgctcaaaacactttttttgaaaaattgattggaaacagcccagattgacaatatgtcaacttgggcgctgggcccagtgctaggtgccaaccaaggcactagatccagtttcaagccagctggaagttctgtttggtccccagaaattgaatcttaatctttggtgaaaacgaagaatattcttagaacactttttgaaaaactcctcgggattggcgtaggttgacaaaatgtcaacctggacgttgtgctagctctaggtgtcaacatgggtgttggtgccttattttggccccaagttgggttattttttccccgaaagtacttgttttcttgtttttgatgaagacaaagaagatgcacgtttcgatctgatgctggaaagtgtccaaggttaacaaattgtcaacctaggccttaggtgctccgggtgttcaaaaatggaagttctccaattctaattctaatgtctcaaatgtgttcgtggtatgtctaatttatgtcctagtacaaattttgacccatttgcactaggacgatcccgaaaattggaaccctagttgggttgtcaacttgggcgctaggtgaagcctgaactggtttgtcaaaataaaatttaatattaatctgatttaaaggtgttatgacaaaactgtttatattttctttatctgttcgtgttaggaattgtcttcaagttggttatattaaaaaaattgtcaaaaattaagttcatggtcctatttttacttttttttggaaaagataaggtcaattttgtcatttaacaaaatagagggtccaatcggtaacttttgcaaaacacgtggtccaaaatactatttatccttattattatattatctgaatattattttcatatttttttgttgttttcgtattattttttataaaatactgtaaaaatataattttttttattaaaaatagtactttgtgtaatttttttttatataataaatggcccataataagcgggtccaatggagaagttgagattttcaaaaaaactaaacaaaaagtaataattgggtaaacattggctccccaaagaacaaagttaaaacacaaagagaaaaattaataataaaaacatatatttataactcaaatttaataataaaaacaccttaacattttagtaacggtaaacaaaaacctagcttagctttcccctaggctccctttagtacactttttttctttcttttttttttaaaaaaaaattatacatgctaatatgctatagatcaataagaacagcctaaatttattcaaataataatttgtatcttttactgatttttaaagttataattcaatcaaaagttttactgatttaaaaaattaattaagttcatttagctctaaatacaatatcaatatatatatgcaaaataaattgtatactttcatactcaaattgtatatgaaattaaatttaagaagaaaagataaaagagggaaggggcacctctcaatttcaaggataaggtcaattattggaaggtgtaaaggctaaatgtatgggacaaaaagaaaagaaactttgcaaaataatatatatatatatatatttaaaataagaaattaaggcagtacaaacacacttgactttgagttaatataagaataatgatgagattatattatttaaaagagggactaattattatttaatttatccaaagtaataattaggagtttctttctggactttttgactagcaagcaagaagagtgattccctttcatttaattccccaacacatcaaaggagcctaatgaagtcacaactcatataaggaacctgtaccactctgcctaccaagtaccctctctttttggcattacttcaaaataattcaataatttatgcattcttattcaccagttttttttatttttttatttaaaatcaatttttatttttgtgtttatatcacaacctaaatttatatagcaacccatggagtaactatcaaaacaactcaaattataaaaataaaaaaaaattaaaaaaatagtatataagataatttctcttttatttattcaatattttttatttttaaactcttataaatatcaaaacaaaaacatcactttactgggtgtattataaacatagtctattataataaataaactaatgatttataattttaaattgaatgactattagaacaaacaaagcaaattacacataagcatatactactttggtttgctttatgtaaaagtttaaagcaatactattaacacatagatatgtaaaatgtaaatgtgaataatcacatttcacctgattcaaccaaccaaaaaacacacacttactttattaagtaaatatttaattggtacactgtgtgtgtatatatatatatgtctatattaaacattttaacttttttcctagcctgggtcttttcaaatgacaaatattagactctgtagtattttagatttgattgggaaaacatcttaacaaaaaaattgccaaaaacatatatctaatacattatggaaggtaacatttttcttaaaacatatacacatgcatatggaggtttgcaataatagtagtactatatagatatacataggttgtgtttaaagtagatacctttgttgtcttcagactagaatatatattattaataagagaagtaaagtaaagtaataataaagtgatgaagagtcgtatatttgtatttaatctgttttctctgacttggattgtatattatgatggtgtaaatcagaatggtccagtccagaaacaaaatccaacattgagatatgaactttgtcgtgactttattgacttttggcacccgaaatgaatgcaaatagaatataaatctgagttcaggttcatttttatttgcagtatttatactaagcatgcaatatcatcattatatatatttcctaaaatttcatctttattattaaattcctcagtgtacgatcatatacacacaaccactatctattctatcatctaaaatctcaatttatacaaacctatatattttaatttaatttttttttataattgtgtatgtta

SEQ ID NO: 299942 - DNA, 1427 bp, Cannabis indica
ccttctccttggctggaaccgctctcagaagcggtttcagcctcggcttttactacaaaattcaatggtttcgccaaaagggtgttgccaaaagaggttgaattgctcaaaaacagtgtgttcttgagtgaaaaacataacttgttagtagctgttgtggtggttaggattgattttggtaatggtgaagtgtaaagagaaacatggctacttggagctaaagccatggtgattgaattgaataattggtttgtgagtttactttgtgtttagagacatttgtggaagactatgaagaaacgtttgccacaaagtccccaaactcacaaatgacagaggttttggttctttttttggattggatcatgttagtggagtcatttagtggctctggtgtgtctttgtgtttctgttcaattgggttgtgccacgtggcatttgtgtttttgatgattgggagagaaaaagagttgagatgtttgttggtttttgttttttgagtttatttgggccttcttttagtccaatgggtcaaaattgggtaggcccaatacttgttttgggttggatcatgttagtggagtcattaagtggctcttgtgtgtgtttctgtgcaattgggttatgccacgtggcaattgtgtgatgattggggaagaaaaagagttgatatgtttgttgggcttttgcttttttgtttatttgggccttgttttagtttaaatgggttacatttggcaggcccaatacttgttttgtgggaagagaactaaaagggcccaattgaaaagattggcaaacttgagaatcatatacttaaagtggatagttcaattgtaaaattagaaagaaaaatgggatttttacaaaattactgaatttggaataaaagtttacaattttactgtcacacaatttttttttacaaaaatattgtctttttataaaacaaccataaaacaacaaaacagaacaattaaaacaacagtagaacaactaaaaaacaaccgtgaaaacttaatacagtacacagtatttttgaaaaaattccgccccacagttaaaaaagtaaaaaaagttagaaattctagtatgtgttgtaaaaaaccccatgaaaaaataggaaaattattgttggtttctaaggcaaaaaagtttgcaaatatttgcattattttgaagaaaaaaaaaaatattttatagatattctattttttaaaaaatgatattgagaaatagctcttttatttatcaattaaccaaaactacctctaattttatatttaattgaaaacatacctctttttatattgtatggtacccaaaaataccctgatataagggagtcacatggagagtatattgatgtgacaggggtaaaatacggtaaaaatgtttaagaaaaaagaaggtaaaaaataataagg

SEQ ID NO: 299943 - DNA, 3358 bp, Cannabis indica
tttggaaacatattcaaccagcttgtatcaactaccaccctatccagtctttcccttattaaacttacattccccctcttgtttttccaagtgaatttccctccaaaagcccccagatcaattcctcctgtgtcaaacaagaattgattgagaaaatacccatccttgcgagtgaaaactcgaccccccgatttctcatgactcgacaaaatcacatttaagtctcccatcaccgcccacgattcgtcccatcttttaatcatatcaaaacattcttcccaaaacagagctttctcctcttcataaggagttccatacaaagccagaagagtccattgcaacgaaaggtcagaatcccaaacctcacattgaaaaccagatcgatgtttcgtaaccgatgtaatccccgattgtttgttccatagcagacagaaaccacccgctaaacccacagaaggaatgaattcaccacaatcaaaattcagagcactactaatcttaatcatttgttcctttcccactttagtttccatcatgaaaatgcaatcaatcttgaacctcttcacccaggccgccaaagcttggattgccggggctcggccataaccccggaaattccacgaaatagctctcattgggcagggggggcttgataagggccgcctcctcgcccaattgaaaattttgatccacttgaatttcaataaccataccttgctgaccagttttcgattctctcttagtcgatacatccttgctttggattaaatcttcctggattagagaagatctagtgtgaactctcccaccgctcttctagattgaaacaacggtagcagagtttctcttcgatcctcttctcttcctctctgaactttggttcccttgggatatatcactcttccccacagaaaaggaaagattctctacaagcccattcagagtcccaacttcatttgctcattattgtcaaacacaataggagttacacatccacaggcctttcttttcttagaatgggcctcacgatccagtggcaggtccgaagaaatagaagcccaaaagtttcctagctaataactccaccttattagtactgggctttggcaaaacaacaggctcaggatgcatatgggaggttcttgatttacagatggcttcatgagggagctccaccatttgcaaagccgtaggccccacgtttggcatcaaactcaaaataacatgattatcatgaggattagtgcccaaattagaaatagggtgattagctattacctgtaatgggttgtacaactccttattggaatttgaaatcctaggacttgtctttttagtgacagatgacatcttttgtctccctttcatactatttccatgcacacatccactactcgtactaattgtactaacggtaccttttgtgccaccaatatcaccactactcttgtccttgtcctcctccatggttatcctcttcaccgttacaccagtcaccatctccagttccaacgcccgttgtctcgacggaccaccctcatctcaaattagcttcggtcttctcgtatcaaaacagttccttatagggatcatggccttcaaccaaggaccataaagaggaaccgcttcacctactggcggataagcatacaccttctgcttcccacatccccctctttcatgttcgatgagaccacagttaaaacaaaaagtgggaagttttttatacttaaactgtatccactcacgtctcccccgattgatactcaagaagaatcccgcaggcagttgcaaattaatcagaatctctactttgatttttaggaaaccccttctggcaatgaccacatttgaagctctatcagagtcaagcaatgttcccaccttgttccctatgactgcagaattctgggcagccaaatatggagttggtagcccatgaatctccacccagaacacggctttagacatatccacactttgccaatgcccatcctcaggccaatccctcaagttcagcagttggttagcaacaatccaaggtcttctattcaaaacctcctccttgtcttcttttacgtcaaaaaagattcctcacagtcccatctccatggttttcatacgccatttacatctcaggggccaaatacctcccagaatctgcttgaccctgctcttagggatttgtcgagagccaaatatttttgccagaaccccgccttttgccacctctgcactgatctcaaagtctgcttccagctcaagagtaacttcatccagaaattgttgtctcaaaatctccacgttatcctccgtaggtatcatttcctccacgttatcatccgtaggtatcatttcctccaccaactgttcctggtcttccatggtcagagggaacagagagtgtaagaaaaacgagacagaaatcaagaaggaacacaggaaaagaaaactcaaagaaaggagaagaggaagagaaccctcagctcacacatgggagcaaaaccattatttagtctactagttgatttattacattgattttgtgcctctaagtagtcttttcttctaaggaaatatttcttctcagctggtctcattttgtttaggatacttcttgtaaaagaattaattctcttatggaaagttgtctatgtttggaaactttgactttccctttttctttaatgatttcggttgtgctttgataagatcaaatcaaactcaatgtatttggtaggtttgaagtctatattcaagatcatgttctattttggaaagtttccttttcggtcctaatttgctgctgcagagcccgattctgatgctgtaaatcatgatatttttaggaaatgttgaacagttcttaaatcatttttgtggttgtccctagggttgttatgttctataaattagggttgttcatataaactaaaaaaccgtggtttaaattcggaccactacgatctgaaccactgtaaaccgtaactggggaaaccgttttgggtggtttggtcaatccggaccgtttacggcataatggttcggttgcgattcgtaataaataattaacgattaaaccggactggaccgtttataataaacaattattttatatatcttttatattgaacaaaaggaaaaatttaaacttttttgtgtgtcaagtgttttattgcatgaatttttagatttttatgttatgtttgactttttgagaatgtttttatgtcattatttatttgttatatatctattacttatcatgttaaaatataaattttttgaaaaaataaaattaaaaaacttagtaaaaatagtacaaaattactaaaaaaaaatataaaataattataaa

SEQ ID NO: 299944 - DNA, 1535 bp, Cannabis indica
caaagttttcatttttatagagagatagagaaagaggtataacatgggatgtgacaagggattctccagcagttacatgctattgaagccagaagaagtgaagttttttgatctgattagaatcttgttctcaagtaacgtagagaagagaaagtttgtggagttttgtccggcagatggagcggcggcggctgcggcggaggaagtgaatttccggcgaagatggatgattttggtatccatattggcacaaaagtttcttctgtttacatctaggctattggtgtggttgggttctggttttgagatgtggcttaaccttgtctctcttaatcaaaatgtggcccgccttatcctcaatttctttcaaggtacctaattaattactcaacattattatgtatatagatatagatcaatcatcgattttaaatgttctatgaaattttcaaatgttgttaaaatgctttttatattatacaagaataataaaatctagctaaaaagcttcatcactccatctgatcataaactataaagcctcatgcatgagcaaaaaatattttagtacattaatatttctctttttctaatttcttgttcacactttataaaactttttatgtaggtggatcattcttattttattgcattttattcttattttccgtagttagagaaattatatttcaattcttttttatctgattaattgcatatatactttattttttaaataagtaaaatttaaaatatataattattaattgtaaacacgagtatataatgaaaacctagcatacatgcaactaaccgtataaatcttatttttggtactttgaatgagtgaacccccgatctaaaataattaaaatatattaaaaatataatatttaataatataaaaaaaaaaaaaacctagaaattaatgtatagtataaaataaatgtttaaagtaaaataaaaataaatgcatcaatatcatttaaaaaaaaaatgattaaggtgacgggggtttgagaaattaggtgagacccaagattcgattgacgggatctagatattactaggccttctagtctcaattagacactcatatttgacaagtgttgttgtattgtatgtatctattaaatttatacaatattatgtttagcattgagactaattgtattaataatacgttatataaaattataatatttttatattaataaactcgaccctacactcaatcccgacctagatctgaactcggagtcggacttggacccacacttgagatgtcttggatctcagattaatcaaacctctgatcttgaattttggaccttgagcttggacccggagtttgggtccgaggttcggggtccgagaccgggtccaaaattcgagtttacatcccgggtttgggtctgaggtctggaacgagaattgacctcggaccttttgtaataatattataatacaagttaatacggataatttattatgtattaaataatataatttatattgcattaaaatataaggtt

SEQ ID NO: 299945 - DNA, 1443 bp, Cannabis indica
ggtcattctaattttatacgattaataattattattttattttctacttttattttcttttttttttctgaaagagtttttttcctatgttccatatccatataatttacttttttcctataatttattttcacaagggaaatcaaatttcaacgcctgctacaaatggtaccatacttccaggagttactcgaagtagtatcattgagattgcacgtgactatggttacaaggtcattaataattactacaataccaactttttttttaaactagataaatatgttattctttcaaaaataaataaataaataaggaccatgattatatatgtatatttattttagatcgaggagcgtgagattgaagtggatgaagtgatggaagcagaagaggtattttgtacaggaactgctgttggtgttgcttctgttggttccattacatatcacaccaaaaggtatctcatatttcttctcaataattcttataacttcaatatactaacataaatatactttttttgaattatgtgtttttgtaaaaattactgattaaattatttattttgtcaaatgatataaattagacctttatatcttttgacattatacaaataagagtatgaaatcaatttttattaaaataaacataatagtaatttgacttataagattataactatcaagttatattttttttttcatcaggtttcaaattggttatattagaaaaaataacaaaaattgaattcagagtattattttgtatcattgaaaaatatatacgttttgatttgttcaaagtattattatttgtccattttatttaactagctaatgtaaactactttgtagtatgcacaccatatatatagtattatattaaattttattatatgtaatgtttttatttagtactatatatatatatttaataatgacatatttgtgcatgtaaatgtacaaaattttaatatagatcaaaattatatacaattatacaatacaatcttttattacgtaccaaataaactcttggataaatatgatagaatatcctctctttctttttcattagtgattatgatgcctctatgatttctacatcctttccacttgtagacaatatcaaatttgaaaatatataaaagaacgtttacatctttttgtttttgtgattttgttgataattgatatgcagagtcgaatttaaaacaggtgatcagacagtgtcccaaaaactctactcaactcttattgggattcaaagaggtgttattgaggataagaaggggtggatcgttgaaattgattagagcaaaatatatatatattgaaataaccacatgaaagtgtgtacaccctaagaataatttaaagaggagtgctaatcacactttatttttattttttttaattttttttaatattttaatgtcaa

SEQ ID NO: 299946 - DNA, 2768 bp, Cannabis indica
ataacaaatatttacaattttagcgacttttattgattgattacccttcttctcctcttctgcctgtactacataacaactaccctgaatgaaacgcagcgtttccagttatacctaataattaatacggcgtcgttgcagttttccttactaggctgctactacttattttattctacaatgatcatcatcccataaccgaaccacattgccgttaagctccgtcaaatcctggtaacggtaccaactgttctcatccaatctcctcttcaacattgatctctcccaccaaccaccaacaccgcagttatcgtcgccacaatactcctcaaccaccaccgtctcgcctccgccgtcactctccgtcagctcgccgttattaatctcgtaatacaaactgaatttccgtccctttgtcagaactacgttatcagctccattatcttccgccacgtgtccagaagcagaagccgaagccgaagccggctcagttggtggcggcgcagacggagtgattgagcaccgatcatcacaagaaggagatactcctggtggtccgtctacggtggtggctctgattttccagaagctaacggcggccgttaagacggcgacccacgtccatagattattaacgaaggtgaagaaaccaaagctgacgtaattgaaaacaagagcttcgagaggggaatccaagacgttcatttttctctttctctgtgtgtgttttgtctagtgagattatttttgagagagaaacagaaaaatactttttctaatttatggttgagaattattttttgttcgttgttgtttttattttggtggagcagttgggttatttattgaggtgaaggaagagaaagtgagacaaaatgtgagccgttggatcaaacaagtgggatttaggatctgaatagagatgccgggaatcgagagccaagatgccgaaatgctgatcgccaaagttagtagattcgaatatatgtataaatttatccctttgatttcttatgatattaaacaaaacaaatatatttatgattagttaaggacacgtggcaggtcagaagtttgtcgttctattcagcttcactcctcctctcatatcatatatactacatagccacaagatacgatgtagatcaaactatatatggctaataatatagtgaagttggggttgttgtgttttatgtctttttcattattgcttcttacaatattctcctttaggctatgtttggtaaggagtgaaagtataaaatttggagaatatgatgaacacagataagggggcggttagaaaatgatggagggaaaaaataaaaatgttaaaaagtattaatagtgcctaattacttatgaaatgtaatttcgctacaactaaatatcaaattttacttgttttagtttaataaatattataaaaaaatcgctaattaattataagacgatatttcagtgctaggcaccaccataggtgctttgtggcaatgcttaggaaaaaattctcatattatagttactttttataacactcccaacaactatactctactctattgtttaaaattttaaacgtatccacgtacaaaaataattattaaaattaaaataattaataatttatgttaaaagcaataaatagtattctataaatattaagcgtgaatagtaaattttaaagaagctttaaaataaagaaagagtttagagtactgatttagtggtatcagtgatacttgtcaaggagaactcttaagtattgttcagatggaaaaatgtactttctcctaggggttcacttgagacctaccaaagggaaggcctctaattgtggaaccattcctgataagttcataaatttcataattgggctagtaagaacatttcttttacaaggagagctcttctcattaatactctcttattgggaatcataaactcttggataggtatctattttacctcaaaaaattatggctgccattgataaatattgcatggactttctttagggcacaaatagtactcgtagcaaggttcatcttgctttttgggagaaagttcgtctttccaaaaggtatggtggcattggctttagggaaaagaaaaagtggaatattactatgatgaccaagtttttttgggccattttaaacaagcaagataacctttggtttaaatggattaactccatctacctcaaagatcaagacatatggtcagctcctctaaaaaatgattacatttggtattttaaaaagcttttgaagcttaagaatactataaacaaacttgccttgcatcgttttgggatttaggggaaattcaaagctaaaactttctatctctccctaatctcgactgaaaattttaattatgcaacaggtatttggtataaactgtgtattcctaaatacatattcatagcttggcaaatgttacgaaaaatatgaacaatacgcaagtgtacgtaatcaagtagtaaactcacacaagtgaggtcgaaccacagagaattgaactgaataccactaaactagatttatgattctatttggcagataaaaagaattttaataaagtttgaaataaagatcatcaagaaaattaaagaaagcagtaaatttgtttaattaaggatgggaaattagggaaaagaatcatgttgatttaattacacaattgttaatgttaattactactctctttctcaatgtgaatgacagattataaaattaacctaactcttttcagatctt

SEQ ID NO: 299947 - DNA, 2478 bp, Cannabis indica
aatgatagtttttttttaagagaatgatagtgtatttaactaatataattatatgtagtaaaaaaaaaaaaactatttaatgaacataaaataaaataatgatacatattaaaaagaatgactctttcatttttaaaatgttaaaaaaaagatgactctacataatcgtttttaatactactgaagcattatcttatattattttaatctatcctttttctcttaattaaataatattaatcacccgtttattctttttcttcttcacaattttaatagttttggtataaattcttgacaatttttttttgtaataaaagtttattgtactggattattaaatatttcaaatatatataattaagtaaatacatttacaattataaaataaacaagacgatataaaattataaatttttatgacactaataatatatatatatttatgtgtgtgcattatgatagggtaaagaaaataaaactttaagctatagagttgatgttataaaaaatattgaccaaaaaattagactgatcaagatattatatgttatgtttcattttgtaaaatatttagtaaggattcaaaaatgtatataatagtatatagataattataaatatatgcaaaacaaaaaattttatttttaatcacaataaaatttgtgattaaaagtaaaaaaattgtgactaattataaattatgattcttatgttgtgactaaaaaattcatgactaaaaatattaggcacaaaaatcataatttattgtgactaaatatacttttagtcacaattattgtaactaaaattaaattaataacaatttgtatctaaatactatgttttactcacaaattaactttttattgtgactaaaagtcacatttaatcaaaaaaaaaatttatgttgtaactaaaaagttatacccacataccacatggaatattgatcaaaaaatatataaaatttgttgaatgaatggataccattaatcattaacgtgtttttttttcaaataatttttgtaaggtttaatcattaacgtgttgattacctcacctaacctaactatatatttatagttttttttttttgaataatatatttatagttttaaaaaaatatacatgataaattttgtaacataattttatttgacttgacatttttttttttacaatatttctcacttttctccgaatgaatatacattgcattgcatgtacgccaaaaccgacgcataaaaatatatatatagtaatgtcatgtgtaatatttttgaattatactctaacacaaaagatttctgtttgtatttaattaattaattaaatttatcaaatctcatataatgtggtcaaattctttggatcactgacttgtttgcacgtttatacccttttagttttagcaaggcatctttcagatacacaaacacaaattaatactatattatatataaatttatgttataaaaaaaagtcaaaagagtttgataaatatatatatgtgcatatgcatggctggcaatatatatataactatagtttttttctttcttaattattataatttttattttgttaattatattaagcttaataagattatgctcaatgctcctactttacactacacccggtatttacaagtaacaagtgtcggtcttaactgttattacaagtcaattaggttactctgcctgagtacttattattttcataataaaaataataataagaagagaattaatcttcaatttttaacaccattaatctcaatcatgcacgtgtgttatgaccaatcacccattgcaataagctagatgagtcattgaaaataaaattgttactagtaagttttagttaatccatgaatagatataagaactctccattcaaataataatgtgacaataaatggacaaatcccatgactaattatattgtaggttaattatgaattatttctcgtagtaacagagtatgttttattgaaagaaataaaaatataaaaatatgaatggaatcgagattgagaatatgaatatgaatacaaatagaatggaattgaatgactttaatatttataggaaacagatcaaaaaagaattatattatgattcttttcatcttatattagaatagtcattttacttattttgagatgtattcacaaaaaatagtgaaattctaaatttattaaaatatgttagagaatctcatattattaatgcgtataaatataatattatatataaaatacataagttataccaattagttaaaaaaaaccttatttttagtacccgttcacactaacactaactgtaactctaatatatctttattttggcaatagcaatacttacatcttttttagtgtagtacttcactaccaaaaaaaaaaatgagctactttaattgtgatttttagttacaacaaaaaattatttgtgactaaaatataatatt

SEQ ID NO: 299948 - DNA, 1204 bp, Cannabis indica
ttgctgaaatgggttgttgctcggtcgttcctctctatcgattccataagctgggccattcttatccttcttcatccaatcccaatcgcgaaacaattcagagattcaccaaactggaaacgaaactggttcccaattttaatttttctcatccaataattgaatagaaaaagatattgaactaacatattaattgtaaaataattgagaaattatcaaaatcttgaatttggaatatgctaaaaacattgtacatatgggtttaacacatttaatgcaacacatttaatgaacctttatttttggttttgaaaaaactcaatttttttctctcaaaagaaaatgaaaattaataggtaaattggacaaaattcattaaatgaagatatgactcatagagcaaaattaacagtaataggcatgtgtgttatgtccttacattacttatttgtgtgtattttgtcccacattgctcaggtgtgagtgatttcaggaattcatattacacttataggtaccaagccataatctcaagatagagttttggtaattaaataaatattatgtgtgtaactaaaatctaccaaagacattttttttgtcaatatgattttcttgtcttaattttgtattaatggctctcattttattcatttaggttagttttcataaaatagaaggaattctgtttatgaaaaaatttgcttaattgatttatttttgctatgaatatagctttgaaaacatgtttgtggctatctctaaaatatctttgttctgcaaataggacttataagaataattaaacgttctcaactcttttaatttcattttttttatctttgtattaagatagtttctcgtgtgaaaacctaaagtattctgttaggttttagtctttatattattgttctttcacaattcttagaatatagtaaagagttttgttgaacaagtcgaagacttctccaaaacttatttcaaaatgaagtaagcacatactcatcaaaagttgaagggatttcatcgttagtggtgttcaaattttatattggcaaagtgcattacaaaggattgcgacaaacatgagaaaatttaaatttatttaagtcaattgtttttgtaatatttgatactttatttaggggtgtgaagaaagtcatccgatccaatcccaaccgatccaatagaatcggatatccaa

SEQ ID NO: 299949 - DNA, 1997 bp, Cannabis indica
tatcagttcaaatattaatgagatttgtttattattattttattatataaattaaaagtcacccatagagagagagagagaaaaaggtcatttggcttatacaagatataatataaatgaatacataagtaaactgatcaagtaattaaaaatgtcaaaaaaaaaaaaaaaaatcagttgcacaaggaattaaagttaaaagcaatatgaattagacataaatagcgttttgcaataagaaaatcttgtctttttttttattagtaccttttttaagttgaagaatttaaatattggttgaaaggaagtagtatttagtatttacttaaattaacgattttcattcaaaaacttcttgcaactaaattcaaaaacttcttgcaactaagtcaagagcaaaaaaaaaaagtaatattaaatgatacagacatctctgttttttgtatatgaaaatcaaagatgagaagcatgaaaatattgatatgttgggttggacatggtgcttgtagcggacaacaggagaaaggggagtgactgaggtacgtgctgttggcgctgttgcgttgtgttgtcgagagagaagagagagagacgagagaatgcaagtgagagagcacacataatcaaagaagtagggttttaacttttatttttggaatataaattaagtacaaaaaatgttaataaaagtaggtgagttctattttaggtgtcgaattaataaaactcgaacctgacctataatttttaaaccttttttttgggtttttcaggttttgggtccggtgggtttgccgcatgagtgagttttcaggtgtaaatgtgatgccctagttatactattctagaatctgtattttgtaaaagttattgattgaatcatctgttttatcaaatgataaaatgtatcatatattttttaaaatagtataaacaagactctaagctcaatttttgataatttttttaatataaccaacttgaagacaattcttaacatgaacaaatacagtaaatgtagccaattttgtcataacatctctagattgggttatcattaattttattttgatagaaaaatcagtttagggttctatttagtactattttggaatatacatgacccaatttgtcatttattaaaatagagggtccagtcagtaacttttgtaaaacacaagattcaaaataccatttacctaagtatacatcaatattaaaaataaataaatttattgttttaatatttcttttgttaatgttaataattgttttaattttatttcatatgttttttttttaaaaaaaatatcttttaaattaatcttttgagcttcaagaacgactacttcagccataattaaataaaaatgcacgtagcgattcaagagcataccaacttcgaggtgcacaaaggtgtgtactgctaattagtgatgcccttcgggctcaagaatgtcaaagcaacctacaaagtgtctggtgaatcgatgttcaagaatgtgctggaaaagaatatggaagtatatgtggatgatatgttggtaatgtccaaaacctctagggaacatggaagtgatttgggagaagccttctcaattatccaaaagtatgggctgaagctgaacccaaaaaagtgtacatttcgagtttcttcaaggaaattctcatgtttcattgttagctctcacgaaattaaagcaaatccagaaaggatcggagctctcctagacatgccttccccaaagatacacattagattgatttttaggttattgtttagttagtgctggatttatgtgcagttgtcctatatatatatatatttttagtttatgttttacatattttaaaatacagtaagtttgtctatgttttttttttcttgtttgttatgagttgatctctcgttgatatgtgatattgcagtggtgttgatatcatgttattctttcgttacttttttatttttttagttgtttaatagtttatttata

SEQ ID NO: 299950 - DNA, 1757 bp, Cannabis indica
atagaaccaagacatgcgagtctgtattggtttatcgaggttgttgggtcaacgggaccagctcgcaacatagataatcgatctctatgttttcgcaggaggatcgcgaggatactcgcatatatcttgatatatgcaggctaaagtcgttctttggtcctacataatgcgagtcatacgaatgcgattagacttggtcatattcgcatcatctcgctgagtctggttcaggcaaggttcatactcgaggagtccctcgttgacatctcagttttcctcggggaaattgagtacacatgtcctttaaataggagtctggtctcgagtttctaggtgagaaaaatttcactataacacttatatataagatcacaattaattcacatattttctttatttgtgacaactaattaataaattatttgtattttctttttattagttagttgttaagagtagtttttggttgttaatttttactatttgtcctctgttttacaagttagttattttttgttacaagctgttataacagccaagactcttgtactcttcccaatatatataaataccattctagctcaagaattgattaagcttttgtagttctttgagattaaatttttaaattggtccagatagaaactgtatagataagctcttttcacatggtatcagagtctttaactaacgttgatcatggatcctagaaacccagaacgtaatgcatcatttcaaacgccaccaattgctaccccgattctgacaattgctccaacccaacaatggaatccttttcaaaattcattaaactcttctctcacagttcctctttattaaagaaactatcttgccactacaagaaatatcactttcaccagaatagttcgctactgcactagtaaagtaacttttaccggcgcattttacaaactgcgctagcaaaaaggtcaaagttttaccagcgaacatttacattggctaaaatctaacttttactagtgtatttacgcgtgctaggaaaagtcatttttgccagcgcttttcattttgtgctggtaaaagttctaatactaacgttgatttgccaaccccttttgccaacacatcaaatttaaattctattttaccagcgcaataccaatctttcgccaacacaaaaatgtgctggcaaaagtgacatttcttgtagtgtgcgtggaaatctcaagtgattcccacatcatcggccatggacttgataacattctcctcactaaaactgcacctattcagagattcatcattggagatctcatccccgaattcaccgcctgacggaaagacccgttattccttagttggctttgctcgtccatgacaaagaccgttcttggatctttggctcaccacaaatcgtcttttaatgcctagctcgctctagaacaatgcttctcgagtcaatcaaaagcccgattgctccaaattaaatctcaacactcaacaatccaaaagggtaacctctcaatctctgactactacgacaaagtcaagttgttagctgattatctcgcaactgctggtcacccgatggaagagagtgacttaatcacgcacttgctcaatggattacgtctagaatgtgactgttgttgttcatgtgacaagtctattgatgatctttctttaggatccatacaatctttatttctaacacatggaagcaggctagaaagacattacaatataggtgatcttgtgtaaagaccgcttagttt

SEQ ID NO: 299951 - DNA, 2786 bp, Cannabis indica
acgatttttaataattattattattagcattaaactattttataaaatcacacacgtggcgtccctatagattaaggcgttacattcgggttgggtgataagtcaatatcttgtcttataaatatgatcaatttatgtattattattcgtaaattgattctttaaattattaattagtgtaattttaatttgttagaatatttttaagactaatcatgtatttcgagttatttagagggattttagcacattttgttgaaaataatggaagctggcgagctcgattttacatggtagaacttaattacaaatttcaatgaccttagaagcagtactagacttggatctaaacacgaaagatttagatcacattcttagcttttcaaaacatctagaatcgtccaattccgagttgtattgaagaagttatgaccaaaatactaatattaacacgtgacagaaatttttcggtagcaagcggtcgccacgacgagggaattcgtggccgcggcgaggactcgaattttgccaaatttcaaatttttatctatttttaaaacaagatacttttagaggttatatataagacttttagggcatgtgtttaaggacctttgaactgcaaatttgagagaaaaactcagagagtgaaagaagaagacaaagattgcggcatcaattgttttatatcattgttctttttcttctccctaaactcaaactttttattatgactttaattttaatgtctagtgtagagtagtttctttttagttaagagttatttcaaaactcaagacatgaatctttaatttgtatgatgaatgttaatttctagttgttattatatcgaattgcttctattcttttagattcaatgccatgattattattttaatcttgtttagacgatcactaaattatattttactttaatctattgtcatctcaggattattatttacctaatagtctaggattctaagtgtttgtgataaattataatttttaatattgttaaaggtatttttaattgtgatgaataatagaacctatgttaaatgaattgtatgcttcattaatttattgcctatattaatttatctccattgaacttaaaactttatctaagttaaataaattgcatgtttcatagatttactgcttaggtaaaagagttaattattgagcacatcactttgattacatacaatagagagattgagataattaattgcttcggcgatatttgtgggattaatcattcgattgaaaatttgaaataacattaattattaggaattgagaatgattgttgaggatggagattaatttttaactatttcttgaatattgtagtatctcattatatttattttttaatttatgttatttaatctttatagttaaaactcattttttaattcttgttactagtttttgaataataaattgataatagttcttgtggaatcgacttatatttaccgttatatcgaagtaattggtaatatagaaataaaaattaatatatttgttgtggtaaacaatatgcattattggggtcgagatttgggtctggagttaaggtctaaattcggttctaaagtctaagttgaggttagaatttaatatattgatcatataaaaaaaaaactgcttaaaaaaatttaaaagtgatattttttttttatttttaaaatttaaattttcaattaaaaattaaattaaatttataaaatataattttgaaaatatttttatttttaatttttttttaaaaaaaaactaagggaaaagaagtgtcaacaaagacactcgaaaataatgaataataagaaaagtaaaagaggaattggttgaggagtgtccttctctctgttaagtgagcaactgcaaatgatacatacatgtaattagtggataaagtcccgtggagatcaccctgaggcgacacgtacacattctctctaattattgctctattatttatagtttttagtttttattatatatattcttctggaagaaaaataaaaccaaaaagcttgtcctgcaagaatggaataaagcaatttctttttctttttttttttttttgttaaaggagtgcaatatgtaatctacaggtaagagtattttcaataggggccgtctaaatggtgtgaatttttcactatttaattccaatgatacatcaaattttatattatttgtattggattttgagtttaagtcaatttaatttatatattttttttacattctcattctcattttaatttattttaaaaaataacttagtattttaatcctcaaattaaaaattaccacaaaagtaagttatgaagtttgagagaacaacataaataaaaataaatattaagtaagataataatttaataaatttatttaagtttttttttatgtaaaatgtgtaatatttaattaatttaataaatattttattttattaaattaatttaaaattttaaatcgtaatcgtaatataattataataaaataactattttgaattattaattaaataatataaaaaaaattaaatttttaagtaaaatatatttatttaatgaaatatctagtatgatatttggtatgaattattgaaattgtagcaccaaaaatagaaaattttataccaaattagtataatcattggagatgatttcatatattgtaaaagcttgtccaatgctatatttttaattgaatagttaattcttcaataatatgctaaattttgatttctcaaaaaaaaaaaa

SEQ ID NO: 299952 - DNA, 4736 bp, Cannabis indica
gagttgggatgccaaataagggtgtcatctttgcaaaaaaaaactcagtggaatagttaagattcaatcaatatcaggtggagaaaaccattgattgagcagagccatgtcctattgtctctcatctgtgatcagattcgaaacaactgcatcaggaggtccaaaaaaataatatggactgaagcttgaatgtcctggaatccaagggtccctagcacaattaactctgcatcgttcaccaattttccactgtagaccagcagtgagtaaacctttaccccaatggattccttgccatgttaaagaaggggaatgtctaagattagcttcaaggaaggagtttggatagtatcgactttttaatagctttgcaagtaaagagtcgggttgttgcagaagtctccaagcttatttagcgagcattgcttggttaaaatgtacaaaagaacgaaatcccataccaccactatccttccttttacacaaaagtttctaagagcgccaatgaatcttgttgccactctcatttaaaccccaccagaagttgtccatcatagactcaagttgattgcagaaataaacaggtaaacggaagcaactcattgcataagttgggatggattggatcacggctttgagaagaactttgcgccctcctgctgagaaatttttttcactccaagtgtgcattagtcgccaaattttctccttaatgtcactaaacattctttttttatctcttccagagtaggatggcaaacccagatatcgttcatgacactcacagattagcattgatagttgtcggtgggaagaaaacttgggcagctagcgttatgttgggcgagaaagacataatatatttatctgaatttagaacctgtcacgaggcccttttgtatatatccaaagatctctttattgcaacgcaggaagactcattcgcttgacaaaaaaggaggctgtcatcagcaaaaaacaagtgagagactgaaggagcatgccgagttaatttaaacccattgagatgaccactggtttcttcgtgttggagcaatcttgatagcccctcagaacaaattaggaataagtatggtgaaagcgaacaaccctgtcgaagaccccttgttggaataagcgaaaccaacacttccccatttaagagaaaggagaaattgttagtacgcaagcagttcataatgagagtaatccattcactagcaaaccccattttactcatgacttcttcaaggaatttctattcaacacgttcaaaagctttgctcatgtccaatttcagagatgcaatacctatgcgacctgtagttttgttcttgatagcattgaccaactcaaaggccataagaatgttgtcagtgattaaacggttaggcaagaaggcattttgcgtctcggagataacataagggagaacatgtttaaaacggttaacaagcactttggtgacaagctttgagacaacattacaaaggctgattgggcaaaagtcttatagccgttgtggttttttgatcttgggaatgagggttataagtgttttgtttaaaccagtaggatcagcaccttcgtttaaaacacttaaaacagccttagttaccaagtcaccaacaacagcccagttttgttggtagaacattggagacataccatcaattccgagacttttgtcaggagccatagagtgtaaagcaaattcaatttcagctgctacaaaaggctttaggaggtccgaggacatctctggtgtgaccgttgtagggatgccatttaaggtagcagcaagagcatcctcatctaaatctaaagcagtgaaaatggttgtaaaagaatcgtgaattgcagctgtcatattagatttggaagtaacccgaatgcccgctgcattatgtagaaatttgatagtgttatttgatttccttgccgaagctttggcatggaaaaactcagtgttgcgatctcccgaatttaaccaatcaatccatgaacgttgttaccaatagatttcttcttgttttaacaattcctccaggattgcttcagattttgcatcgcttcagcagtactgaggggagcgttattcagattttccacttgtaattgagcatcagaaatttttttcttcatgtgaccatacttaccaatatgccatctttgtaaattagtagcacaatcttcaaaattgtcaagcacagcctttatgggatcattggttgaggaagagttccagcttgccgtgataatgtctttgctttgtgagtccgaaagccatatttttttttcaaatcggaatctactctttcttttatcctcctgaagccgtgtatctactggtataaagacagcagaaatagctctgtgatccgagctaaaatagtcaagatggtgaacttgaggtgtgttgaaagtgttttcccaatgttgattcacaaattaaggcgctctttgattgtgtctacacctgcccggtttttgatccatgtataagggtcaccttcgaaaggagtatcatgtaacttgcaatgatctaaggacttgtggaaggcttccatttgtttttcatttctgagacaaccaccagatttattttcattggagaggatttcattaaagtcactaatggcgagccatgataatgtgggagagacatcagccagtctttgtaaaagaacccaagaatcagccttgttttgagcgtccggagcaccataaaaagcagtaaagtggaaactagcttcatcctcagccttgacatgacagtcaaaaaaagtacgtccaaaattaagtagagtaacatcaataatttgttgccaaagaagcatcaaaccaccattaagaccagatcgtggtgattccaaaccattattaaagtttaaagtctatcgaaaacgcgaaatagagttcggtggaagtttcgttttcacgagaaacaaaatttggggcgattgttgtttgacaagcaatcgaagatgcctgaatgcattcgggttccccaatccccgtgcattccaactcaagattttcataatgaattgcaatctctccggaattgtcaatgaagccatccgattccatatcatcataggaaacattttggcctgaacattctcccaatgacaagggggaggggtcagcaactatgctttgattacaacactgtttaaggaattgtctcatggtaagtgtgtcattatgtctctttgggacagaagcaggtgggatgttctctttgttagttgcagcagcaacaaacaaaggttggaagacactgatagtagcagtagcagagggtgtgggagaatatatgggctgagataaaggagacataaggtggttaggaggggtaggaaacatgttagttggtgttaatgttggtaggtgagtggccatgggaaaggatggtcttgctgcagaaccaacatctggtgtgaaaatgccagataagtttgtgacagtgagggagttgttgtcatgtgatagagaggttgttgggctagccgtgttggagagattggttgttgtgggtggtaaagatgaataaaaggtggatgtttgtggtgtttgttgggtactaggaacagaaatggcagcagtaggaaggctggtagtttgttgagaaaaaggcaaagttgatggagattttgatccaactaacatacacggttgagggctggctgtagtgtttaggcggggaatggttgaagtaagtgtggtacgggcaaggcgagttaataatggccaggcatttcccttagaaaaatttgttctatatttgtcatagcccatagaaggaagcttggcacctttcatccaaggactgtataggagatcatcatcattaccattatccattcgctccataaacttgatacatttttcaaaggggtgtccgagtaaaccacactcgaaacaaaactccggtcgacgctcatatctaaaatcgatccaaaactcgtctctaacttttggaaggttgatcattcggccacgaggaaggggtttgttgatcggtaatttgacacgaatccaaagaaaaggatcccatccttcatcaagtgaatcctcataaacatccaaaaactcaccaatgagattacccaatgctcttgcaagagcctttgatttgcttaaaaaaggcaatcgataaatttgaacccaaactggtgtgtacaacaagtcattcgttgagacattctgcagagcacttggagtgtacatcacaacaagatggttttgaaagtgccatggttctttgtttatcaatctaaattcatcaccagcacaaccaaatgaaactttgaataaatgttcaccatatgcagaaaccacagcaggaaagtggcccttccaatgtcctgacatttggtcgatgaaagttagcttgtggacgtagttgcaaagaaaaaatgtaatgtggtaaaagtggcttgaatagctaattccttctagtcatgttttttcccaggtgttacagcatcagttcagcattactccagcattctgcacagagataacaaaaattcctctaggcttgtgagaattttccaacactcacaaatttaagtctaccacttagctcaatatattcctatatcaaacgagcaagcagaacactattcaaacatcaattttttaagttatgcaaggtaaatgaaatattcctattccacttacaaagaaaaatccaaatctaggttttcacttgctccaatcaagtt

SEQ ID NO: 299953 - DNA, 1359 bp, Cannabis indica
tattttattttaattttttttgtcttaatatttaaaatataatttatttttgcttgatagatatattttttaagaatatgaattagaagaaaaaattaaaaaaaaagttagtataattaaagatataaattttatataaaataaaaattattaaaataaggtgtatttataaatttttagggtataaataaaatttttcgctaattaaatatatgaattttcaaaagaaaatttttcttgagttcttgggctaggtggaccctaagagtgggtctagcctacatatactcataattaagcatgctccgtatactaatataggtcgtgttagcacgacccatattcgtatttatcgtatcggaacttgtttaaactcatatttttatgtcatgtttaagttcatgtttgtttgtgtcgtgccaaattcaaattaatattttctataattaaaatatgaagtgtttttttttatctttgtttaattgttagttttgaattttggtggcattattttatgtgcatggtggtggaattagaaggagaaggtagtttggcctttgttgggtcctttttaacttttgtaagtaaaaagaaactaatatgtgataggaagcttccttcctttattagtttctttctattagtggacaaaaaaaaagagcaccatattccacttctcttcattgtattttttttttttttttgtatgaaaaacttctcttcattgattgagtaactaacttttcaattattaagaaataaaatattaagaaaatagtaattgaaaaaagaaaaatatcactttattcttttaattggggttggcacttggaacaaaatagattctttcagctttatatttctcctttctatgtaaatactttttacaaatttaccatttgatatgtactgggtgcaaaagtaccttgatttatttattttattcttttatcatgttttggtacataaaacattgatattaaaggtctctaaagcaaattaggccttcgctttttctaaagcacaatgtataatagcaataataataattgtttttattttttatattttgtatatatctattctatataaagtatacctatataacagaatttttggtttactagaaatttatggatgactttttatttatatttaaaataaaatagtttattattaaaaataaaatggtttatgagaaatttatgggtgattttttatttatattataaaaataaaatgatttattattaaaaataaaatagtttaggagaaattcatgtatcactttttatttatatataataaaataaatctcattaaaaaaaaaaaaaatacgattgacactttaagtgatga

SEQ ID NO: 299954 - DNA, 1011 bp, Cannabis indica
attgataaggtgaaccaaaacatacataaatgaatgaaaaatacttctgtttctttattgatattgaataatctggattacattaaaatggagttttatttagggcataaaacccaacacaaggttggggcactaacaacctgagctccatgaaaggtgtttgtggtgatacatcgccgagattccattagaatccaagctctgcatctttcagcattacaacgtaatattacgtaaaataatttttgaaaaataaattacataaaatacctatgtcctataagagcttacaaattttctagaaaaaattaaaagcatatcctacacctaatttttgccatacaattaatgattcactatctcacatgcatttacaatattatcaccatccattcacataaatatcacatatatataaatacataaaatccacacaacatttaatatacatacataatggaatcatctgtgatactatttgttgattttgtagtactaaattaggtaagtagggaaataataattttttattatcattgtaccacatcccaaagatctccatatgtacatatattaaatttgcaataacgagatgaaagaaaatatttacctcttgaagtgtaacagggtatccttaaatctttttgtaagttgtattcctaaaatggtgatgaagaactcacgtcgtgatatttagatcttctaccatacacaaagattagtgtggactaatagaataaaattatataattgttcttgatttgatctcaactcatgagtaagaacccttttctatggagtgaataatgattttttattaacctttttcagtttcctaaattataggtatatatagatttaggattataatagtataataataaaaccaataaaataataataaatattttatcaaaataaatatttatattttaaatattaaaataataatatttaattatttgaataaatatttataactgattctgttatagatatttaggtttgaat

SEQ ID NO: 299955 - DNA, 2429 bp, Cannabis indica
aggattgcggactattaccatataagtccgacccaattcaccctcaagggtgtcaagtatttgtccaccctatttgtcctctatgccacatatggatagggtgagctgttctcgcacgacaccaactggctttttaatctgaagtcatctcccaagcaaaacaggtcgggatacttctatttttgctatatcaaaaagagctggtggacgggcaccacagccgccgaggtgaccaagggggctttgtggatgagtaatacttcgtcaaaggaatgggcaccattaacagcagcttccagcaggtgtcgtcctattcccgccctccgtttacactggaacataggaagagggcacaaaagattcttcaactaccttctactgcacagaacatctccctcttgacttctgaggccaagatagggggctttgtggacgagtactacttcgtcaaatgaatgggcaccattcacagcatcttccagcaggtgtcgtcctattgccgccctctgtttacactggaactcaagagggcacaaaagatttttcaactaccttctactgcatagaacatctccttcttgacttctaaggccaattttgtcaagtacaaactttttctggctgattgtgtagtaaatgctgtgaagaaagtgaaagcgcctttgcctaaacaggagactgtacccaaacaagagattctgagcaaaaagatgaagaaggctcctcaacgcagccaagtacctactgaccagtctatcaggatcagggaaaagcgttaaagacctgcttggaaatccacctcagttgtgggaaagggaaaagttattctgatgtagtatgagcaagaagactcttcaaatgatgagcctccatctttgattgttcaggagaatgctcctacctatgtgcagggtaccttaaatcatatatgatttttaactgacttggcttatgtcatacttgttttctaagcttcttattttttcatatgcaaccatgtctcaaaaggtgtactagacgctgaagaagaggtcaactgacaggtccggccagacccctccacccaaatgatcaaaaggcaatgagataccacacaaggagaaggactcggtcgagcttcctatcgaggttcctgaggaggcggtatccgatgtggagctaccacccaagaaggcctccaagtctaaaggtgccaatagaagtggtatagatgggtctggtctgactaggccctcaaacactcctatcgtgataaaccctgagaccaagaagggaaaggagatgcttcaacactaccaagatcgactacttcctgaggtgaacgaccaactgtttggaggggacgagatttctgtcaagcttttgatgggtgggctcctgaaggagggaacccgagtaagtatttctcctttggttttatcttgcctttttacacgtacaagttttaaccttttcccatgcagctcaatttgaagatggcttacacttactctcaagccaagtctactactcttaagactatcaccaccaccaccaccaacctgcagaacaaggcggatgcaaccaagaaggaggttaaggttgtgagggcagagttgggcgaggtgaacaaacaacttctagctacaaataatcgagttaaggagctaagtaaggatattcaggagatgccatctaccacccagctagaggcaaatatcgaggttctatccaaggaggttaatgatttgaaggatgagagggagagtctctgtactcttcttgcaaccttaaccacgaataagacaaatttggaagaggacatcaaatctaggtagacgagggaggaagagcttttgaaggaggtcaagaatttggagtctgtcgccctagaagttttctacgaattttggaaggccaacccagaaggaaactatgattacctcggtgataccaaagaggcatatcttagttactgtacgggctaggaagccaaagaaaactctgaggcagctaattccacagctctgaccaactagaacactgagactctgccctccaatgaccaagctgatccgtacaagaaacctaggactcctactgtgtgaacctctgttttctctttttttctatttatttgttcgacccatgggcctttgttaaatacaatatgaccgaccaagcggtctttaaacttggtaatacttcattttattttaagacaactagctgatcgggcagcctttaattccgattttatatcttgcttttgtcatctttttaaaatgaatattttcccctattttagtaattacacatacaaactgctatgtttgggtttgttgagcttgttatttaccaatgctttgtacgggtatagttgccccctaagtgaccgagtagacctacgactctttgtcacttgcatttcacaagttcaatttttgtct

SEQ ID NO: 299956 - DNA, 3432 bp, Cannabis indica
cccaaaaagtgctagtttctttagaaaaaaactccattgaagtcgtttattctaggggctttatcactagctaattgaaaggcaacgatttttatctcatcttcagtaaaagatgcgtgaaaatttgtcattttcgactcaaaaatatgattagtgatcccaatcacaacattttcaatgaagtcgatatcaggattctgactcgtgaacaaatgagcaaaataatgttcaatggtatgcaagatggaagctgcatcggtagcagtagagccatcagggcgctggagagaatgaattttattggtagcgcgtcgagaagatgccatctgatggaaatagcgagtattcttgtctctgaggttaagccagttaacaagaaaatgctactgccagtactcttcttctttatataagagtctgtgaagctcactttccagggttcttcctaaagccaattgggaattagaaggctgagagatggcattcacgtttttaagttgagattggatatcctgttttggtgagaaagggaggatccaagggattttttccattgcttgaggtggataaagacattttgcagtttgacactaattttgactctcgagtcttgcccattagttgcattgtttggtgcccaggcttgacgaagacagtcctcaaatctcgcttcagagatccaggtgttatcaaagatgaaccgcgagtttgggttggaggggtggccctgtgatagagggtgaataagaggacgatggtcggaaccatagaagtcaccatgaagaagacgagctgagggaaaagagggatcccaatcatcatttgagatgccccagtcaagacgctcttgggtatgggtttgttgcttttgtttattagtccaagtataagggtttccaagagcattaatagggtgaagggcaaaagcatcgaggaagttttggaactgagctgatggacagcgagatatgtctccaccaattttatcattcagagtaagatagtcattgaaatcgctcatgataagctagggagaaaggtgagtataagatccaagtctatgtagaaattgccaagagtgaggcttatttattgggttaggagctccataaaagccaataaaagtaaaagtagtaagattaagaagcttaataaagcaatgaaaatgacatattataagaaagcagggttacatccatatcatgagtctatagcaacaaaagaccaccactcagcccgactctagggaattttaacccattaggaaacttaagatgcaatttaaatttatttagtgcaccaactgggagtttagtctccattatgtacaaaagggttgggaaaaattgcttaactaaaagggagagagaacattatgctcatttactccccagtccgcgagcattcgaacttatgaaactcatgctcctggagggcgcgctaagcaacacctgcctcataggtgtgatccttatcaaggattttgcctaagtttcgagtacgctttagcatcttccaaaattcaatttcatttatacattttggacggcgtgacttgaactgacagattgttggaggagcagaaactggtgaagatgaagagtcaatggcaaactgtgggggctggttgggggtaaggtctaccaggatagtggagaaagattgggcaacaaggacggtatggccacttgtatcggtagtgaccgtgatgttagcaatcacgggattggttgaagtcggtataggtgtgagaagttgttcagcagtggtaacagcagggtgagggttggtattttgggttatagccgctgggtaaggcaaggggacaggtggccgaggagttagatcatcaaggacaacaacattacttgaagaaggccagtttgagaatggtgggaggggtggagcactattagggcaacgagtaagaggaactgaatgggatgagctagccatataacatcctaccagagtggtacggggctagctgaaatgttgaatgccataatcagaggttggctcattaaaaggacctttggagatgatcattggttggtttgatcgaagatgatgggtagcaaccaaagatttaggactagcaatgtgaggcctgaggtgaacaagtgctggccatataaaaaggatttgaggtaatacgaatcttggctctaagagagtgatcgtaactgaatagaggtggagttgatgaagagtcacatttggcaagaaaatcatgacagttgttcactatgtggcttagatagccacaatagtgacagaaatcaggaaggttctgaaaacaaaattcaagccaaatcggaactgccattccttgaaaatgaaaactggctccccacagtagaggctgagttacatcaatttcaatacgaacttgcaaatacatgccctaagattctttgagcgaagcagtatcaactttaatgaagcgccctagaacttcaccaagttttcatgctaaagcacgagatcgttttagaaatgggatgccaaaaacttggatccagaaaagagttgaggtaaagcatatcaacagtgactaaagaaccagcttcaaggggtgtcatgtctataagattatagtcaaactgccatggctggcctataagcacacgcctacggtcaccaaaataaccaaattcgacagtgtagaaatttgaatctttttccaagatgtttattgaaaaccgttgaggccacatttgacaaagataatttttgaaagcatctggattaaaatggcgagtggtaaggagcttgactgcaagaaaagctgaaggctcttctctattatcctctttaggctgatcagtggattttgaaaatgagtgtatctttgtttcaatttcagtaagttgaagggtggctgtaagagtattaaagaggtcttccattttcagaggtgacaacgaaagggggaaagaggaggacgagactaagaaaggggctagattcgtatctgaaagagaatgtagcagatgggaacagggtattgggaataagtgaaaaaattcctttaaatagacaaatatagtagaaaccagtatctcaaagtattatgtagcagagaagagtaaattctccatgttaggaatttcaatgatataccttaaaatgatagtggcttctatagcagatataaagacgcctggagaaggggaaggattacctagaaatataggttcaatgattaaccaaggaggtgcagagggattaaattggttaaaaactccatcaggaggagggatcttatcgcgggtatgaaggggttctagggaaagaggggctgcggagttaatggtcgaactgggtaataagcagggccggccctgggcataagcgggctaggcctgtgcctagggcccacctagtccaggggcccaaaatttttttttctccttttaaaattacaca

SEQ ID NO: 299957 - DNA, 3706 bp, Cannabis indica
aatgacatctaattaattttttttgtaacaaccgcttgacccatcttccttataaaaaaaaaaatctcaatttcaaaaattagggtttcagtctatcccgacctaagatcatgtgaattttctactttgatgcaatttcctacatctcagccacaaactcattcctccgattcactagctacagttagatttctctttgattttttagtgatttgcttgctattttcttactattgcttagttgtgataaagaagcaacaatcttaattgctatttttcggctagcttatggacaacataaggtcgaccaacatgcatcctataagtgcacgaccgaccagacattggcctgacaggactttggtgcacaactttacacatggacatcaagccagactatgaattgggccttaacaaccgacaaaaatagagaaatatctattttcaagggatattttagtcatttgtattttactaatttaatgtgtaaatattagcttattttacctatttctaaggaatttaaagggtttaagctctcttatataaagagccttaacaaaatcctaaaaccctaagttctaggtctaaagtcattaagtgcaggtcacaaaccctagctctaagtctgataactcatatctatctctctcacgctactactgctcttctcatacttgagatttgccaatcctgattcctacattgtaacctttagagagctacttcagatgccatcactatagtgatctgagtagtattatctctcggtatcaatacaactaaaaggggagtaggccataacccgctaactaaaggggatgaacttctattaaatcctgtgttcatttactttattattcttattgtgtaacacatggaaagcatcaacattgaatacgactctactgtcggtttgccaaatctgaggtcaacagtttggcgatttcattgagagcaagttgatattatatttgatcgaacgccatggttaacacgaggagaactctgactacaatctttgcctcattgggtcttcttcaggatcctctaactacaaatcctgatgttcatgttccagccacaactagaatttccacgaagactgcaaatgtagtcaatcatgccatctcggcaggcatcacaaatctagccaccatagctggtcagggtgacacaaacatctcagtggatatgaacaatcgaccatttccttcgagggaagaccctccactggcgcctcccactgaaggaagaacacacgaggaacataccccaggcttaacaaccggaccctgtccccaatactatgctagagagacggggctaggaattggcgagccccatgtagacttaggagaagatttcaagttagctagacttagagaggtcatctaccaagccagtcaaactgaagaaccatgcgctactgattgcgatgtattcgctcaatagagatgcaaattcctgagatggatggatgactaagagtacatactatgatctcaccaagtagagttagaccaccgcaacagagaaatcagtgacctaataaggcagttcaataaaagaactactagaagaggccaggatctcatcaaagatccactccaaggaagactagttgacagatagaggagggtctactggtagtctgtccaaccaggttcttcaagaactaggacagacctctacccgaaggaggacaggcctttccataaaggtctaatggcgagaacagtcgaatcccagcaaccatcggtttgggaggctagctagggatctcaagctcaacaactccccctaatggccaacctttggccggccagccctctggaggtgtacgtccggccgaccaagggactgaagtcttttctcgaggcatctaggagtgagtaacccagaggctaatcttcaaccggctagggccaaaaacgggtggaagcacgcagaacaacaattttagaagtgatactaatcacttcatgtatctagatccacctaacactagaacctagtgcaatctacctcatgtcaacacactagtttcaccaaccaatcagggaatcactagaaactaggccctacccaacacagggctggccggccatgaacagctgcccagtgtaggcttggccaaccaggatcagtctccctacctgggagtgggttgctagggccaacaactaagcacatggttggctggcctccaccacacactctcccagagtatggttggccagaccttggcccatttgagtctacagcccatccaaggtgggccagtcaaccaagtccctgcagcaacagatccttctgtgcatgcacagttagaccaaataagggacatgatcaagggcctagctagtccaaaaactttagaccttgagctaggcaagtcaagaggatcaccattctcaacatacataaatgccttgaccttgcccaagttcaagatgtcagtatggaagatgtataccgggcgagaagacccactaccacacatcaagtacttcgagatgcaactcaatctataaaggatcactggtgatgtgcggtgtcgcatattcccaaaaaatttgtcaaaaataacttaggaatggtactttaagctggccccatgaaggttcaactcttgaaatgagtttttccaagaattctacacacagttctcatcctcaaggcttataccatcatagctagaagaccttctcaaattcaaacaatgacaaggagaacctttaaaggattacatccaaaggttcatggttgaggccaccaaggtcaaaggccttactgaagaatgtcgataacgaacatactagggggcatccttccactaagtgacttctggaaggatgtccagaggatctaacctaacaatatgaatgcgttcctagacagagttgacgactttatcaagctagaggaagttttccagaaagcccagatagggaaagttagcaataggcaatcacaaggcatcttacagccccacgacttgccaaacgtgtaggcagacactagcaactctgcccaaacctctaatggcaagaacacttagagtaagcgcaacaaaaacatctctagaagaacagtgacaaaaaagggaagtataacacttctcccatgccacaaaactagaaggaaaaagaggagatgtatacccgcttcaccctcttaacggaaaaacctaaggccatcttcatggccactcaatgaaaagtctcatacagaaaaccccctcccatcaaaagggagttgagtaagagggacatgtcaaagttttgtcagtttcacaatgactttggccatgacaccaacgagtgtcaaaatttgaagagggagattgaattccttataaggaagaacaatccccatttgcatcgttacgtgcataacaaccagacttaggcactaggtcccaaaatggaggccctatgccacctccaatgacaggtcacttaggggtcattatcgacggaccccatattacaggcaagactagaaaagttaaggagcgctatgctcggaaactctgccacgagcccaaaagtgatatctttattgtcgaagaatgaggctctaagcaaccaaagcttggagagcccatgatctctttcacaaaaggacatgctgctcaagttagttttgttggaatttattttaccaggatcttagatctactcaaaagtatgttgtttaa

SEQ ID NO: 299958 - DNA, 2946 bp, Cannabis indica
acataattgattttgtccagattcaatgaatataaaatattcatttatcaaaaaatcgattatttatttatttacttaaatagaaaatcatttccttaattagaaaataattttcataaataaaatattctaatactaagtactttaaataacaactaacataatacacttacttatgagttgtatcaatgccaaatctctctcgtcaaaatttattttttcatcgcgggttagtttagagttgtgagagacatggttaaaatccctctcgagcgtgggaagtatagcttcaatttttaaaataaatgaataacttcatttaggcatctgccaacaagacacacttctttagttcttagttaactttccattgttgattggaatgtctgatagtgagtagcctatatattatgacatcgatcaatatataaacaatagatgatacacttggataaaaagtatgtagattctgattcttctttaaaagccaatcaaatgaagtaacggtgtctgttattcatcgttaataacttaatatgtatgtttatcagtttctttaaaagagcgttaatcttggttgtagtacagcgtttataaatattttacatgtattcacattaaactgatagttaaattaaaaccataaattttagttttttatttgaaattaagactattaataataattaactgttatgttacatacaatataataaaagcattttaagatcatcttccgttatgaactacaacactaattttgtttaattcattattcttggatacaaaaacaaagagagatgaaaatattttctataaatagcatcttataacaacacttgtttatatacacatctattaactatggctaccgttacaaagcactctgctttggttctcatatttgtaaaccttctagctctaaccagcgccaacaatgccattgacaactgctggagaaaaaacccgcaatggaggcgaaaccggccccaactcgccacctgctcagttggttttgctggaaagatgagtagtggcaatgcaggaagaggtctcataagatacgtagtcacaaacccaagtgatgaaaatcccttaagtccaaaacctgggacacttagatatggagctagtatgataaaaggaaaagtttggatcacatttcaaagggacatgcgtataactctccaaaagccactactcattagtagcttcacggccattgatggcagaggtgtgagtgttcacattgctggaaatgcttgccttgttgtggttcatgcgagtaatgtgataatccatgggcttcatattcaccactgccgagcccagggcccgagcagtgtgatgggttcggagggaaatgttgtgtcgatgggtcaggctgatggtgatgctattagattggttggtgctaggaagatatggattgatcataatactctgtaccagtgccaagatggacttgttgatgttactcgtggctctacggatgtaactgtttcgaataattggtttagagaccaagacaaggttatgcttcttggtcatgatgatggttattccatggataagaatatgaaggtcactgttatttataaccattttggtccaaattgtaatcagagaatgccaaggtaccctacttctaatgttaaatacataatacaatagtttctcttatatagcgttatgttttctaattaaaaatttccaaccaattgaaaaacaaaaacaagacatttacttttacagtactccatataatgaaaatgctttgatttatcacaggaaaaagtttcgagaactagcttatttcagatcaagtagattttaattttatgtatgaaataagatttgctttaatttatgtataacatggcatacacaatgacaggattcggcatggttatgcacatgtggccaataacttgttcagaggttggactcaatatgctattggaggaagcatgagcccaagtgtgaagagtgaagctaatatctttattgcacccaaatcgggaaataaggaggtaattcattataacgtgatgtcggttttattgatataattatatgtgtgcatatgactaagtttttacatttttttttacaggtaacttggagaatggacacagttggaaacaagaattcatggaagttttattcagtgggagatgtatttgagaatggggcttcttttacaggaacagggttcatgggagcaaacccaaactataatcctcaacaaaatttcaaggttgcaaatgccaaatttgtgagatccttaactagctcagctggtgttcttcggtgcactaaacgatctaaatgttgaataggctcacaaaaacaaatattatgatacataaatataattatatatataggtgtgtaataaataagccagtgtgagatggagtagtatgcattttaatgatgtacaagtcatatgtaaatgttctctactcatatataaataagtaaataaaatagaagtagttaagaacttaactacttgggtacattgattatagttttatcatgtgctgacttttcataatacaaaaaacatcagtaatttttctttcttttgaaacgaaaaaccgtaattggatgatattgatgtcactacaacaagaaagaattcaaattcaatcaatgattttggtaagatcctctgcacattaatatacatattccacttggcttatacatttagaggtgtcaaacgggccatattgcctcggttgggctgggctggcccattctacaatatctaaaaaaagcctaagacagccgagcccaattatactccaaggtaagcctatatgaagtctcaaattctactcctctcaaaatgctctcaaaaatactcaaagaataattacataagataccatttttttttgtaaaataatttaatttttacgttcaaagaatatt

SEQ ID NO: 299959 - DNA, 1463 bp, Cannabis indica
caagatcaatatcggtcccagttcaatgtatactccatacttcagaaactaacatacttttgcaatgttttggaaagaacataacaactatccaaggtgtaagtatactttatcactgactatcacatcagtgtaaatccagtgcactgattaatcaagggacattaacttttaaagcatataatcacaattaccttccactttgttgacatcactgtaattgtgaataactatatgttctggatttaacagattttgtacacattaaaccataaacatgaaaactacatgtaaacataaatgacttctaatcttctatttataacaaatcagattacattgaaatggattttatttagggcataaaatccaaataggtcttcccccagtgtcgcaatcctcagttgaggctgggctagccaaggtcttcttaccccttggcgttgtcaagggtacttttggtggggttcactttccccatgaaggtgattcctttcgaccctctcaatttgcagaaggacagaaaggcgaatcgggccctaaaggagcacttggaggctgaaaggctgcaagtccacaagagggcagtcctggtgtcaatggtttgtaaggctgaaatcttagaggacgtacatactccaccccctacggggccgatcgtggaggttgggggcttggagaagaggctagcatacaaggtgggtaaagaggctgcaccttttgccaccaaactcctagaccaggtagctgggagtgcctctgaactgcgtatagagacttgggcatcctgtagtaccgcggatgttttcccgctagcctattctgccaagcgacaagtagttggggtaaggcctggagacattgcctcaacttttctctttgttttggtttgtttactttgccccctattctgatactttaacctttttttagcttggcttgttctgataggcagccctactaacagagagggttgctgcagtggctggcgtgctggtgacggagttaaagaaagccaaaacggccaaccgcgacccgcatgccaccaatgagaccctccaagtcgtgcttattgacgccaagttctagattgggggtctacagcaggcgaactggaaactggaggaggacaatgcccaccagacccacttaatacagagcatgaaggttgttcacgatctttacacagagaccatggggcggatgttcgatgcgggctcttcctcccagccaggtagcgtccaaccttgaacctctggcatgcctccttgaattttttgttgttctccccttttttttgtatatcccccctttaaccatacttttttaactgtgaagataattaaaattttccctggctgcggggggctgtaatagtgaatagggtcctttttcgtcgttctttacttggagatttggtgtggtagacttttagggacgggttatgttattgaagcacctgg

SEQ ID NO: 299960 - DNA, 1306 bp, Cannabis indica
cactaatgtatatttctgactatagaacttatttcatactaatgcacatataaaaagtgtacactatacccttaatatacaacattatacattccaaaaataaaagtataaaactaccaagccttgtaacctatcataattaaatcaatcaaaaagaaaaagagctcttccgaagatatatacttaagccgacctacctatatcttagctctcacaatatagtacatgtacctaatgattaatagatataatagtaagatacaactaataatttcatgccaaagagtattctacgttattactaattacattaagattaagagattaagcaaatctgaacaagtggcatggccgtagctttggtgttctcatcatcatcaagcaatttttgagagccaatatggtgcgtggttggggtagcactagcactggattattaaagggtccaaatccagccgaaatttccgatattaatcgtcaaagctcgaattaataataataataacaataacagcaaagtgcgtttgggtgggtggtggaattgctggccttgccactgccgtatccctccacaggtacatatatatataccttaatttttaacaaatatatattatagaaacataattaatatataatatattatatatatttaaattaatcagattagggattggatcattagtggttgagcaagcagaatcacttggaactggtggaattgcactgtgtctttacaagaatgggtggcgggtgttggatatatatgcaatattggagtttgggtctcatatcagattccaatttatatattcagcttcaagggtacctacctaccttaatatatttatatatctattctatataaagtgtgcctatataaccgaattcttagtttatgagaaattcgtgtgagactttttatttatattaaaaataaaatgatttattattaaaaataaaataatttatgagaaattcatgggtcactttttaattatattaaaaataaaataatttatgagaaattcatgggtcacttttttatttatatataataaaataaataaaataaatcccattaaatctaaaaaaaatactattgggtttttgttgttgtacatttatgatttttctcttcttcttctcttcttctcttctagaattaccattttcctataaaaacactcactaaaaaaaaagttatattttagcacatacagtataattaagaagtcataaaatttataattttgtcttctgttaaataaaaataatagcaacttgaagcattattataattatg

SEQ ID NO: 299961 - DNA, 3424 bp, Cannabis indica
tgcacggctgatagcgtatatacatactaaccatcatgcttactttgctacctggttaacttccgttggattcatcgtctgataagctcgggctctggattaatttcataagctgcaaggagatcagataaccatcattaagaggaggaagtgcaatcctctctcattacgaatttttatctcaataaaggaactaaatgggataaaaaagaaaaaaaaaaaaagcaatttagttaaaatgcacttggtttcaaactaaattcaagtgacttgaaggaatttcaagattgctgacctcgtttcaggctcgtctggaaggggtggagaggggaaataggagtagtgtgaatttgggttcccgaagtgaggttgacctgtggctcatcatcaccttcaacatcaaatctggacacatgcatgacatattagaattttacagttcataagacatgcatgtttaacacaggtacaaagcctacaggaccgaagtatatatgcttatacgtacatacataatatattatatatgcaagcttgtaaactaaggaggacacctttcgtaaagattgtaggtagttgcatcagcctgaagtggatcaaaattttctcaaaattattgtgattattttttctgggtcagctgaatgcaatagttacaagttagtagtaactaaatgtgatatgtacatatgtacaggcattcctgatacttactttcacatatctaacatttaataatacgaagtaatggaaagataagagtccacattataaccttgatggaagtgttcagattgatctccatctccggcattgccattaataaatgtcggatccacactgtcaagtcgctgcaaagttcaagcaaagataggtttagagccaaaatgtattattatcatacttacagttacagtgacttacggaagacatacatatggtccaatttttctttttgaaagaataaaccatacgaaacttgacaataggtaaatgaaattaagaaatcatactatggtttaatgtttcagtaaaacatattttatcactcatcaaatcatgattacaatgactctttgagccacctttttagcttctaactattacaaagcatataaaattatgataccttatatatgattatgaagaactgaagaaatttaacaatttgatgagttcggacaggaatttcctcaccataggaaaataggttgtttgatggaactccatgtcgactgtggtgctgaaagaattatgcatctgctgctccatatccccaacatctgtatctttgttctcaggcagggtcacagtttctttcctaaaacacaaagatatacacatgaacaaaattcttactaagtagtattagagttgagtttagatttctacttctcctctctttatctgttctctaccagccttttcatttattcaatgaaaactcattttcgttcctctccctccaaccccacaaatattaaaacaaaaaaaaaaaaataaaataataacttaataaatagacctgcctattttctaattttagagaaaaactataagaagaaaataatgactgacttggcttgagattttcctttggggagcagagtacggtctggtacagctttcactttccatgcttggttgatttcaacctgcattacgacaatcaaaagattaaaaaaaacattaaataaagaaaatcagcatccacccttaaaaaatagagcgatgaaaacagagtacttggtaatgaagagagaaatgaaaattatcaaaaaatgaagtttaattagttaccagaagacgagtcacatcatctgaacaaaaaaacagagtacaataatacgaaaacaaaagtatcgttagagatttgtttcagaaatcaaaaaactaacactgaaattcaacaaaattgcaaaataaaagactggaagataccatatagcagttttactttccgttcgtacacaatcactacaccacctgagtaaaacaaattgaagaaccactttctgtaatttcgttataataaaattaatgaagaaaacgtgagagattgtaatttgattacccataagaattccagagagcctaagggccatgggaaccgacggattcaatatctcatcactgaaaaagaaaaatccaaccgattagtttgatcatagagctttgtaactacgttagccaagtgaagaaaggcgaaacaattggaaccagatcttgatgatgtcgatcttgtgtagcttccttctattaatcttcccatgcatcgttgcagccatcctagcattatcaaaacaaacagaccaaaattcaacaaatgaatgtcaaattcaaaacgctagactaaaaagaaaaaatccatcacagaaacggaggaaaattcccggaaacaaacactcttaaaactacagattctacttcacgattttactcagaaaactcattggaagctatgtagtgagttcatatttaaaacttttgaaaaactatcttcaaagaactcccataagaaagagaaattctcaggaaacaaacagtctgctatcaaacaactcgaacaacagattagtcttcatcagaacttccaatggagaaagaaacactacgataaattcaattcaatgagaattgaaaaataaaaagaaaatagcatagaaagaataaaatctaagaaaattaaaaaatgcattggcagaaagaaaagagttcaggagtcaccagatttggcctagagcagctttacgagcaaggagctggtgcgagtagaacatttttccactgaaagttcgaagtgagagaaaatgaagttgaagaagggtgaatgtgattggtgaaggaatatagtagcttaaggaggtcaatgagctctgtaagtgtagtgaaggacgttgttgtgaggctctgggttttaacttgtgcgcgccatgtattgtagctgagtaggggagcaaggagagggtgagactcgcaacgactgtaaatatgataaagttaccaacatgtataggttttgtctgtcaaggagctactaatagaatgccatgtgtatgattagaaggaaagtaaaataggagcgttgatgaatggtgaaggagtttagtgattacccttattacaacagcttctattgctataggtgggacccacagaatcacccgttcttagctctcaacttttttatgcttttcaataacaaaattatagttacgattgcttaaaaaaaatatatatatatattttatataagaaacagggagaagctagtttttttatttatcattattttttaatcaagagttttaataaagaactagaaaacaaacagcgttttgcaagcggttattttaatttttactcacaatattaataaaattaaataaaagataataagtaaaaacattcccaatatatcaat

SEQ ID NO: 299962 - DNA, 1479 bp, Cannabis indica
aagttcaatgatgaggctacgagggatcttattcttaaagaggggatgattcaatttgaccgtaaatcggttattattcgacctagaatgtttgtggaaatggacattacggatgatccacccaaaaccattgaatttcttagtgaacatggaagattgatcgagcaggatgttgaatacgaatggctctcaactaaatgcaagaaatgtggtggttatgggcatgggatgatggattataggaaaggagagaaaactcaatttgttaaaaaggctggtgttggtaaagaaaagattgagttgaaaactcctactaatgagaagcaagaacaggaggcagccccaataaatgagaaagagccacatgataaagaaaaacaagaaagggaagagacaatcaaagagaaaggaaagaagactgttgaatggtagacaacaaaaaaaaaaaataagttcaaagaagatcaatgatgccaaaagagattcagcatgctgaaatggagcttggaaaagttgataacatgaaaaatgcttatgaggctttgcaggaagggcctatggatgaattgcaaggtattccctatccttctaattgattaatggattgttgtaatataatgtgttggaacgttaggagtctggatatcactaataaacagaatatggtgttagatatgtgtcgaattaagaatattggagtagctgggatgttgtaaatgaaaatgtgtagtagtaaagttgagaacatgatattgtctagatttgttgggtggaatgcatattttagtgtggttacagaaggtcgattattgctaatttggaggaaaacttttgttagggttattgttttggctaaaatagagcagtatgtgcattgttacattaaaatggcaggcattgattaggacttttgcacaacttttgtctatgggtctaatgctctaaaggataggaaagagctttagtgtggcctaactaatctcaagtatcctgttaaaccgtggctcttactgggggattttaatacattgttcaattattctgataggaatggagggaatagggtggccaagaaagagctagaagatgcaaataattggttggctatgggggttagttggctggctttctagctctggatcaagatatacttggactaataatcaagaaggcgaagatagaatttattcgagaatagatcatgtgttcaagaatgaggagtggattgataccttccctagttccaaagcttacttctaatgggaaactatttcagaccattgttcgtgtatggttactttcgctcgtcctcaaaatattggcattaaaccatttagatacttcaacttttggtctgaacatgaggctttcaaggatgcagttatgactagttggtctaaacctatacaagggtgatgggctgcaggctgtctatttgaagctcctgaggctaaagcatgtcctaaggaagtttaataa

SEQ ID NO: 299963 - DNA, 6346 bp, Cannabis indica
ggttccatttacatgaatatgttaaggcattatcagttcttgatcctctttatcaaaatattggaccaattgatgaggtatgtaaaattatttgttatgttgtgcttttttgtaccaaatactaaatagtaaatacatcttaaagtgcttttgatcttgcagacaacagctcttcatatttgccttttgctgctggatgttgggctagcttgccacgatgcaccaaagtcagccgtaagtttttatgttaataatatatgttttttttgttagttatatatgtatattgttgtgagttgtcatttttggatgacttttatgttatctacacctactgatgaacaggaatcttttattgtttgctatatagagagtagagattcacgttttgtgaatatacctgttaacttgttaagagctctcaattggtgattaaattctttaactagctttgtttggagttcttgtatataccaagagatcttttggatggtgttgccaaaggtgttacatttttctttgtgtgtttttttttttgtacaaaattcattttaaaatttccacaatttttaggtttagttcttaccttttttgcattaattctttttcaaggtagcatgaacagtgtgagccaaatagggtgttcctagagaacttctgatcattgacttgtagtatgaaactattatatactcgtgtcctcatttttcttgtaatgtgctttttgcatattagtttgagccatattcacttcaaaagagaaaggtaaagaacgaactttatcaaggagttgatagggagattgaacttccttgatgtttgtaaacttcacactttttttaactattttttataattaattgaagaatagctaaaaatgttaccacttaacatctttacttgctgggaagttcctacaatatggttgtatgttttcgtaatatgtgaaatgtactaggaagattaattataatttcaattttaataataataaaaaaagtatagttcgataatcctcttaaactacattctggcgtataaattaagaatttaggaaaaagatggagagtaataatttttgaaattattacataatacaccaaaaatttgaaaaaaattgcaaaaatacgtcaatacggtttaaatttttttatttacaaaaatacgttcttataataaaaaatatgataatattatattttgggtaaaaaatttatttatagttgtcataaggttgattttttgttttttttaagttttctttcactttttattttttgctgagaagaacgtatttttgtaattttgaaactttaaagttgttttgtttgaagaattaaatttgtataattgtaaaaaaaatgtatgtaagtaaattattaaaaaaacgtatttatgaaaaaaccccttaattttttgggttggttcttgagttttgacatactattactgtgatagtgtttctgatcattttgcaatgttgcaaattttctttttcctactgtatttctaggccctgcatgcttactttcattatggcaagttctttttaagtggtttgatgtattatgtgaattatttggaataccaaaacttttgaacgtcaaaacatcttctatttgctacttatgattggtaatgctcaaaaatttgaacatgttagcagtgagttgttttctagtggatagagatttcttttgtattctagtcatctttgacgggatcttcaggtttattttagaatgcatgtctgctttatgcttgtgttggctataagcatgccttgtgtagatggctgcttttctttctttagtgtacccaattgcttaattacagccggatggatttggttttatacatttttagagttttgaatttaccagatgttttgcgttgacaagtcaaatttactagaaagtttatatgttttttttttcatcctgaaattttgatgttgaaaagtgcaaaacttgagtgtgatagcctcatgctaagttctttgtttcttatggatgcagtgagatctctaatcttaaagcttgcttatgttttatgaacatatttatcttctgattggtccctattttctatttatttcattcaggatgttttggtatatctagaaaaagcctttggtgttagctgtatcagtcaaaatgacaatggaagtactgtgccacaacctacaaatctagtttcaaaatcttcctctcttcctatcagctcattggctgcagattctaattcagagctaattgctaccaatgcatcagaaaaaatcttatcaagaacgctatcagaggaaacacttgagattgaatctgtgtttagggatatagatgtggcacggccaattggtctctcatcttcgaatgattttttgaggaactcagttgacaggtccatatcatctgtagatctgaagcttaagttgcagctttacaaagttaggtttttgcttctgactagaagtctaaagcctgctaagcgtgaagtcaagcatgctatgaacattgcacgtgggagagactcatcaatggctcttctcttgaagtcccaactcgaatatgctcgtggtaaccatcgaaaagccatcaagctgttgatggcttctagcaatcggaccgacataggtatattgagcatgttccacaataatctggggtgcatatattatcagcttggaaaataccacacatcatcagttttcttttccaaggcattgaacaattgtgcatctcttcggaaggagaagcctcttaagctgtcaacattttctcaggataattctctacttataatatataattgtggtatgcagtacttggcttgcgggaaacctattcccgctgctcgttgttttcaaaaggctggtttgattttctacaaccggcctttgttgtggcttagacttgcagaatgctgtctaatggctttggagaaaggactactaaaatccaatttggctccagctgatagatcagatgttataatttatgttattggaaagggaaaatggaggcaacttgctttaggggaggggattccgaaaaacgggaatgtggatcttgagagaggtgatttattactgggtagtgatggtcaaccaaaactctcattgtcccttgcccgacagtgtctttataatgccctgtacctgttggaccgttctgagttaagccatctgaaatccagtttgccttctaattcatccttggatgagaatgaatcaaccgaaatggcatcttcaaagaactcaagccacaagaacttgcagaacatggattccaaggcatccactgtggcagtaggcttaagccaggtcaatgcaaatggggatgcgaaagagcaaagggggggaacaactcaagagcttgtgcagaactcgcttacctattatgaagatatccgccgaaaggaaaaggcattgatcaagcaagctctgttagctaacctggcatatgctgagttggaaatgggagatcccattaaggccctttcaactgcaaagtctctgctggaacttccagaatgctctagagtttatctgtttctaggtcatatatttgccgcagagtctctctgctggttgaacaggcaaaaggaagctattgatcatttattggtatatgtatctgaaggcagtgttgaattgccgttcagccaagaggactttgagcaacgtaaagtggataggactgctgattgtgaagacataaatgggggatcaacaaatgccaagaattcttcccctcaagatctcgaaggtattgggttcctcaagccagaagaggcacgtgcagcactttacgtaaatttcgctaccttgtatgcgatgcaaggtgatttcaaccaagcccatcagtttgtttcacaagcattgtcgatagcacccaacaatccagaggctactttgacgggagtttacgtggatctggcgcttggtaagtcagaagcagctattgcaaagttaaaacactgcagtcgaatcacgttcctttctggtgagttaacatcaaatcattcgtgatcattgcattggtcttccattcataaatctccgatcacctctccgtttcaagtttagtgagtagagcagcaatcctataggaggatttgtaacatatatagttcaattcagaaataaattttctgttctcttttctttttcctttccctttttctttttgaaaatttcatatgtagggctcattaataggtggtgtggctgtgttttggttagtgcggaagcccaccttttgatatttgaggtgtagttctgattcgggtcattgtgttttagtacctaattcagttggttcgaaaaatgttgagaatatgtgctcttcctgaaaaggggactgaaaaaaattattcattctagatttgaatttcaagtcatttctttctatcttctatcccttattttattttatatggagtgattaaaatcttcttcttaaacccttttattaatatttgacgtgttgaagacgaaattactgtacatagatcaggtgactaatcatatatcacatgtttctgtatggtgaaaatgtcgattggggaccagggatggaattcgaagtgggtccttagttatatgtaaattgtcctaaagtcaagaaaggaaccaagccataaggcctacatgtgacaaattacaattggaaatattccatatagaaattacaaaggtgagttcaagtctataaagcattactagaaactataaattaaatgtaccaaacgaaagcttcttttatggtaaataggaccatatgaaaatccaattattgtatgatgtatagtaacttccctgttacttcagttggggcaagttgctgtactatgtattgtctacagagcaatatatgccaataaagttctatttacagtacaaaagttcacagcagtaccaaactaactacaatctaagtaaaatcatgtaatcattctctataattaaaaacacactattattattaatatggaagtcttcctgagctcattttagtacatatgatgtgctgtagttatcttaattagaatgtaactaagaagaacctacaattttagtatttggtaatatatatatatattaaataaattgtaattggttacatattctcagtagaaggagagaactgtcatgtcatcaacagacaccacatgttttgggggaaggaacagacaaataagttcatgtgcctcagcatcaacaaaaaaaggttcatgtgcctcacttagagtggtccctaatccctattgcctttaactttttaccctgggatgggatacattgccatactggacatttttcccatgtatttatctttttattcatttattttattctgtctctaaagtcattgacccatctctatagaagataagaatatcgtattttttttgtatagtatatctctctaatatttcgacattatttttttttatttatatgctctaagtaaggatctttcgacaagaagttatcttgtgataaataacattggatattatgtataaaaaatcggattattattattattattattcaaatatatatttttttttttttgttttaactaaatactataaatactataactagacttaacaagatttctaatgcaattatcactggagctgccattaccaccagaaatttgcctaagttggcattgttgtcaaaattatcaccagaatgttcgcgaagttaaatattagagtcgcaatagagttagtggttgaaatctgacataaagagattagttacattattaactatgtggtgagttaatatgaagaatcataaacaaacaacaactgtagtactagaaaccaatttgaaacattatcaagaagtggattaaaattcaaaaagtataaaaacaataattaaagaagttgacacaagttgcaacaagattcatcattctttctgtggcgagaggaattgccttttaaaaaatctttatttattaagaagaatagtagatttacaaggctgtatacataaatggtttcttcaatttccaccttacaaaattcaactcacttgagagagttgtgatcaaacacacacaacctctttacaactctcgaagaacactcaaattgtatttttcatctacaaactctatctagattgtcacctacaagagtgaacaaataagccttatataggcaacaagtaaggattcccgagctatcaattaacataacaaacttattaattcaacaactacaaaacaatcatttttgtcagttttggaccgacatttatggtattagcgtcggttggcataaccaacgcatatgcgggagacacaaacactaatgt

SEQ ID NO: 299964 - DNA, 979 bp, Cannabis indica
atagtagtatgaaaggaaaacaagaagaagacaagtatgcatagatttttaaaaaatctaagataaagcttgccctaaaagataaactttcgactaccaaagattgattaattgattgatgttactactgacatgacaggatgagcttcctatgtgcttgctcaggttacaatccgatcccgatggaaaaggaagatagaattcatacaatcttcatcatagcataacgattgtatggctacaaggttatggccatttggctgaacaatgcaggggcaccaaatgaaagggcaatgaacaaagtgtttgccaaatagctcagtacaattatggaaatcaacatagatgatatggtggtaaaatcatggatgaaagaggatcacaagctgcacctgaaagaatgcttttatgtgctagatctttaccagatgaagttgaatcttatcaaattcacttttggtgtaacttggggacaatgttttgggtacattgtgagaaaaagaggtatttaagctaatttgactaaattgaggtttttctttctgaaatgaacaaacgtacaaatgtgtaggatgtacaaagggtgacaggaaagatagccactctccgaaggttcatctcaagaatgtgaaaaatgtgaaaacctttatttgactgcatcaaaaagaactcaaatgaactacagagagtaaaacaggtggaggcctttgaacaactcaagaattattggagctctctacaagttctatcagcacccatgccaaatgaagggctcctcatgtatctgctagttagtgaagtagttgttagctgttagcaaaatgctgttagaaacagagcaatttataccaccatggaaaatctagcccttcctttgatcactgcaaaaaagaaactcaaacaatacttcgagatgttgggtttgatgccctaaataaaactccatttcaatgtaatccattttattcaacatcaataa

SEQ ID NO: 299965 - DNA, 1489 bp, Cannabis indica
gaatcaagagtaatatctaatatggtgtagtggtagggaaacttttattgatttctttttgttaagggtttcgactttcacttaactctttaattgtgagagattgtatttgatctttgaaggttaacttgggttgtggtgggttatctttaggataggcagagagtttttggtggtggcccttggacaattgataaacaattgatctgctttgtcaagccgatggggttgggtgaaatatctaagatgaattttgattttacctcgttctggatctcaatcaataacgtacccttagcttgtatgacggaactctttgctagagaatggggggagcggattggtaaattggaagatattaggattgttaatggcgtaatgaaagtaagggtgaaaattaatattaccgagcctcttaaaaggggtttgagggtagccattgatgatattgggactgaggtttcactcatctttcaatacgaacatctcccggatttttgctatgactgtggcattattggccacaaggcattagactgccctcttagagactttgctggagataacccacggtttgatagtgggagatttggttcatggttgtgtgctccgtcctcacctccccgtgataatctacggttcaatcgaagacgtgcggagtctccttctgcaagaccgattatgtccatgggcgaagcttcaaaaatactttctgcggtggagagatcacgatcgcgttattcaggtcctactccggagcagctggctccaacctctgtcttggaagctcgtgaacgtgatgcagaggcgttggaggctcgtgaacgtgaagctcgtgaagctcgtgaacctggttttcatggtggtgccgaggagttgggcggtggtgtaccggagttacagtcgcggacggttgtgggcgggcctgaaattcttattgttgatggtaatcggggagagaatgggatgatggattgtgggccggcgatggtgggtgatgaagtgaagttgcaaggtttaaccgagacattgaatactatggaggggcttattggtgggtcgaatgacgtggcagcttcatcagatgggttgaatgtgaatgtggagcctcaagttgactttcaaagtgggggccccagtgaagtgcggctacaacgactcaataaaggaaaggctattgtgcatgattcttctcatgaagagttatctttttgtcaagcattccaacaaacgtttgaaccaattatcaaagcacagaaatctaagacttggaagcgtgccaattcagcaaaaagccgtggttcaaaaggtatgcttaagtctagttcttttcctttgagcccgaaactatctcatgttattgtggctaatgctatgaataagctaagtccgaggtctgggggcggtaataaaagaagatggatgatgattacagtaatgatagtgtgaagaaaggaaggaaagaaggaagtttggatattccatccga

SEQ ID NO: 299966 - DNA, 1887 bp, Cannabis indica
ttataactggcccaaattgggacttggttttttttataacaaattagaggttattcttgaatagagtattcttaaatagaggttctactttattaaagaaaagggttttaacactatttttgtatcaaatatattgctttatacattttaatgtaaggtaaattatatgagtcgctactcggaaacgctatcaaaatataatagtattagtggctataaacattatttagtagttcaaattaagtactaatgataatattagaaaatatttatatataatagttttagagacatcactaacaatccaaaaccaaaaatgaaaatcaatctggttgtagaccaaccctatataggaatttatggagagaggtttcttaattgtcctattagcaaccctattagccaaaactaattaattagctagttgggcagattgcaatgaataatctattactataaatatacagtactacgtggcatcttggcagttgcgcacaacctacatgtcatgtgacaattcacactcttcacttaattcttttgtgtactgtgtttctaactcatactttaatattttcattttaaaacatcatagaattcagatgaaatatcataccaaaaaattcggctttgaatttaatcagttgtttccaaaaaaaatatatatatatattaataatgttaaatatgttccagtgcacatatcatttacccacttgattatatttaaatttgaagtttaagctagtgtggtaggtttataaatggtgggttacttagagcatttctaatagtaaaaaattaaaagatgcttgtttaggttaatagaagaagtggtaaaatgttgagatgttatagtattggagagaaaagaatgttattataagaatatgtgtgaatgctatacagtaacattgatgctatcattatttttttaataaaaaattaaaattaaaaaattattgttgctaaaaaattaaataataatgtatgagattataattatagtatttttgaagagtgttatattattggagtaattttagaagtaagagtgccaaaaataatataaaagagagataaaataaaatgttatatttttgtatgatttgaaaataatttttagcatccttaatggatgcaatcgttgaagatgctcttataagtcatgactaaaacttaggttaattaaaaattggattcatcctcaatcagattgatgaattagaatcagaataaattgcttacttaacttcagaaatcaaaatcaaaacaatcagtttcttattgatgtgttttacattacttaagacttggaatagattatttaagttgcatgatacctttaattaaagttttatttaaattttaaattttttctaattaaaagaggataaaattgacattatagatggaatgaaagtagcgattctgccaaccttcttatattggcaaagctcattttttaacaaaattacagaagtcaacaaggttatgaatgtcattctttattttcatatttcctaaaaacatttttaataaaataggtaaaaattgtgttatatttggaacataaaaagattttgtggtattacatttgtatcaatttttagcaatttctctctaatgcacaatcctaaaatttagagcacaatgttaaacaatgttaaaagttgatacaaatttaatatttttattaatagaataaaaaaaaacaataacttaattattaattttattatataaaacaataaaaaatgaatataaatagttcatagttaatgttataactaaataaaataataaaataattaaagctatataaaagtaagaggagtgctaagggaattctgtatcccactctcttttgcactctccctttaatgt

SEQ ID NO: 299967 - DNA, 1848 bp, Cannabis indica
gggcataaaacccaacatgattatcatgccagtctaaatccagtgaactgacaaattatgggaattaaacctttgaacatataatcgtgattatattctactgtgttgatgatactataatcatgaacaaatatatacacatataatggacttaatataatttatacattaaacataatcatgaaataaatcatgtgaaccatgcaacataaaagcgatttctgatctttattaatttgtaaatcgaattatatttaaaagggttttatttagggaacataacccaataggagtatgcagtgcaatcgacacctagcaataaatccagtaggaaagtaactagaattaatgaaaatttcccaggtgccgttttggggaaaattttgaaagtggtcgagaaaaccaccccttacccgaaagtcaacaattttgaatgcatggtttctgattcactgccttcaagactcgccttaaggggaaggaaagctaggtcagtctcccctagcgtgttacgaagacataaacaaggtaatactagtactacaccaaaaaaagatataattaataatttctcctcaagacccccacccaaccctgataatgatagtattcttactaccattatggccaatattgggcccacttatgaccaaatggtagataaacctcatgttgagttatgtatctcaagacaaccacaaaaacatcctgagcccacacactttccttggcccacttatgctgaagaaattgggctggcggaagaattaatgggcccagcaccaatagagaaatttgaatcaattcttactctctttcatgacccaatagatgtttctaatctagtccatcaatgcccacaaccgaagaaaagaaaagcaagccttacattaataccttaccctcaaaataatgctaaaaacactagagagtttacttaagaagttcctgacctccctgagttttcccttgctttggatacacctttcaagatgggctcaggtgccttcctccatgaaaaatgataaacgaagaaggaaaggatctcgctccaaactagcataagctaagaaatgccaaagccaagctgatacgataatcgttaccgacgaagctcataaaaatctcattgagtccttagatcttcttgaagtccaagttgaaagctcccaaaattttcttccgggcgaggaggcggcccttatgaagccccccgaccccatgaaatgcttatcgtggaattgtcggggcctcgcaagagacctataaagaccgcctaagtttaatatgttggattattaaataattagggttgatttatgggatttaattattaattacgattatcatgttgtggagaattatttaattttaatatgtattaattatgctatgtgtgtgaattctcattttttgtgattgtgcttggtagtattggaaagcgacgttgagcgattagagagtcacgcttttatatggtttagaatgttatagatagtggggcattgttgttagatgctgagattgttgattaatttacgggatttggaaaaatgaccaaattacccctctttgctccattactgtttgttttcttgtcaaggacaatgtggtcaatttagtttgggtttttgtcatgttgtggggtattattttctataagtttatttaattaaactaagaaataaaaagaaaagaaaaaaaggatttttttactattacttaaggaccaagtaaccacaaaaatgaccaactccctcttcttctttctctttctctcgtgcaagccatgaagccagccaaatttttggagaaactttgctgaaaatcatctctttcttgttgaat

SEQ ID NO: 299968 - DNA, 4880 bp, Cannabis indica
ataaaaaaaaaagtgagagagagaaaaagatacaatcgctctattcaccgacggcctctcccacgcccccctcgccctcctcctctccctcctcctctccctcctctcccacgatgccctcctctccctcctctccctcggcctccaaatgctgatttcagccccaacgatccaactcccctcctatcttcacctcgccttccactcccttccatatcctctacatactttgatgagcttcttgctgaaaatgatatctctcgtgatccaccaggccctaacttgacaccatccgggatattagaagtccgtgggttattatttagagatgccagtctctccccaagtggaagggagtcctcatttgcaagtgatgtgcgattgaagaatgcttctgcgtgcctttcatccttgacttcaagcaatctatatacagaattccatgaaagactttacaactttaaatatcaatgatttttaatctatagccatgaaatataattttttaagtcttcgtcctttgataacaaactcaagagccaagaagaataaaacattaacagaaatatgcatttcacaagtttagaatcagtgaaggattcaaagcaacgtgaattataactcacaattatctgctcaaagagaaacaaaaggaacaaaacactgcagagaaaataatgttaaatcttaccttggaactggtcctttctttctctttttactctcatcattgttgagctcatcttctgatgagttggatatatcagaagcttcttcaccctctgaaacagattcaaaatgttcctccaccaatgatggttgcttcttagtagaagcaacaggatgtagggcccgatactcttgtgagaactcatcaatttcgaagtcctaaacacaagatttgaagaggatagaagttatttctttcggtcaaacaattaagcaatgaagcaattattagaccattggtacatagaagtttcacagttgggaaacattcaatagttttaacaccaaaaatatacaaggaattagccaagagaaaaaaaaaagtaataaaaaggagaagccccacgtaattggcacttggtaccatcagcccatgtcaaattaatcagattggtttaccttgctttcaaacattttcgtaaatcggtcatctttaaaaatttcactgccaagtgccttctttttcctggatggtttttggatgtccttgtcgtcatcatctttcttctcattttctgcctcttcgttttcagcaatttgtttagccagattccggttaactttgggtagtttcctcttggtctgatgcaccagaaaataaatataataaagtcagcagaagtgtaaaggcaatgagctggagtgaatttaaactagacaaataattctttaacttcttcctcctaaatttatttaggtccgcctgctaagccatctaattttcaagagatgaaactctagcatattgcaagctagataacttcccattaagaattgaacaattgaaccccaaaccttgtgggagaaccaatagtgagtaaaacaagcaattctctagaaggtgagtgtaaacacaccaatttccacacacacacacacacctctatttaatgtagatgcaagaaatgactataatctatctcccagatgattataacagaataaggaatagttaaccaaaaaaataaaaagagagcagcaaaagttgtcaaatcaaatgcaacttactgtaattctattggctaattctttatccagcttatcttgttttctctgttcaatgtatttatcatatgaagaaggatctgctaatgctttagcctgcacagtacataaacaaaatatacaaataagcaactccaaatgtccaggactccatggaagattaccataacaatcatagtccagcatgaagaataatgttaagatatacatttgtgcaagattttgtggagaacttaaattaactgatcaaagttcgaagtacaaggtcccatcaaagatgttgccaagctcttcctaaacccgctcagcatcgtgtcaaagcaatttgacaagaagaaaataatacaatttggcatggaggcttatacccttcataaaataatatacaagctgctcttaccttcgaatagaccgaataatcaacaaagtatccgtgcaaggaggctctgactagatccgtaccaataagattggtcaaattcaatttgtcaagatcttctttagtcaaaaatttagttttatcatatatgaatgattctttattgccctccagctctagctcttcctgcaaattgaaggtcaaaagatatatcaaagatgtgtttaaagatcttacaatcttagggagtaatacatacaaaatatttgaatccaacaaatgacacctcaaaaacttacccactgttgcagtctaggactccacttgggagcgggtcccaggacaggcagaaagtaagctggtatctgactgctgtctaaagcaagcaatattaacccagtgtccttaaatacacatatatcatttattttcccagcagccggttcaatgcttgtcataccatctccctggaaatagaagaaaatatcagccaaagtagagaaacacaaaaggaaaacgaagagccaggaaaactaaataaatgaatgaagaatgttagttctattaatctacttcaatgtaacttgacgtagtagaagcatgttcttcaaaagcatcttgaagctttctttgccagttagagtcagactacagacagtataggactaaataatcctaatctggtctttgaggtgggcatgtacccaactaaaacatggactagtttatccagattatcagcttttccctttcagccatctaagaggaatacaaaacctcttattacatggggtaaaaggaaaaagataaaaactacctctcatattattattttttttttaatttagtgctcaaatattaaaatttagttttcgtaaatattttctttttgtaattaaagatataaaatgtgttaatacacattttaccataaaatggattttcttcactgcaatactatatagtccaaatcaagttctagcgatacaccaaaaaatagcatcttagtcaataattcacagtttcaatactcaatagtaaagttagccaatcatctctaaccctgtatgagatatatcaatagtgtttcttcatgccaaagaaatgagaaaataataaagttcattgttctaatctaattaagttatcgctaaagtgccaaactgtcttagaaatattagaatttcaaattaaggtaccgttttagagtcccatattttgacgatatgactatcagtggtgattagctttggttgttcagaaccaagaacttgatgccactgaatactcaatattgggctgtcatacctgcataacaatgacagctgacaagtggtcagtcatggacttttactctgtgtgagagagaaagaaaagacttctataagttaggaaatagacttacatgtgatccttcacatgtaccggctgtgatgaacgcaaatcatagatcagaacctgccatattaatgcatagcaaacttaaactcatagtataatagcatctttcgaaaagagtaaataaacaaatgaaagatatagcaaaaagacgtggattaaattactgtaattcattttaaatcattgtttcaagcatttgaaggggaaacaaaggtagaagggaaaagtttcaagcagcgtttgcaacaagaatagactctacaacaagtgggaaagaaagtggaaagcactgatcacggaacagtcactactcacagaactcaacaattccaattgaatcatatcacttatttcattcttgcaacagcttaaatatatttttgttcattgttacaatctttcccaagtataaatctataatcttgtccaaagaactcctgaaccaatgttacatcaaatttcaccttaaatccataatgaaacataagctatgcctttgatatttactctttctttctttttttttttaattctatttccattctaactactaccaaggcagcaggacatcttctccaaatacatcataatacaagcagttttgaatttgtgactcatcttcaccttttttatattgttttttaataatcttatacagagtagtttgacatatcttcctccctattcattcaaaatagataacgtgccaagagcaattaccttaactctaagctttgagcacaccattaaatataaaataaatgaataaataaataaaatatcttatctacgagcatttttttaatattttgattttttttaacaatctttactacagaaaaaaatgcagtttggcttgggaatatttcaagtactttgggttgtttcagctttcttttcgttgcgactttctctctattatgggaaaaagaaattggatgtatgctttactctattttctaataataataaaaagaaaatcataacgttcataacacatgcatactctaaagtaggagatgttatgtagtgtaatccagactccagagaagggaatgctagactatgtaaaaacaagtccctccacaattttgtttttactattcactttattttgatatatatttggacatctaaagtctacaatgtttattatgcacaccatacctttccaccgctacttccaaccgccatttggaaatccgcgtctccatcaaactctaatgcagtgacctcctataaaataagaaaatgcagcaggacattcatgttaccatccaaatatacacacatacaaatgagagagagagagagagagagagagagagagagaagagtagtaaacacagtaggaaataatagtaaa

SEQ ID NO: 299969 - DNA, 1276 bp, Cannabis indica
tatattgacatatatgtatatgagtttaatttatatataaatggagatggaaatagattattattggagattaagaaataatagttctttttttaattttttttctatgaaatattaaataatttttagattggatttaaactgttatacggaacggattagatccaaaatatgaaatctgcacttagtacggattggatgttgtttaaccgaagaagtgtggattggattggatggacaccctactatataatcttgtcttttcatgttcttttttcgttttttcatttttttttcttttttccatttttggctgttgtggttcttcattctctattatcgttggtattgtgcttaagtatatatatttcttttcttctggtcttattctgtcgtgggtttttgtggttatttatggaatcatggccgtaaggtttttttagattgtgagattgttcacggtttagttttttaacgctaaatatttttaattattattttacttacacttaatcttctaattttaaattttagtagtaaaacctttcaaattaaaacaaattattaacaaatttaatttgttatttatttttcagagttaactgttaactaagattgcttaggtgtacacgtaataatattatttaaaaattataatatttttttattttttaaatattttatttttataattttatttgatttcaaaataaattttgaaataatttttaaataataatattaggtataccaatataaacatatcacatgtataagaatatatacataaacagtctaagatagcggttaacttgataacaccttaaatttattaacaatttagtagtttggagagttttactgttaaaattttagtttaaaaaattgagtgtaagtgaaacgatagttagaagcatttagccgttaaaattgtttataattttttatatatgtttatagatgcatttttgttcgagtggtgtttttatttgtgtgtgcacttcgttggtttgtatttttgaatcactatttacatgtatttttgtgtttttgatttttaattttgtattttttagctgatttagtttagtttagtaattggtttcgttatcattgttattatttttttttttttggtattttagtttgtcttaagtaatgtattttattagggaaacttacaaaaatactggaatttgggttaacttttacaaaaatactgtcacacgaattttttttcaaaaatactgtgtttttataaaactaccagtaaaac

SEQ ID NO: 299970 - DNA, 3358 bp, Cannabis indica
ctttccttttatttaggataaaattctagttataataattaaaaaagaaaaactacttttttttccctgaacttgatttcttcccaattaaattttttttcattaattctcttaaatatatataaataaaaaaaacattttctttctaatttttaatgtactctttcttttgcggtatttgttttattaatttcttcccaattaaaaaccatttttcattaattctactactaagcatttttttcagatctactactaatgtatgcccaaccataagagccacacattaatataaaaaagagcaaaacaaattcagtaaccaaagtaaaaaaataaaacaaaaacaaaagaaaaaaaagcaagcagatagatcaaaatatttgataattcatctaaaagagcttttaaattttaagaaaaaaaaagaagccaaaatattacttctccaaaacaatcctctggaaaataaaaaactcaccaccaaagtcggtagcagcaattaaaaacgttccagaaccaaaaaaaaaaaacactacttatatttaataataacgaaaaacttaataaaaactctaaaaatcataaggttaaatcagagcttagtcgacttcctccatcttgctgccctcagcatcagcttcagcatcctcaagtggtggcatttcagcatcggtctcgacagcgtcctcgtcgatgctcaaaccgagcttaagcatcctgtggattctgtttccgaaggtgttcgggtcatcgagactgaacccggaagtgaggagtgaggtctcgaagaggaggagcacaaggtccttgacagacttgtcgttcttgtcgacatcggctctcttccttagctcgtccatgattgggttttcggggttgatctccattgtcttcttgcttgacatgtatccagccatgctgttgtctctcaatgcttgagctttcatgatcctttccatgttggcggtccagccatactcgccggtaactaaacagcatggggagtccaccacacggtcggagacaacaaccttttcaactctgtcacccaatacatccttgatgaccttgcataagccttcgaatttctccttcaattcttccttctttgctttctcgtcctcgttctcttcgagtttcaaaccctcctttgttgctgagactagcttcttgccctcgaattccttgagctgaccgactgcgtactcgtcaatggcatcaaccatgtaaagaacttcgtatcccttcttcttcaacttctcgaggaatggggagttttcgacggccttcttgctctcaccggtgatgtagtagatgtcgctctggccttccttcattctggtcacgtagtccttgaggctggtcaactcatcaccactcttggttgagtggtatctcaacaactcggcgagcttggtcttgttctgagaatcctcgtggataccgagcttgaggttcttggagaatgactcgtagaacttgttgtagtcttccttgttctcagcaatctcgaagaacatatcgatacatttcttcaccaaattcttacggataaccttcaagatcttgttctgttgcaacatttctcttgaaatgttcaaaggaagatcctcggaatcaacaatacccttaacgaagctgagatactcaggaatgatctcctcacagttgtccatgatgaaaactcttcggacgtaaagcttgatgttgttgggtttcttcctggtgtcgaaaagatcgaaaggtgctctcttgggaacaaagaggacagctttgaattccaattgaccttcaactgagaaatgcttcacagaaagatgctcctcccaatcattagtcaaactcttgtagaaagcagcatactcttccttggtaatttcctcaggcttcctcatccagattggcttttgcttgttaaccaacgaccattcatgtgaaacttccttgatcttcttcttcttcttctcttccttttctttctcctcatcaacatcctcaacctttccttcctcatccttcttgtcctcctcatcttcatcatcagaaatttccttctcagtggttttctcaacccatagagaaattgggtaactgatgaactcagaatgcttcttgatcaaatccttcaacctacgttcctccaaatactcaagctgatcttccttaaggtgaagagtgatcttagtacctctaccaagaacttcaccggaagtatctctggtaacagtgaatgatccaccggcttgtgattcccacacgtactgttcatcatcattgtgcttggtggtcacaataaccttctcggcaacaaggtaagctgagtaaaacccaacaccgaattgtccaatcatactaacatcagcaccagctgccaatgcctccatgaactccttggttccagatcttgcgatcgttccaagattgttaaccaagtctacacaaaaaacacaatccaaagttaaacaacaattacagatcaaacagtacttttcaccaaacacaattcaaagtaataatacataccagccttagtcattccaataccactgtcaatgattgacaaggtgttgttagtcttgtcaggcacgatatggataaagagctctggttgaccatctagcttgctcttatcagtcaaactctcgaaacggatcttgtcaagagcctgtaattacacacatccaaaatcaatcttcattttttcttcctaataatattcaaattcaatatattcaaagccgttcagacactaagttttcttctctaacatgttcaaaccataattatcattattttcctaacctacaaatactaaaacaaccaatccacgatcaaactaacctaatctatatatacacacacacgcatgtatgaaaaattcttttaccgagttcttaaactaattatcatcattttccataatcaaactatcctaatatatacaaacacatcaaaaacatattcaacaacagcaaaacaacctaatacacaatctgatcatacaaaaacagataaaaatagagaaagaaaatacatacatcggaagcattgctgacgagctcacgaagaaagatctccttgttgctgtagaaagtgttgatgatcaaactgagaagctggttgatctcagcctggaaagcaaaggtctcggtatcccccatagtagctgaacctaaacctctgtgagaaaaagcttagatctagggttttggaaaatggagacgaagactgaactatgcaataagagagagagagagatagacgaggagtgaaggaagcgaagtatatataagagaagattgttagggtttctagatccttctataactaattttaaattaaattgctttatatatat

SEQ ID NO: 299971 - DNA, 1623 bp, Cannabis indica
ttattattaataataataaagaaattttaaggttttttaatatatcgttccgtacttttcgggtttgtcgtgtgtcgtgctttttaggctaattaatttgtgcttatgtgtcgtgtcttttgtgctccttgtcccgtatcgtacttaaagacatatttttcatgtcatgtcgtgccaatttgtagcatcgtgctgtgtcgtgcccaatcccgtatttcttcgtgtcgatttcgtgtcgtgtcaaaatgccctacccgtatttacagcatttcagtatctctctatattagactacctttgctaagagcctctttctaattatattctataaaaacaagcacatcatcccttactttatgtttttgactccaaattaacatttcaagagataaaggatccagtggtcctaattaaaagatatcataagttgctaaccaaataccttgccaacttcacatgatcaaaggatcttcattagtggttgtggtccaaagcttaataataatcctaataataatacattgttacttattagagatagactactagattgcataaatatatatatatatatatatatatatatatttgtacacatagttaattaaattatagtataatgaaataatacaaaataaaattcttggagactttcaggagtggagcctgagctccaactggcagctaatttttagtatttagattcaaattataattcaaacaactacttctcctttctgattagcacaaatccttctacatgcataaaatatcatgatttatatacattaatatttctaattattattagggtggaaatgtttttttttacaaagtaggaatgtgggtaaggaaagaggtaataaaaacaaagagaaagatagtacgtagtagctcactagtttgtcctagtgatttgtctgtatatgaagcaagatattttccaataatcaactgctgccagtaaaaaatgaaagggaaatttagatcagcttttggggttttagagaaaattatctatatttatataatgtacaatatgtatggcgtttattagttgtattacatgagttcttagtggaatgcctaggtaattttgtgaaagaaaacaacaacaaagccattatgtctttacatgagccaatctttggttcttacacccacatggctttggataaggaatatgcaactatgcaaaagggaaaaatcttgcttggtgagctaaaaggcaacacataataaacaaagttagcatatatttataagattattaattgtgccaacctcttccaaccaaaagactaggggaagagatgtggggtctcacatacaaattattttatacatcgtaataaaataaataaataaataaacagttttccttttttttggcctttgaaatctattgactcttcttgagtattcccaaagtcattgctggtgtacttgctcacttacacatgaaccattattactcttgtgaagaaacacatggacctttatgattaggccatatattataagagagaatagtggatttgttgttgcttcccttccttcattatatataactatatgtacatgtatatatatatatatatatatatatatactaccacgatg

SEQ ID NO: 299972 - DNA, 3458 bp, Cannabis indica
agagagagagagaaagctgagactacatagtcattggggatctcagatttagggatttcgagggttggggttctcaaatttaggaccatcagatcctttccccgtcaatctcagggttttggggttctaggttggggcttgtggtcgattggggttggggctaactgtcgatcgactgagagggtttgaggctcgaggttcttagatcatgttttagggagtaggaaaaagaaatgtaaaggaaaggaaaaggaaaaaaaaataaagatatttaattttgtaattattttttttttaaattgttatttttatttttgtattatttttataatatttaaattattaaaatgatgtggactaatgaaaatatgtcacgtgtatattggcctacacatcaattgtacaaggtagcatttaacacctattcactaacaaaatagtaaaactcacaatgaaaataaaatttaacaggtttcgcccttaaaaaattaattcatgggattaagtgtaataaaatgcaaaatcaaataatttcaccactgatatccctaaataaaataattaaaaaataacatctctaacaaattgaaatttaatagtaactgtcattcatccataataattatcattgtttccttttcaaaaccctagtttgctcagttactaatgtaaaacaaattctcattaacctatgatatcaaaattcattattaaaccccttcaaaataataataataacaataattcaaaataaaaataataagttattagtacaacaaaatgattaacaaagatgctttcatacaaaaattacactttaaatatccttaaaattttaaatgatgattcaaacacattatgtcagtattgagctacgttatggaactaccaatagtgtacacctaaaatctagcaggtctagccactcgcatcttcaaccccattcacctttgaagattcctcttttattctccagattgcttccacttcatcagtcctaaatcgctgagtaaatgttgattcctccagtggggttgatgcgccatgagcataagccagaagaccagtgtaagcaatcattgctccattatcaatgcaatacctatcatcagtagcaaacaactttccaccgcgctctgagcacattattctcatcatttcctgcaatctttcattgcagcctacaccgccaacaataagaacatcttttgtgtcacagtgagccattgcccgctcagtgatctccacgagcattgcaaatagtgtttcctgcaacatatcataactttgtgtataaaagtaataggacaatctagtaacggtttcgtttaacttagattttggtgtgcattagaatatttttcaagtggaattctttactaatatagcatttttgtattgttaagtgcttgctaatataagtaatcattgcgaaaagacatatggaaggctcacctgcaaagagtagcacaaatctgcaggggtgcactcgttgtttttcagtttctcctcagcagttgcttcaataaagcttaaaatcccactaaaagaaacatccattcctttgacaacatagggaaggtctataaattgttctcctttctttgcaagctagatgagaaaaataaaacaaatgcatgtactacagtcaagaaaacactttctgacacagtacataagccaacacaaacaataagctaatttagtagacaggacctgtttggaaactaccaataccgattaaaaaactacgatatttatacgatcttcactcatccactcattactgatgataccatgttaccacaaacaataaggaaagcacacacacacaacacacttacatatacataaacatcatgaaatgtcttcaaataataccatgttaaacacagcgaaagaggaaaaagtaaaaacagatatctatcacgttatgttcctcacgtaagtttgaactcattaacgtacctgctcaatgttgtatccaggacttggatcattagagagagttaaaaccctagcaaagcgatccaagcaattcccaacagcaatatcaatagtctctccaaagattcgataccgaccttcactatatgcaattacttgtgtattcccaccactaacatataagactacaggatcatctgccccagtcacaatccttcccatctcaatatgagcaacacagtgattaacagcaacaatgggcttcttccacaattgtgaaagaacccgaacaacaattgcagaaacttgcagtggtgctcccatgccaggacccttggtatagcagagacaatcaatgtcatctggggttatttcagcagttttcaaagcagacttgataagcggaagaacatgctggagatgatgttgggcagtctctcgaggaaggaatccgtggccaggtggggtaatgtaagtgtggcgaggatttgatagaatggttccatctaaggttacaactccaacaccaatcttgttggcggaaccctcaaaaccaagggccatcattttcttcatttttcacaaagactatatggcaaaggcaaaccctattattcaaaatcataacattcaatttgactacatgaggaaaacaagaaatcaaataaaagtcaaacctcataacatatcacttcccaattcccatgctagcttttggaaaataatccataagaaatctaaggctttataatttcaaacaaagactatttttgtcttatttatttcttatacttctgtgattacagattggtgcggtttaaataagaaaaacaaaagcagacataattcataagctaaatttatggaatcataagcataataataaagtcaagtattgtcattagaacattattacaaacacatggtgggcagagagagagcaggactgccataaaaataaaaacaaaatcgcccaagtcactgagaatcgaattagaaaatatgaaatgcgaaagttgcttaaagctagcgttttggtacccatatcatatgcagagattttgttttggaaagatttttgcaaggttagcatcagtaattggtagttaaagtagacgattttactaacctcaatgtggcgggggaagggagcagccgcacttgggagttagactgatagaggctcaagaaagtgttttttcttattttgctagaagaggctcaagaaattgttagggggagaaatagcatgtttaaaagggtatttttcaacatttaacccttctttttttatttattgccttatctcctagtttatcggaaatgtactttttggtttctacattaattttaatggaatatagttaattttataatattataatatatttaaaaataaaaattatatagatattttatataaaaatatttaatttttatttaaaatacttaaaatattataaatctttttaatcatatttttaaatttattaatttaactttgaattaaa

SEQ ID NO: 299973 - DNA, 3555 bp, Cannabis indica
cattaaaatattgtccttctaccagcattttccattagtttgaccaaaaacatcgaaaaaagaaagaaaagaaaaagagattaaaatacaaatcatcaactgaaaccaaacaaacaagatacacctaatcgataacaaaaagaaaagacatttcttacttcagtaaccaaacagagcaaatgcacaggatgaagatgatcagaccctagagagagaaagagacgcgaaagatgtattatctcatatagcatatatgttgcatgtatgtatgtacctgaaaagtccgaaattttgctggaaagggataacccaaaagtaggacaaaaatacatgctttttccatacactgcgtctacgtgggttaactcaggtgcttgaggtttatgctagcccgccacgtggcagtcccatgatgtcaactggtctcgtcacatatacgctcttcgtcgccataattaagatttttgacttaaattttgacaaacttttaaagctcgttaaaaatgtccttaaactattgacaagtggatataaggaaatcgagaaaaaaaaaatattattaatgatagctttcaagcaatattcaaattcacctttgcttatcaattgttcttggacaaagttgtcatagaaatcttgaaacagagttgcatagtacgtttgatttactgaagacgaagaagatatggcagtggaagaggctattgtttcgtttgtgattgaaaggctcagtgacttgttacttaatgaagccaagttcttgcatggagtcaaaagccaagtagagaatgcaaagatcaagctccaatgtatgagggctttcataaaagatgcagatgcttatgtaagaaatggtgatgagagagttcgcatattggttgtccaggtcagagaaaattcttatgccttggaggatgttattgaaacttactccttaaaagtggctttgaaaaagaacagaggtgtcataagtgtactgaaaaggtttgttagcatcttcaaggaaggagttgatgtgcatagagttggagcaaggatagaggagatctcatccaacattgatacatggacttcagaacttcaaaaatatggagtacagaaatcagtggaaaaggcagcagaaacttgttcaagccaaatccaagagcgtagtgagttgaggcgaacttattctcattttggggggaatgatgttgttggattcagcaaagacatcaaagaattggttgcccatttgacagcaaataaagagaataatcatactctagattggcatagggtgatctctgtatgtgggatgggtggattggggaagactacccttgcaagaaaggtttatcaccatcctactgtcagaaatcactttgattgctttgcttgggtctcaatatctcaacaatgtgtagtgcgacaagtatgggaaggaatcttatttggcttgagttctcccacacaggaaaaacggaaggaaatcaaaaacatggtcgatagtgaaatagccaaagagctttacaaccttcagaagcagagaaaatgtttggtgctcctcgacgacatttggaggacttcaacttgggatcgtctaaaagctgcattcccattcactccccatgacgaaaccgacagcaagattttcctaacaactcgaataaagaatgtagctttgcatgcggataaaaatggattcatccatgaacctcagtgtctcaacgagaatgaaagttgggagctgtttcagaacaaatcttcatgttttgtgaagaaactaacaagtaatacatttcaatctcaatttattatataactgagaatattctttattcttactgtagttttatttatcatattactttaattgtttttgtgtgtattatcagactccaaagacaatgaaagaatgaaaaaacttgggagagagatgcttagacactgttctggtttgccattagccatcattgtgctcagtggtcttctatctacaaaacaaacagttaatgagtgggaggagatgaaagaaaatacataattaaatctgaataccatggtgtttcatgggtgttaggtttgagttatgacgagttgccatcttacttaaagtcatgtttcctatacttggctcgttaccctgaagatgtcacaatacaagtaaaagaattatgccatatgctcacagcagaaggtttgatattgggaaagttcaacagaaactatcgaggatgtggcatatgattgcttaactgagtttgtgaaaaggagcatggttcaggtaaaagattatggtttaacaggaagaatgaaaacgtttatcattcatgatctcatgagatcgagacttgtgcttgtctaaagctgaagatgaaaactttatgaagttcattgacttgagggaaacagagaagaagaagaagccattatattatgcatctacaaatgtacgaagggttgccattcatctgtgcaatgatggtactaatgatgtttttcgttttgttagtactataaatgaatctcttagatgtcttatagtagataccaggaaccatcaccccggaaaacatgaactgagacttgtgtttaatcgctttctcatgcttagagttttcaaacttcatggctcttatcatagaattaaccttggcatcagattgcctaatgaaattggaaagcttattcacctaaggttgttaagtattgatggtggtatttcattggaaaatttcccatcttccattggcaatttgagatatctgcagactttaaaggtacacagttcatatggcatacttataccaaatgtattgtggatgttgaaacaactaaggtatttatacttgccctatttgtgtcgcaaaacttttagtagagggatgaagttatctaatgttggaaatcttcaaacatttgtaggtgctccaatcacttaccttgctaggagtgattttctgcagttaacaaatctcaagaaattaaagattcggggagaatttaccatgatcccccaaatgtcacattcaatcgccttttgtctttacaagtgtatcctaatggtaatgaaatctggcacgaaatgacagatattgttcctatcatattaacctatcctcgaatttacaagaagcaagccagttctctccaaaccttatcaagttaggcttgagtaaatgtggtcttgagaatgatccaatggcaacactagaaaagctatcgtgtttaagagtcctcacaattggtatgagtagctttaaggggcatgagatggtgtgctcagaaggaggtttccctcaattggaatctctcaagattaaatgtgtatttgacttaaaagagtggaaggttgaggaaggagctttgtctagtcttcattacttggagattaaccattgttgtagattgaagatgttagactttttatttgggcttacattaaattttattggttttattaaaacttgggttgattggatagttctttgctgtattagcccatgttgttggtgatcaattgttaatgggcttagcatctgtgagtaaagtctaggtgaagcagaagtgtgg

SEQ ID NO: 299974 - DNA, 3266 bp, Cannabis indica
tttgagatttttcgagtaatggattttgtgtacttgcaggtgagggttgtgatcaagggtcgtgttcagggagttttttacaggaactggactattgaaaatgcaaaccagttgggtttgaagggttgggttcggaataggagagatgggtccgtggaagctcttttttctgggaaccctgactcggtccaagagatggaacagaggtgtcgccggggccctccatcggcggtggttactggattagaggtgtctcctagcactgatgaccctggcactggcttccagcgcaagcccacggtttgatatgatcaaattactataatgaaaattataacttttgtaataaaattaacatggtataagaacttggttactgtatttactgagaatcttgatgacagtaaaatctgtgcttgtcattgccaattgtacttttctgtactgatatgaaatgtttactatctttgtcatgattttatgaaatgcaagaaagttttctgctttggaataagaaacctatgcatgtgatcttaaggaaaatttataacaattgcatctattttatgacaaaaaaaaaaagaaaacgaaaagcacaatgtctattcaaggcagccccactgtcacaaatactacaacacaaaacagaagtttttttatttttgtaggactaagtcccattctttggtctatcaagatctggtggtagatggttataaaatgggacttaccatgaaaatttattgttgaaaatactaattttaagatatgagaattttaatggctgtaaaatctgtgtttgtcattgccaaatgccaattgtacttttctgtactgatatgaaatatttaccatcctgtgttcttggcttttgaaatacaaggaagttttctgctttggagattacattcacatagatttggattaagaagaaacatatgcatgtgatctgaaggacgatgttagcagaaatatttgaaagggctaaaagtctcattctttgaaacttcatatgtgtggttgattaaagatcaggtgaattatggtaagaaaaaaaaatggaacctatcgttgaaaatataaatttttaagatatggggactttgttatgtggacacttgaaatgtgattctttgacacaaggcacttataacagccacatgactgacattaccatctacagctagattagaccgtgtaatgagatatgaaataggtgcaaggaaacaactttttcactggcaatgtttatttaaacccgttattgcaagtaaaggaaattgtacatcaaaaccaaccagcctagaattcgactcaggttgagttaaattgattattaacgaaacaccacaataccacatggaaaatggccctacctcatcttccttttaggaataggatcacatctccaatctgttttcatgtactaagctctttctatatataccttatacaaatgttctattcttctagccgaaagccaaaagttcaacaacaaaaaataaaaatatcgtttcatttttcattttggtgtccattttgagcatggcaaaggctataaaccataggggaacaaggaggggaagccttggaattcttaggtctatagtgggaaagcttcagtcaagtcttttgtccagaggagtgaaacaaggccattttgttgtaatagctacagaaggtcggaagccaaagaggtttgttgttgaacttggttatctcaataatcccgagttcttgaagttgctaaagcaagccgaagaagagttcgggttttcgcatgagggagctctagccattccttgtagaccggatgacttgcaaagaatcctggaaatgagaaagctctgaaaaagagtgtcgttttactacttgctagccagctagaataaaataaggaagagaatatgtaatgcaaaaaacaattgcaagaatgaaaagtactgcattgcaatgttcatgctcttattttactatatttatatacatgtgtttgtgtgcatgtttttgtctctggtgctgttgttcactgacatctttaaacttcggccaaatcttatggcctcacaaatgaaaacttacaagaattatataatctgcaaatataccaagtggcattactgatgttaaaaatgtaagaagaatgtgtggcagtgtaaaaaatagatagaattttgaacagaacattatgttgatctttcatcaaatatctttagaaatcactggcagtaaattttttcattgtcaaatgagatattagcagatcaaaagtagctcaatcttcctagacaaatgaccactggaatttggagttgggagatgggcaaagctaatgagccatcaatattaatggtttctagtccctatcaccacagaggtagataagggaaaatttcaaaagcgcagctaacgatgaaataatgcagcacgtgaaaatgcctcccatctaaaatctcatactcgtgatgtcatcatgcaaatcattgaaaaaaaaagaacaatacttctttttgtgttttatatttaaattagtaaatattgaatattacttcacaaattcattctgttagaagagacagcatatgcaacatttaacccttgttagaagtacaacatttatttatggttagccaaaactataccatttcttaatttagacttgagcattaaacatatggcctcttgagtcaacatgttaccaagtttaagaaaaggattgtccccacttggtagccaagaacattaatgtctcttattatttcttacttagaagttattaaactggaacaatttgattgaccatgtacatgagacttgactaaaatcttaatgaccgactatagattgactaatcaaacatgactctcaaactagaaaaacaaaaaaaaaaaacttgatgattagtaaagagtaataagaggttgttgtctctagttatagtactctgtttttttaccaacggatctactaaaactacaaaacaattaaccaaatgaaattttccccacttctcaccgacattgtaagaaatcctagttagtcaaacgagagaaccgtcaattataaatgtacacaagctaagtcctacataccaattctgacactgttcccctttaccggtcaccattcaccaagtgccgcaactaatgactttagtggaactccatgtacaaaatggttaaaaaaaaaaaaacaagttcgtttggtacgccgtattacaccgtattgtattgtattatattcaattatattttatacaatatttt

SEQ ID NO: 299975 - DNA, 5262 bp, Cannabis indica
gaagaaaaagaaaagaaaagagaagcataattatgaccatttaattaatatattacaattttttttttatctttgataacacacttaatctaaattaaacctttagatgttgtaaaagccgagcatatgtcctgcatttgtaccgcagatcagcatgatcaggccttttcaattgtcccctctgtaatacaataaaataaaaatatcacgatgattctagtctcaaatgttacactttaaatcaatattaaggaacaaaagtcttagcattacctgtgaaaagtaactcttgtcacttatcatgaaatcaactaaactggcaaagtaatttcgcaaaaactcagaagctcttctaacaaatgtagttttcaatttctcaagttcagctcgcttctctctgacctgcaaatcaactagttattactaaaataatgaaacttcagaagcacaataataagaatctactactaatttgcttaaatgagtaggtacaccacaaaaattacacacattaatgcgtacttaattttagtcacaaatatattcaagtggaaccacatcattctgaattacgtgatcggaattaattatgcctcagtgtgggtaatttttgcgtatctctagcaatacttgtgtgttaaatcactccaatcatcatatcatacttttgcacataatgtaagctcaaatttaaaccctaaagtttgtgcataacagactatctgtctgtcatacaacccatgaaataaatctcaccagaaactaggccactttctattaggaatccgaagcatgcattttaacaaatccatctctacattatccaaataaacattatcaactgaaagaaataagagacaattaaaaactacatacagctcgcatgttcgcatatgtaggatccaaatgaggtacttcaagaccacgtaaagcaccagccagccattcacaggcttctacgttctgaatcatacgagcctcatcaaataaacctcctgttaagcacgctgcatactacaatccatgaaatgtcattagagaaaaacttgggccagatacataacaagtattcaaatgtgcaatgaaggtgatggtctgcatacctcagaaggaacacgcaagcgctcaagaagcttatctaactcctcaatgagtgctttattatttacagattgcatctctaacttgttattgcgagtttctatctgaataccaagggaattttagaggataagatttttgtaaaggggaaaaatggttacatttacattcatgtattacagaagcattttaacaaaagaataaaagtaagaaatagcaatcaaaagaatgtagagcaaagaagacataagaatgaatatccagatccttctagcataaaaaaatgtaaaataagaattacaaggatacaaagaaacaaatagcaaggcgtatacagaatttgatcccctgcagaactatatataaaacaatgacaaacaaagttgcaagaaaataacatagctgccatcaggagaagatgctaaaccacacacacagtagataaatgacatgcaaagtaaacattaggagcaaacaaaattgaaaagtgaaacattaacccaggtaaacacaaatacacaattgtccaccaggcagggaacacagaaataaaatgcaatcaattgcatctagatctccctaccgattcaatgtcttctctcatgtgtctaagcttcaagttaaagatgcctaaccactcatccatatcgtcaacacagcttgaagctgcctcaagcccttgtaatacctgccaaccaaaattcaaccaagtaaagaaggtgaaacaatatagtccacagaaggtacttgcacgggacataattattacaccaagaccactaatctaccgcaaatgaacaattactgaaaaatttaacattcaagaatcaaataaatatctagcagggcagctgatgcagatctcagcaaagcaaagtcagtagtacctcaaatggaatcataaaaataaagttaaaaataagaataaaaatgacaggtgttttaaaggtcatttgattcccgtgttttatcaaaatacaaatttggtgagtttggtcatattgatcaaatttgagtccaaattacaggtaacatataagtattattgaaaatatacagtaccaagcctgtatttggataaagcatggtaccaaatgagtatttacccataatctgaaaaaatagataaatgggacgaacacatacaatgaggaacagggttaaacctttctgtagcaataacatggatgccatttctaccaaaaattgtcaataataatattctacacaaattactgaacatgagcataagagtaacaaaaactaaacagaaaatcacctcatcaatcaaaggttcactttctagaatggcatgcacatttgctgcttccaaagcatgaagctctctcttcaacctttctgagaatgcctctgcttcaccaatacccataacgtaactgcataatgtgccgtgataatatatggatgatcatgatattttgaacaatttaaaaaaaaaaaatcgattattgcttcttcttattatctaacataactagatattcaaatggctatgagacagaaaatgatacatacgtgcccaaaagagcttccatgtcctcttcttcaacttgggaaacaagctctttctcaactgtcactttcaaatcgctttcagttactgttgctggaactggaccatcttgtacagacctttgatttgtgacagttggcttattttcctggtcagatttcaagtcaaatagtttaatcatgtaccaaatcttttagtgaggatgaatataagcttcaagatacatattaccttaaacacagaataatagaaaaaaaataataatattaataaagtgatgatataatggtaaaagtatttatatatatgtatgtatgtgtagatcagtaaccttagcccaaagagccatctctacaacatctataccaacaactttgggaagacgacctagcacatctttgcatatgtttagaatgcacaaaagaaggcgattcctacaatgaagaacttcgtcaaatattttataatcagttactgaatggaaatatgtattgactatatttatatatattaagaaagagggaaattctataatagaaagtatgatattcccactaatatcacctgtcatcgatgttgcgcatggtccactgaggtggagcaacactctggcttctgaggttgtcaaatccctacgaaatattcattgataagccaagatagtttgccaccaggcagtggttcaaccatcaaaaaaaaaattgaatttatagaatttggttgatagagcattaccagtgtaaaagtacaccctgtgggatcatttgttataacctccacctttgaaagatgttttagtttgtacaactttgcaggctgtgagtgacagtaatttcaacaacttaaaagagacataggtaataattggtgcaaccttaaggaaaaaatttaacttaaaaacaaatagtctatataggagttcttatacaagaggaactattcattgtctgcaagcagattccttctatttgctgtatgtgttttatgtttgtggcgatggaattaaaaaaatttgcatatgtcaataaaattctccccttaaaaaaaaatgcatgaattgttaaacacatttggtagtctgtactaaccctgaccgacacaactgtaaatttatttcttcacaacatttccacatccagacctcctcgctaatatctcatttgtgtgcaaaaatagagatattcattttgaaattttagagtaataaaattagggaacaaactaacaaagctggaaaattgtttaaaattaaaagagcgtaagtgtaatacttttatcatttattaattcaaaatatgaaaaagaaaaaattacctcaagtactccccctgtagaatattttagaactcgaagaaaagctttggtctgttgaccttttgattttgctgcacaaatcacacaactaattatgcagataaacctaaaagggaactgttttaatttcccaccctacaaaattgccgtgctagccgtcaagagagcagaaatgaacaaacccattggaacatttcacactaaaaaacaagtaacagagtttaaaaggttataccatatcgaaaacagagcacacttcaaggcattggaagtgaattttcaacaaaatgattatcaaaatattgctctaaaattttaggtgcttagtgtgaggtagatgataaatcttgcatctctaaacaaaacttattcagtcaagaaaagaccctctctttcatcaaatacaacctcctaacagctatatttagaactggcaacaaatatctgtactaatatatcagctacattctacattgtatcaaataatttggcaaacccttacaaaaacacgaagaaattaaaagtaagtgtcgaatagaaatgggcagtaaacgcatcttagaagctccatatcgtgaattacaaacacttacactgacagaaattaaacttgacattataatgaactgtaaggaaaaatgaaaagagtagaaaacagtgatagaattacgtactggaaagcgcgagaaccctaggtttggccatgtgacggccaagctttccggatttaccccagacccctcgacccttgacaacacggatcgacatgacgagactttgcttggtgtcctcaattgcggcctcacaagctcgcctgagctcatcgtcatctgcgctcgatttcgccattgttgtcggtggtccccgcagttagatctggaattggattggatggagtccctccagaaagatttgttgtgaagatgaataagaacaaggaggacagggagaccacagcagaggatcaaaaatgattatgagatgagaacaaagagaaacgactcacgactgataaaaacaaaacagataacggcttcagttcatatattttttgttgagtaacttctttcatgatcctacttactgtattattatttactatggtgatttggtttgtaaatgcagtgtggttaatttgactatctaataattacctcaaagaggttgcttatgagttttcaagttggagcactagttttttttgttgggattaagatttaagagttgattacttgagtgtgaatttgtaagatctttaattttcagataatttataagttatcctataaaaatttttaggaaaaattctacaa

SEQ ID NO: 299976 - DNA, 2078 bp, Cannabis indica
aatcacgtaatacgcctatgctagttagggtgttacacttttaatcctgattaacttagtggctagaaaaattataatgtacagaagagagttctctcaagttcagattcagaacttgtaatgctgagagagaaacttgtaatgggagctcgagtgtgaaagatcattctgatgtgaatgtgtaacacatttttatcatagtgaattcgactcaaggcactaccttggccttggagttagaccagtcacatcgactcatatttgaaccaagtaatatgtttgtatctccatttgattttacttttcttgttcatggtgttttgattatttagtgcttgcattatgttcttctttatgtttgcctattcaagttattttgctactggttttgcgtgtgaattacaggctatgaatcctaataaattgatattagcgcagcgatacttgttgcatcaagttacttccattttttccagaaataatgatctccaagactctagaattttgatgttcattcacaatcaagaactagtttattggctaggaacaagttttcatcaaaatgtcaacatcaaaatttgaggtggagatgtttgatgggaaaataatttctgtttacagaaagataagataattgcacatttggggaatcttagactcaaagaacccctagaagaagataacaagatatcgaaaaattggagaggaaggaagaagtgcttaagaaatctaagaacaccattattcttagtttgcgtgatcaagtcttaacgaaattgatcagtgagaatattcacatgaaatgtaggttaaactcgagcaattgtacgtgtcaaagactctgcctaatcgaatctatctgaagcgaaggttccatggattcaagatggacaaatctaaatttatagatgaaaagataaatgagtttacaaaactagtttcaaatatggagtccataaaggtgaagattaaggaagaagattaggaaatcttcttgttgaattctcttccaagcctatgagaatttgagagatacactcaaatataccaaagagattgtctctggaagaagttattggagctgtatactccaaggaaatagatctgaatgccaataaaaaattatccaagaaccatgctgaaggagtaaatgtgagaggcatatcagaaaagaaagataactccaacacatgtagaaaggaaagaggaaaatcaaaatcaaagtgaaggggaatgagagcttactggacctgtaatcaagaaggatattttagaaaagattgtcctcagaggaaaaataataagaaaaaaaccaaatgcaaattccaacactgattctacaaatatttctgattagtttgacaatgctggtgttttaaatataacctatgattatgcatttgcattaacttttctttgacagatcctagagatgaatggatcatggactcaggctgtaattttcacatgtcactaagaataagaaaggattggttttgtgatctgaaagaagaaattgcaagccatgtgatgatatggacatagcaattcttggatgattcaagggattgcatcaatcaagatcaaaataagagattgtacaatgaaggtattaactgatattagatttatacctgacctaaaaagaaattttctttctcttggtttgttaaattcaaaaggatatagctacaaggcggaagatggagttcttgactatatatggtatttctaagagaaaagcataagcaaggtctctacatcctggaaggaaagataatttttggtgaagctggtgtatcgatagcaaggaataatagaactatggtataaaaggctaggacatataagccacaaaggactcatagatctcaacaaacgagatttttggacccaaaagagatcaccgacttggaattttgtgaaacctgtgtgcttggcaaagctcgcagattaaaattctcaagtagcacacatactcccaaggaaactttggagtatgggtgttcatcaaaccgccaaaactgctcaaaccgctcgcaccgcaaaaaaaatgcagtttgaaattctttgcagtg

SEQ ID NO: 299977 - DNA, 2189 bp, Cannabis indica
ttttttaatatatatatataaaatacaaaataataaagtatgaataaaatattaagtaaatattattaaaatattatttagagaataaaacagtaacaatttttgaaattttggctaaaataactcatctaatgtagcttagtttttttttttttattattatttattcacatttctcttaaacataaattttgaagaaaatgcattattgctcatctaatgtgaaagttctaatatgttacgtataaagttgtatatccttaatgtaacattcaaatatttttcttaaaaataaaaatagagaatagagtaaccagggccggccttgaaaatatatggatcaagagtggtatgggatttgaacccatgagcggacattattctattcacctcaaccaactaatctataaatgtttattgcctataatacacttaaattttacttaaaaaaaacctctaatatatggggtttaatttttttttgagatagtattgagtgcattaaatagggtgtcaaaagatgtggaaagtgtttaaaagtactgattatacaaattacaataatcatcaaaatgaggatgaagtacaaataaatgacaataaataaatataaatacatatatgatttttcttttttgctaaacaacccaatttaaatatacatgatggaatttgagtgaggggtttcaatttttttttttaattagacttcttacctgtataaagtcaaacaaaaatgagatatatagcacaaaatatagtgctaattctattaaaggttttaatacatctgtccctagcattttcatgagggtaaaaaggactttttactttaatcattattaatgagtttttaactactaataataactccactagttgtacattttgaaagtgaaaaatacaatctgatgcttagttacaacttagtacagattaggtgttttaatctcaattagaacaacatcatctactaataatttaatgtattttgcatcaagtgaacagacgtggaatatacacaataccttatttagaagataaataatgtacaaatattaatatatatacaataaatagattattttgaggtattattccacaatcaacaatggcattgaaaagtatacatgaacatgaacatgattaattgtaattttctcatcaaggtgaacaatgttgcttttcaagttaaaaatttattgttacttattaggaggtacttaaatttcactatagaaaaagtgagaacaatttcttcatgttttgagaaagcatcattgcacaaataataataataataataataataataataataataataatataactttccgcaatcatgattgttaaaaaattaatgacgacacttacatttttgtttgctaaaaaatggcatggagaatatgatttccaaacattgtaataaatttttaaaaggacatgtgaaacatacttacactatagtgtttattacatgaataaaaataatttttattccattagttttgtggagttttttgaatttttcttccctcgagctaataaattttgtaggggtttttccatttttacaatttaaaatatatatatttttacatttttacggaattccacacagaaattcctaccgcaactaacggagaaacctccacataaaaatcaccgaaaaactattggagcaaaacccaaaccgtattttttttaaaaaaaaagtttaaaaataatatatataaggtaattctctaattttttataacaccttgcttatatggctataagttacatgtataattgaattgtggtgacttatttaataactttaagctatctaaaattaaatttattgacattaaacatacaaatagtaattctaagaatatacatatctcataatttattattaaatcactaattattgtattttttttagaaattgagctaaattaacattatattagtactatataaataagttatttaaataaatgattagaatacaactgcaagaaaacatttgcaataatttttataattgaagaaattttttacaacagacgaaaattcaagagaaaaactttacaagaattataactaatgggtgataaatcctattcttattacattctaatagatttttaaaggacatctttgtattctttttaattaataaaaataaaaataaa

SEQ ID NO: 299978 - DNA, 3007 bp, Cannabis indica
taattaataaaggaacacacagtaatgttgtatttagtttatctatattaaacacatggagtagtactgagattccaatgggggatagattttcctagctaaggatatgtaatatatctattaattttaagattatatattaataatgtacgtctttcaaagggtacatatatattaattaattaattttattaataaaattgatacgaaatgtccgactttaactattatgcaggccatttgaggctgcaaagcatatcgcagtaggttgagatcatcagtatatattgaattcaagtagttaagacaaaccacattcttttcatttgttgtcttaattagcaacacaaaatgacaatgtgacattaaactctggcattttgctcaaaagaagtgaacatggtgagctgtagatgatgaataacaaaatcatacctcatatatatatataagatatccccttgtcactttttatttatttaattaatttttagtagtttaattttaagatatagtactatggtgtgtgaaagttggaagtcatattgggagagtagtccagttgtgaagaagctctcttataaaaagtcattttttgggtcatgtctttttcactttcgttttaagtcctaaaatttctgaggtgattccatgtcatatactgcaattcacagttggaatccacatatatatgatcagaacatgactttcttggcaataacctctctctttttttcatgataatattactttctcagtcacctaacacaactacatagtattcattagttttagtggctaataatcttatagcttttcacattatacaagatgggtatgttgctttccgctattatatatcttattaatttgaacataattgtacaattaacatatataatataagataactctcatgaatgacattataaactatatactctgatccgattttatgaatgatccaatgaaaaagacaattaagataaaatcccactttcccctttttaacttttggagaataaatatcattatacacactgctacaattattacacattagttaattattactttgttgccatgaactataatcccccaaatgattggggctcttttggggttgagtagaatgggcctttttttcaataaggaaaaaggctatagagtgaattaattcccccaaatcattcattattacttttattaataaattaatatatatgtgatatatatatataatattgaacacaaattttcttttcaaataatataaaataaactttcaaatctatcaagaacttcgcgattgatacttgtctatcccttagaggctgaagctccattcacgttctttctctctttcggccatttaggactcaatatatatataaataaatatatatatatataaacacatatatatattgattacaaatgatttctctcttactattcatgagacccttctaattgcttgcacatggatattgatgatatcttgagccccacgtcgttgatcttgtatagaagggcatattccccttatcatgagatatttatttatcttattttgcctccctatttttcatctccaatggtttttcttttttaaatattattccatatgtacataatataaatatataaaaatgttagttgaaatgcacattacaaaagacacaatctgaacaagtatcctatctactacttaggcggccatgcatatgtaacaaaaatatattccacaaaacattgtgagtacccattcaaaaatattatgcttatacaacaaaaatgcatctaattaatttcaaatcccatgtatatattgagaaaacacagtagtggaattaatacgcaaaaaataaaaattgccttattaattaaaaattatatcacaatatctatattaaaaaatcattcatcatcatttgggataccatattatatacaatcaaatatttaatgcaattattaatttgaaccttttaatgatcagatatattgtgaactataataattgcttaactttattaattagacaactgatataacatttgattgtcacataaaatgaagttttacacaatctattattaatttgaccattgatggaaaatttgattgtcacataaatgaaagcaatcaatccaatcttaattattattagaccatatattgatataacatttgcctttcaatataaaatgaagcaatttacagtcccatccatagaaaattttatagttactaaacgaagttacaatctattagaccattgacagatttcacataattgaaattttcaatttgcaaattagacaattgatatagacattaattatataatgtcacatataaattaagctctcttcaaattagctataattgcaatattagtggggtcatcaaatcttcaaggagcttcttttttgtcctgagattgtttgaaatcagaatcttaatctaattgggttaaatcggatctttgtgatgatgatcaagtcatctgaaactgaactaactcttatacatctcttattattattattagttttttgtgtcaattaataaatatatgattttcttaaatgatcatttggtggttatgttatacatagaatttagagtcattcagcaataagatttgattagtcatagattgggcgggtaggagatttgtgtgggagaaaaccagccaccattaattttgattaattaaaatatgaccaagaataaaaataccttagcttgactagtataaactttaatatattaagccaaaatttcattttccttttattttttttcttcatgattttgtaaaaatgaaaatgaaaaccatcccctctaatttataatcaacaaccaaattatattcgcagtgtgtatcttgagaagatttttagatgaggggaaatttgataagatgacagaagctacacagttggcatatatttttaatatataaggataaaaacttatatttatctgtaaaaaaaaa

SEQ ID NO: 299979 - DNA, 3036 bp, Cannabis indica
tttatttttgcaccatgcaacaaaactctcagatatatacatacaagtgtgatgagagagttagtgacagaacagtcatgaacacaaaaacagaagtcatctaaatcagtgtgagcaaagctaagcaaagctgaccatattctctcacaaacacaatgttcttctgctcattctcactcttcttcttcctcttctttcttcttcattttctttctcttccttactctgctctatctgtactcctcaacaatctaagccatgcaaacaaacagacacttccaccatccgaagctgaaactctgctcaacatcatggaatcaatgtcttctgaccaatcatggaagacctcttatcctcacccttgtcaacaagactcatcttggcctggtatagaatgcaaacttggaaatgacaatacttttcatgtctcaaggcttgactttggtacttttccttacccaacttgcaagaaaacagcttctttcccttctcaaatctttgctctgccttttctccaatctgttttcttctttgattgtttcactcatacgaaaacaactctatctgttccagaagataataatgtcttcaactcctcacttcaacagctcagtctaaggtccaacccagctttaattggttcaatcccacctcagatttctaaacttaagtccttaaagatcctaactttatcacaaaacaatctctctgggaaaatcccagttgagatttttagcttaacttctttagttcaccttgatttgagctataacttgctcactggttctatcccaaatcaattgggcaatcttaaaagcctagtgggtgttgatttaagctacaataaactttcagggacaatccccaacacaattggccaactgggtcagcttcaaaaacttgatttaagctctaatttgcttactggtggaattcctgatgatattggggaactgagtgtattggtcttcatggctttgagtaacaataaactgaataaacagtttccagaaggaatagaaaagttgcagagtttgcagtacttaattatggatgaaaatcccatgtcagtacaattaccattaggacttggtaagcttgtgaaacttgaagagttaaggcttgctgattctggatattcaggtaccataccagaaactttgtctcagctaaaaagcttaaccactttgtcattaccaaacaaccatttgacaggtcaaatcccagttgggtttagtggtctctcacatatttaccacttgaatctcagtaaaaatctcttaggtggtactgtgcctttcaattcaagttttttaaataggcttggtaaaaacttggaccttagtgggaacccaagtctctgtttgagtccctctgaagcatatagtgtcaaggttggagtagtcaatatatgtggaaaaatgaagaatggatctgccaatgccaatcagccattgatgaactctcatgctttatctcatcaaccattgtttttgcttggtctcttattattgttcatgtaataaattttgttacatagcttaatattctaagttattgtattattagctgtttttttctttatgatgagatgtagatacataagaatccaagaaagaaaattagcaggaaagtaggtataaaatcatttctggtttgtttaaattttcaggctacaattttagtgacattggtgtgattgttttgtcttttgacagtttaattattatgtagtatgactgatatgttttctacgatcaactttcaatatgcaaaagttgtaactggttactatttttggagcactcacatcctttgtctactcaatcttttattataaacctcacttctttttttaattttattttatctaactcattcatattacaccatatatccaatttttttttatatttttattatatattttattcattttaaaaattaaaaaaataaatatattaatattacacacacattccaaaaacatttgaaaaaataatataatatttatagcttaataaatagttcttttgcacgtatagttaaatacttttcataagataaatatttgaatcatgagataaatttttgaattttaatagctcatttgataaaacaatattttttacctcttaactaagagcatttccaacagttttcctatttgatcttttaaaatactttgttaaaacttagttttttataatatttttccttatatcatttaaatattatatcttttacatcacatatattttattaataaaagtaaaaaaaaaaaaatacacaaatgagtaaaaagattaaaaaaacaaaaaagagtagaaaaatataaaatatgtttacctatttactatagctatatctagagaaaagttttttagagattggaaacatcatgtataatagtttaagagatttcaatttaaattttccatttagtatttttgtatcaaagcaaaaatattcacaatcatattcaatatttttggttgaaatggatggagagccttctgcaattatttttcctttgactacttttattatttagagggttccttagttatatatatttattttttaggaacatttaaagttgctttatcagagttatttctctttgcatgttttttaataactcatttttgtccaatcaatagactctgcaaaggaagaggtagtgcaattgctcattgtggagttgggttggggccctgggggaccctagaaagtagaaacgaccatacataaatattttaatcaataaataatgaaaaaaaaaagaaaaataataatgattataataagaagaattttattatatggatgggaaagcaaccacacatcaaattgtgaaagaaaaattaacccaatacaaaatgtacaattaacccattttatgatataaaagatgggccattattcatcaatataagctcataaattttgtttggtgaaatggaaacattttcaatttggtcaaatatttgtccatttgaaattgaaattgaaattaaagagtacctacctgag

SEQ ID NO: 299980 - DNA, 3642 bp, Cannabis indica
gtaaaaatgaaaaagtcccttaaattttttaaaaaatatttcttttcgagactaattatgtgaaaacaactccaaatatcaagatgaatcgtgtcaaaaattgcatatgtaattataattaattttatgagtttttggaaatagaatatataataaattcctcattcatatatcatatacacaccatcatattggaaccatgattaaggaaacaaacaataaccaaattactatataaatttagcaaaaattttgggttaagaaacaattttatttttaaatatttgaatgtatactacatatcttaagtaaagcaaatgtgtaactcagttcgaaaccaatggcaatacaacttaatagctataaatattaacaatttatgagttattcagtgatgttttaccttttttcaatgaatcacagagaatagattcaggcccaatagtatcttaatgtgttgggtctaaaagggtagtttgcatttttacaacttttatactaaaattttgcaaaactaccaccatttaacggttttatattttatggctttttctgacttagaagtttacacttgtgagattttctttcacataattttttttgctagaaaaaagaaaacatgcggtgcagatttcttccccaacccttaagaattttgacaattctagggaccacgtgctagctatagggctcatatacatcttcttgccttaattggatcgtcggttacacatcatgagagttcctatcccaaagattgcctaccacagcaagccagttttcaagggccaagcatgatccactataaaaaatcttacttttagtcataaaaaaacttgtaattgtaaactaaaagtaaaaaagttgtgactaattataaattattattcttacgttatgactaaaaggttcgtggcttaaaatattggttacaaaaatcacaatttgttgttactaaatgtgtatttagttacaatacctgttgtgactaaaattaaattagtgacaacttgtatctaaatactatgttttagtcacaagtaatcttttgttgtgactaaaaatcacatttagttacaaaaaatttatgttgtgactaaaaatgacttttttttgtagtgatccctaacaataaagggtagggtgagagtcgaactcttgacctaagtaaagaaagagcctaataaaaaaatttctaccaacacgtggtttctttcatataattttacttagaaaacaaaatatgccatatttttaatgatctctttcattttgagggtaattgtgtatttttcaaaaaacaaaatatgcttgggtaagagtagtactaaatatggccacaacttatttgtagttccattaattagtattaatttataaaaaaataaaacaaaaaatggattccatgtgcaaaggggccacttaataacttgatcgtgtgccattgatatatatataggtattggataagaaacttcttatttatttatttatttatttggttagctgtgaagaaggtttattatttaatgattcgtatatatataattcgtaccctattaatttcaaaccttatacaactttgttatttattcagaccaccgtgctgtcgagaactataaagaaaaatatagcaataaataaataaataatatgctctaagaataataattatagtattttttttcaattttatatacataactttattatataaaaattattcaaagacattttgtatgtatcgatatatttatttattaatgataggagccactacaataaaatgttggttcgtttaaggcgaccaatgatataattatatgaatatatattttttaattacatactaattatgcattcaagcattaatataagagctatgtaatgtttatagttttataaataataaatagaaaaatagtaagacagatttgtgctgtcctaccttcaaaccaacaaaaattgaacatttgggtactgtctccttctctctttattttctaaataaacttccatatttaaatatattaaatttattagattttagacatgaaatgaacaaatgggatattaaatactattatatattttaaagtgaaaatggagatgaaaacaaacaagagctgtttatgacttggaatgagctgtcatgagtaggaaaattaatttagagtaatttatttgtatgttcaaattgagaattgattaattaattaccatatcttcatacggaaagtatgagttcttaagccattttaattactaattggtcgtattttaaactaaaactattattttggtgtattttatttttatcaatttcgtgtaaaatgtattacttttggtgtaacaactctaatgattcaataccaaatatgatacctaataaaaaattacttaaaagggcatgttgtcaactgcgtgaccggcctcatctgaaatctagcacaccttggaggaactctttggctcgacatcaagaataagaatgatccacttgatgaatcaactccaatcagctaagaaaggctctcttctgatcgatgggtacatgctcaagatgaagaacattgtagatggcccgaaagctgctggaaatgctataactggagatcaaatcatcctctacattcttatgggggtaggacctgagtgcgaagttgttgtcgtcaatctcacttcaagcaatcgtccaccttgtctgaagttcaattcatgcttcaaaatcatgagactcgcattgaggcaactcaaactcacactacaaggacaactagggcaacttttctttctttgaacgataggcatttgtacttgagtaccaggtctatccttccgtgcaactttgcctcgcggatcatcaggcggccttgctctagagctttgtccaccttttttcgcaaaggtcagttggtagtattcgtgttattctgtggagcagttgtagtagtcttttttgtaggttctcttatgacacattttcccttgtcccttgtgggatcagaatttatagggtcttttgggtttgttttctttgtagcattgttttcttgagaggtagggtcatcaggaatatttttgtctggaatcatattttttggtccagcctctagcttgtctaacgtttctcgcatttgacgagaaaagtcctcttgctctgccaatttcctcttagtttcaacgatctcttcaaccatttaatagactgcaagatctggctcattataatattcctcttctttgtcttctccatcatctttaggatcgtcgtcctcaggaatcaggatcgccctctaaatcctttaggtcgtcttcattgatggaattttcattaacatgttttcagtatgttgagtcttcttggtaggatggctggttacttcttgttggagtttgactcaaattatttatttctttattttttatctatatttgtaaaattgtaattgtttttggttattattaattgtgagaaaaggaaattcttggtgatcaagttttgatgagtcttcttaaggaagatttgaaatgtcttggtccccgagttatcttgatgcccaagttttgtaactttataaatatgtgttttgtgtgtgtgtgtgtgtgtgtgtgtgtgtgtgatagagagagagagagaga

SEQ ID NO: 299981 - DNA, 2080 bp, Cannabis indica
aattatgtgacgttaaattttaagtaaattaatactttaaaaatgcttcaataataacagattgagatacaacacacaactagaaacataggcctaatttcctatgccacttatctttgattgaatttaaaggcttcctagtagcagactaagatacactagattgacttaaagaagaaataacagtaaagagctggaaactcttgaggttgaaacatgattgttgtgatattgagcaggtgcttcgttgagtgagggaaatggtagagtccatctctaagcctcccttgaacttgaagaaccaccttatgtgtttctgtccttcacaaaataataattattatctctggttaatttaaaaatactaattaaattcttgatatatttcaagtgcatgaagtatttctttctaaactagggaactgttattgcttataagcaacaaattagatccaacatgagttataacaagtttaaatccatcacctattattagcttttccttatggagatacttagtctttccatcacctattattagcttttccttatggagatacttagtcttttgatgcaaattgttcacattagtagttgtgtgattactattggagattagtagtgcctaatattttttataagtggtaatttataattggttaatgatattttttaagagctatgttttaagttatatagactcgatacttaattacatcaataataattattattattgacctaaataatatagtattgttattggataccagtcgtgtccaacaccttttataggtagctcctcacgattagttagcgatattccctaaaagttatttttttaagttatacttaattacacgaatattagtaataacgagatccgaccatgggtataaatggactaggctcacctagtctaggcaagcccgaccctagattaaggcgggctaagctcgtgcctaaggcccacccaaacctaatactcatagcctcaaaacccaatacatatatataatccatgtatatgaaaaaagaaaattacactacaaaaaaattatacatataaaagagctttttttaaaacttttattaagtagtcgtaggcccattttttctagtgccagcttaagtgtaggggtccaaaaaattatcctcttttcaaaatacacatttttttaattgattttgtaaaatattaattataatatttttttaaataaaagcctaaaaatattttttcaacataacttgtagaattttagggccagaatatgatactaaggaaagtactagacattagaagcggcggaagaaaggggcgcatatggggtcatttgcccccttaattttttattcatacaaattttatatataatgttttaggaattttatattttgactccataaaaataatttttttttctttgttcttacatatttttatatttatccccacaaaatttatatttttttacttttattctcacgtatatttactttaattcttataaaatttgtattttttttaataaatttatattttttattaatacttttaaaataaatatttttaatccccactaaaatattaggctggctcagcacaacaataatatttattgcaaaatgataatatgataaaggcaatgagaagagaagatgatgtaacaaaaacgacaacaatgaatattgattggtcgacctcttctttagtcttctttaccttgccaccaacaacaacaacttcctttcattgtatgaacattgagcatttattatatataaacaacaccgagccgactttacatgtgaacttactagagtagacaacaccagtcggtttgtgttttgctgctgctgccgtcaaacttcgaggtgaaattgaccctgttgttgctgaggcgttgtcaatgaaagagctttgagttgggttaaatcatgttgggaagaaggcaggattgctgagaatttttgttcagcggtgattatggagtcggattgtctcttgttagttaatgctatcaatagcaagagccaagttctttgtcctcttggtcttattattttggattgtatt

SEQ ID NO: 299982 - DNA, 3137 bp, Cannabis indica
aaaagggggatcagatctggagaagattgttgctgatgataaattcttactacttgcaactatgaatcctggtggtgattttggcaagaaggaactgtctccagctcttcgtaatcgttttactgagatatgggttccacctgtttatgacataaatgagcttagaactattgctttgcaaaggtatgcgatactaggttatttttctgagatgttgaggttgcttgttgcttttttattttttcaaatgaatattattttttgtttttaatatcggtttgatcttgtagggtgttaccgaatttctcatgcattgtggatcccatgttgatcttttgggaagtatgttttcttctgaatcttcatttatgcttctttgtttttgaatttcacagaagttttatcgaccagctaattagactttgttgatttatgtctacattggttttgcttatttattcttattattactatttttttagtcttagatgaagtgataatctgtgttttttttcccttctaagttttctcatgaacatgatatgtgcaaaatcatcacttgtactgtgcatttatacacaagttttaattgtagagatctcattttctttttcttaaattgatttgtgatttttatcaatattgcacatatttgtttgacaagtaattttggtctaaaagcttatgcaagtagaatgtagttaatataatatatttctttttgctttcaactgtttagagaagtaattttttgatgacgtctatttctccaaggtgccataattttactgctattttctgttttcttatatttgtcttacttgtattaatgaatgtcataaaaagtcaattgaagaccatctttgggagagtattaaattatcagtggctgttttgatcttttgaaccaagtatttcattgtgaattttttgattttcttagaagctagatcttgttgtgggtgtaatcttggatgataatattttcagtttattatataaaatagaaataaaagtatattgaaatattattttcattttgacaaatattgaaaactgatgaagattttttttctgcgtccaatttaatatatacttttttaagtgggtaaagtcttttagagtatttgtgtgttcatacatcatgttcttcagttcttccaatgtaagcttgtctttgctagttactgtgttttctgacattcaatgttttaattgcattattgtctgccagtctactgattttgttgacctgtggtttgctatatttttttggtttgcagtggttcagccatttacagattgggagaatgctcactatcagagatttgctttcctgggttgaatttgttaatgtgacaggaagcagattaggagctgagtatgcatgcattcatggagtgttccttgttttgcttgacggattaagcttaggtgccttctttgtttagcttcactcaattccatatttttgtcaaataattgtgcttagtttgtggtgtgctccaccctactatattttaattttaaagctaattcattaaataaaaacaaaggtcctggtaattgttgcaattaatatctcttttttattttcaatataatttttttgttgtttgataatttatttatttattttgcgcagggagtggaatagccaaaacagatgctggagagttgaggaagcaatgtttgtcttttcttttggaacaaatgaaggttttttttttatcattaatatttgaatgtgatatcttttcctcgatggtagtatctgttgtatctacattcatgaccatttatacttccaacaccttgccctttttctcccatgttttataaaaatattcttttgtcttttcattcttgaatctttgggatgctacttgaaggaaattcaaactgctagtatataagaaatatatataggcatgcataatactcaataggttacactcattctgcaattatgaactctggattcattaaagcgatctaccttttttcttttgatgttgcttataggtggacaaggctaattcaatgtactcaaaactttcaagaatgcaaaattatggctggggagaacttaatacaattggtgatgtttccctatgtgacaatatgtttggagctgattctttctatattcaagaaggtaatttgttgctctccatgatcttgtcatgtttttagtgtaatcattttcttccattgagtgttcatttagatgtttatagtacacagacttcacatctttcttatgatgaatcttatactatttttgcaagtcttatgcatagtcaattagctatggtatcctctgacagaaatgctatggctataggttctgaatgctgtgaagataatgaatttaagttttcggcaccaaccacttgcagaaatgcgttgcgtgtaatgcgtgctatgcagctctcaaaacctggtattccttcatttttggtgcttacgtatggttgctttaatctaagttgttattttgtgtcttggtgcattaataaacaaaatattaataaagaacaatattgtttgacatatgcactccagttctcctggaaggtagtccaggtgttgggaagactagtttaattgttgccttgggcaaacttcatgggcacaaagttgtacggataaacttttctgagcaggtctgtaatcttcaatcatcctatggtctttttaattttttagtaatctgtgttgatgcttttttatggttgttttaaatcctcatctgtgcaattaatacagtttattatgcttatgtgtagactgatttaatggacttgttggggtcagacttacctgttgagagtgatgatggaatgaagtttgcttggtcagatggaatcttgttacaagtaaaatggccttatctcttgaaagatcaattgacttagtttactctgggcatgatataatattgtcttctttcttgcatgctaatattgcaggctttaaaggaaggttgctgggtattgcttgatgagcttaatcttgctccgcaatctgtattagaggtacggctgaagccttctgaatttttctctagtaagaacattgccccaggtttttttttctgttttttttttgtggatttacaaggtgtattttta

SEQ ID NO: 299983 - DNA, 3111 bp, Cannabis indica
aacaaaaaaaataaaaaataagtaaatacaaattaatacatattaattaatataattaggtaagaaagaaaggaaaaaagtaaattgaattggaaagtatgtagtgatggtggagtgaatatgtaatgtggtgcacatgcagtgaccaatatattatatatatatatatatatatatatgtgtgtatttatattaatttgtataagcatcatgcatgggagaaagatgtattatttatgaagagactaattttcacgtttggctttttcttcaacattctaataatcagatctgatttgcttgtctatgaactcttttatttaatattttttaattttgacaagatcaatttttatttttttttttagaaaaaagccaaaatacagtctgtgtgttcatggagaaagaagattagtatatataacaattatatatttatatacaatatttcatattaggccaaagccaacatccaatcttatgtcttttttctattattatttcattgaattaattatataatacaattataaatccaatcaaaatcaaatgtgagtttttaatactaaacaaaaacaatttgaatgatatttttaagatgtatttgagaaatttttatgattttaattgcaatttttttttttcttattatttaattttgttgaaaaggaagtaacaaaattgctaagtaagaaggcaaataaaacctagctttcccattaattaattaataaactacaactagaaaaaaaaaattaagaaaataattatgaaacaaaccaaaagcagagactaacaagaaatatcctacaaataaaaagactgttcttttaatataatcaatcaaatacatgtctaactgaattgcctggttgagaaccataattatgctcaacactagtaccaccacccttgtttctcatctctataaccttcttatgcgagttggaatgaaccgaaggaatgaaagtagggctcgctgcagggcggtactctggaaagaggcggccagacctataccgaacaccacaagcgttgcaaagggtttttggtccagatggtccttccctccattgtggggtacttgtcacttgacaatgtgtgcatctctttgttgttgttgttgttgttgtgttcggttccttcaacttgttgtttcgcgtctctcctcctcctttcctgaccggttttttcacacaaggtttaaacatttttccatcatcaacagtccctgaatctgattcgggataaacacttgcaaatgaagagcaagttggtggaaaaaatgatagagagcgaagtctatcgagatttgagaagcgttgacgtttgcttctagctcgcctctttggagctataaatttcttgtcaacatgcctttggttttcagtaaaataagcattggtgctctcaagggttgaaactggactggatgagttaaaaagccgaacgcttttgacatcggtagagtcatggctgaggagtttgcttccagcattagaagacttaatagtactctcagtctcagcagcagaagaagcagttgggagctgctttagtctacaagatttctcatactgaagaagaacatagcatagcaaaataccaaaacaaaacaattcaaacatgttaaggatgatgattatgcaactatattataaaattataaactgtctcagtcaacattaataaaattaagcatttgggtactttttacacatattcaacagctacatcttaatcaaactattaatttaaatcaaaaccaacaaaccaacaaacaaacaaaacatcatctttcattacttcatcaaaaatttatacatggtataatataaaattcaccaccaccacaaacaaaacaaactttaattttaaaaaaatgaaccaaattagtttccatcatcatccaccctgtgtacacgaactgttaatcgaactacgaactaacaaaagccaaacagtaaagagcctgatattcaatcattttatactatcaattcttttcagtaagacttaagcataatcttaatcaaatggtactactactaactaatagtgtgataagaaactaagtgttgtaatgaaataatgaaagaatgaaaaagaaaactgaccgaagtaggcagaattttatttggtttagaagtatcatttgggaagactccaactccaactggaaaactcaaacaataatctaatggaagatcaggcaatggaatattattccaatcatctttaccaatatccacttcaacatcttctaatggaaaattaagcatatcaaaaaggtcaatatccttagctccatcaaaatccttagggtgttcttcatcacaatccaacttcttaaccatctcaattaataataataataatataatctgcaaaattaaaacaaaaacaaaacaaacataatattcaaccattaaaaaaaaaatactcaattcatataaaattcaaacttaaacatttcatatcactaagataaaaacctttttctttttcataaataattaaaacaaaatccccaaaatatcatacaaacaaacgaaactaccgaataaaaaatcattttttttttcatacaacgaaaacaatggcgtcattttcctacaacactactcattctcgctagaacaaaaccgaaaaaaaaaaataataaataaaataaattataaggtgaaagagagagaagcgaaccaaagatgaagaatggcggagaaagtaacaatggagcggaattcagaagaagagcagcattgggatgaggagagatcggaggttgaagattgaggattgaggattgaagattgaagatgggaaattggtgtgtgtttgtctgaaatattgaattgtggattattaggttttcattcttacataaaaacattaattttgttactctacataatacctcactatattttactgtgaacctctcttcttatcaccgttcatttgtaataataataataataataataatactcttcttcttatttatttgatgcaagataatttataaataattttgagtaatttatggtgtttatattaaagttattagttaccaagttttgattaatattgtgtttggtgtgattaaat

SEQ ID NO: 299984 - DNA, 2666 bp, Cannabis indica
gaataaaaaaaaatatctcctctactttgctactttcagatttagtcattttcttaataatataacttagattttattactgctaaaaattaaacttaggtatttatttgcaatcgaaaattaaacttaagtatttatgcggtaaattactcttaatacaaatatattatttgggatcttacgttatactcttttacattttgactctattttcaaaaattatattttgacttatatttttaaaaaaattacaaataaacactaaggaaataaataagttatagagttaccttaatttagcattgaagaaatcagagattgatgtagcagcaacatgaactaatatatccacaattaaatcattgggaagccaatcaatatttttcattgaattaattggaagaccattatcattgactataaattttaagtcacttttgctatttttctgcattttctttgttgaagctatacttatttttgatgagtcattatttttttctcttgatcggcttcattattttgagccctacattatacatacaaaaataagtaaactaaaataactatattcatatcatttcaaataaaaaagggttgcacatgtttatattaaaatatagtagccatcttctctttaatggagaaaaacaaaacttataatgacccaaagatccaacattaggaacaggaagaacaactatcatttcaaataaaaagggtgtcttcgcatcattgactctcatgactatcattactcggttaaatcaagacaagtggtcactggggtctgtatctcctgcgtacatcattatttcaggcattttaaatttttttgtggagctccgcttcaagaatgtttctagcacaaggttctcgatcttcataatcagacttcgaatcatctccctttttccttcgagaaactttagctatatctttctagaggatagagagtttagacaggattccctcatttaaagcgccctctgaaactgacattgcttgtttctttttctccaagtgatccataagatcaccatgtctatcgttaagcttctgtcttaaattaacagggggtgcttacgatttttccttcctcttttcccgggctcttgatgcatggatacactttttcagtcctcccagtcttgagggctagtgctctccttagggagcctgcccttctgcgaacttttctcctttgggaactcggagcagacctttcgcagatcgtgagcctttttgttcttttctaggaaagacgtgggatttgtttttggataacctttcgagggataccggatagggctcgactcttgacttttacgtctttgggtacttggtgaatattcttctcttgttttgcctggtccatgaggcatagcttttgggtgcacgtgaatgcctgttgtttccatagccttctgcatggcggccattatctcttgcatcttcctattttgctcttttatggtgctgccagttcggcctcatgatcagtagctttttacctcaaagccactaactcggtgtaactgccgtcatcataggcgccatactcttcttggttttcctcatactctacatcattcgtttcatcttgttcttttacctccacgtctactcataaagttgcttcttcatcttctggtcctctaggaccctgggggcacgaggctgatgtgtatggtttctagtctccaccattgtactctgaatcttcttttattgttattctataagtaaagccttctacaactctcaatgaaagttccaaaatattgaccgagattttcggcaacttagacaattaatgcagtgaaaatgattagaagagagtaaatgcgagtatttttacgtggttggggcttaattagtcttagtccacgagtctctggtatttaatatggaggtgtttctttatagagaatgttctgctctattttttctgatccccattataaatgtggttggaggtatttatagcagttttgagagaggaaaaaggtctctattgtctcaagcgtccaccttagctatgcacaagtttccaaattggcaaagtagggtatgcacccctacctagtgggatgcgtaggatttaggtgagacaagtccttatccttctttgattggtgtgacaattcattatgtagtcgtcacttacatctttgattaacccgtaattgccaaacaatgggtttaatgtgtctgacatgtctttaatgccagtgaatagttcatctccagtatcctgggcccagtggagctggatgatatcctgctcccggagatgaacagaaggttgatccctctgaagctagcctaagctccaggaggaaccttcaaattatgttcacggagatcctacctacttaggattttattgagcgcttggtctttaagctttagctgctacatgtctagttatggaactgtcacatatattgggataaaaatatagcaatagtatagtatacacacatatatattagtaatatatatattttattattattgttagtatatatattttggtgaatgatatatatattttgttgtatggtatatcatttttaaataatatttaagttttattttctatatatttttgttgacatgatatattattttagggaaatttgattttctatacttagaaa

SEQ ID NO: 299985 - DNA, 2303 bp, Cannabis indica
tctaccagtgatgcattttttttgtaactcaattttgcccctaggccagcttgtgaaaatgaacttgtaataacattttgtaaaatgtttttgggatcccaatacactataaatatagatttatttattgaatctcatcaatcaaataatctagattactccactataaatatagaactaaacttttagtaattatagaattatatttactaagttttactaaagtatccattgatatcatcaattctagtgattagccctccttatgtcgattcgtaacaagtttttgtcaaattatcgttttacccttctaattacttctttatccttaagtacaattaattcactagtaaaagtataatttagatctaatctaaatttgtacataatttttcagttccataattaacacataaagggaactcgcattcgatctgttaggaaagtcaagattctataattgtagatatgttcccatccatccatattattagattcttgaaacagaagttgtgagaatcatcctctctgataaattttaacgagtgaaacaagaaactaataacatgaacaagagttcattgttactcaggatttaagcagagctactattgatcatcattatgatatgaattaggtctttatagtaaacagtaagtttgataaagacagttttattcatattggtccttgtcatatataatctctattatatacaacaccctcacttaaatgtcatgctacatcaataatctgaatcgggattaattgcaccgaataacgggtatcaatgaaccgcgcaaccattgagattcctaaactttaatatgttgttgactattttcttcatgactaattgatcttaattttccgtacaatacaagtcatactctcatgtatgaataataaattttttgatatttatatatataaattattcaatattaaatattaataatttaatattcatgcatatatcaaaatattcaactcttattaataatcaaaaaatatcttcataggcttttcaggacataaaccctaacatcaggacccatcaaataaaagggggaggtagaagtagcagagacaccatgttgacttagatttgcataagtaggcaaccatgtatgagagaccttacaaaaaaaatatttgaccttcccaaggagatgtaattattaaactttattccataagtcaaatttaccattacaacgagaaccctgcctaatgccaagaatacgaataatttttcagtacccactcctgtcagagtaaagatttgaactctcaaaatgccacacaacagtatcatactatggaacatgatcctaaagtatggcaagaatagcactaaattcatgcatagagaaagagctattaattaacaatgcattccaccaaccattatgcagtaaaatatcatgcacaatagcatcatcaggtagaaaaatgaggagcaaaagacttattaccatctatgctaagaatccaccaatcatgataaacagttgtcttggttccatcactaatgaaccaatgaccaccaacttcaaaaatcttcttaccctaaagaataaacatccaaataaaagaggatttcttggactcttcaaccaccaaaaggaagaattaaggtagtaaatagccttcataactcttgccaccaaagaatcaggagcataatacaatctcgttgcttggttagccaaaagaatctacaaaaaagaggtaagttccataccccaaaccatataattttatcaatcactattttatataaaattcaaaaactcaaataaacatttcacataaaaaatacttcggtaccattttaaaacattttacaaattaacacattgaaagaaaatatgaaaaagatacttcggcatataaatattacccttttaattttgtgaaaatttaataatagaccataatattgacatcattttagttattaaacatgtaattattattatattattatttttgctgatagtttgatatcttacaaacctcatttgaaacaatttatcgtttaaaaattaaaaattgatttgaaaattataaaaaaaaaatgtatatctattttacttacttgttttaattttttacttttattttcatattctttaagatatactcacttttatagatgatgttcctattatatcccttaagttattatacattatgtgctagactttggagggtgagagtatattaagcaacccactcacaaaaattagtacattttagtgaaatataatatgagtatttttaattaatagatacaa

SEQ ID NO: 299986 - DNA, 1526 bp, Cannabis indica
ttagtgtttgttaagcttgttgaataagtagaggaatgttttcttatttttggtgaaacaatccacaaaaagagtgatgattcattgccttagttttagtcgtgcgtttaaggctgtattgcttaaaaaaaaaagtactatcacaaaatgaaaaagagaagaaaaaggaaaatgatttgaatcatgaggtattgcatttcttaggcaaaaggatctaaacccactttcccctttctaataaatccctaaaatatgaaagtacttaatacaaacaattagatagagaaaagattaaatagaataatattacaaaatgaattaaatgatcattacacatgtatgtcaaagaggcattgttctaatgattatatgttgaggcagcccctagacaaagttggctagaactcaaaataagttgcataaattatgtgtttcctgaattctttggctttggcctttaccagcaaatgatcatattaggcagcagagtaccaactcatcaaatttcattgaaaagtaagggatttcaagtactaataccaccctgctctgtatcccatcctgaaccagacgcagctcaagcttttgttgaacatatataagaccttgttaagcccatctcaacatcatcatctttgttgcagcatagcccttttcaagtaaaggtgctgcatctatatatacatatatgtatatatatataccaattgcaatacacataagagtatgtgtctctcattcttagatcacttccaaaaccttgcacatttttgttgctttattaggtgaaaggttttttctgatactactaatggtctttcttttgtagattttggactcttcttcttcatgattctttgttctacaaccctttaacacatggggtttaagtttattcacatctgataattgcactggcttcaaaaagaattcttctgccccttcctccaagcatctgatcaacaaaatcaattaacatatcagtaaaaaagaagaaaatcatatcaaaattttcaaactaggcaaatcataacaataatttttacctgttgattcttgatggaacattctctgaagacataataacaactggtacatctttgagattcttagacatctgttaaatcatataatatataatcatgtcagttttcttgaatctctctaatgaaaaattattaaaaaggaaaataaattaatagcagaaattattcaccttgatctttctgagaagatcatagccagtcattccaggcatagaataatctgtaatgatcaagcttggaataaacactgaacagccatcatcaccattattacataaacccaaaaactctaaggccttatttcctgaatcaactgctgtaactgttgttgaaaacaaaaagattattattattaaaacactcaaaatccaatccatttcaaaaggggtaatccaaaaaaagaaaatcatgatgatttaattgttaccttgataggaagaagtcttgagaagagcctctattaactttctgtcaatgatg

SEQ ID NO: 299987 - DNA, 4545 bp, Cannabis indica
atagagtaattctcctatatttttaatcatacaatatattattctgaataccttatatataaaaaattaatattatacttttctagactctagatactaattaaataaaaaatgaaattacaagaaagaagactattataaaactaccatacactaaatttacagaaattattaaaaagttaaaaatatttcaatataatatgtaagtttttttgtgttgtcaattattttaaatataaaaataaaatataattctatctattttaatttaaactgcacataaaactatatattttattaagagagcaaaattcaagcaaggttcaaagtttgtcggattttatacacaggagatgaagggtctgaaaaggtttatagagtaagtgaaaatcgattaaatgacaatcttaagaagaatctctcgactacttatgatcaaaataactttgttttttgattgaaaagattgccaaattcgatcttgaatagattgaaagagacttttcaaatttccttaagaaacaagataaactcaaatactattcttggcaaactagctattccattaacatgatagttttggtagtagtagatttagagaaattaagaatttgacctaaaacttgactataccaattaaggatttccttaaataataagcaagctcatgaacaaaaaccttaaagaacacatattgatgggactattctaccacaagagaaactataacaaacttgagcaacaatctttttaaacaaaaacaaaaatacgttaacgcaactcaattgttacattatcagtaatgagagtctgctaaaaagaaaagcaatttgctcctcaaaaatgacatcaccgaagtcaaagagtacattttccatccaattaagtataagtttagtaataattttataaatgacattacacaaattaatagacttgaaatcagttacattttttgataattaagtattttcgctaaaagtggaataacgattttgttgatactttgaatattttcatgtatgaacttacacaatctcaataagaattacctagcttattatcatgatattccaaatctaaatgccatgtatataggcttcaataagattttttatttatttattttttcaaagaaaaagattcatttggatgattttaatatttttaggttattctaaagggcctatttgctacatcattaatttaatgtgtttaattttcttcttttgctaagaattgtgaatagagtacttaactgaaaattgataagaaagaaagtactatgtagtagttgcatgtcaattaattatgcttataatatctgtgaacatataaatattatacatacaaattggtatatatatggtataagtagaagttatcactatcattacagcaaaagaataaccaaaaataacatgttattatcaatgaactgactcatcaaaaaccaccacaatgaaagcagaggtgacacttgagaaacatttacaggaccacttaatatatatatctgcatcagatcttgttcatatacaaaatataaattttatataaaacaaccacaatatattgttgtttctgattccaaacaatgaccaagttagcctaaaaatttatggggctaatacatataaaaaagaataagttaacccaaaactccctaaatttacattaggttagtaatttgtcatttttgctcatttagttgttaatattcatattaggctatttacatagatataagatattgttcacataaatataatgtatacatgacataatttaattgagtcatgtaaataaattaataaataaaactaaaatttaaaattattactttaaagtaaaaaataaaaatatatttttttgtctttttatcttttttttttcccttttctttcttttaaaaaccctaatttcctaaccaaatctctccttctttctctctctacaacctccacatgcaccaccacctttcccatctccggccatcgtcttctcaattccaattctatcatcatcaacataaagtaaaaatgtgtttacaaagtgaaatacactctttaaatcctaagatctcaacttcaaatatcgtctagtattgctccaaaaaaagacttaacaatatacttgcacattcaaaaaaatcattaatgaataagcacgttagacttgtaaagaataacctaccatattgcaaacacatcaaaaaaaaaaaaatcaagtttttaattattcaaatatcaaataaatttataaaattaaatttaaaattaaacattacctaaactatactacagttatagtaaattatactaaacttttgtttttctaaactattaaacttacacttaaagttttgtttacctaaactacatacatatattttctggtaacaaactaaacattaacattaaaattaaaataactagaaaaatttaatgaatatttttaagtcaaaagatacaaagtacatctttaaaacttttaagcaatgcatactacaatatcactaaaaataaattaaatttcacaaaaaataaaaaataaaaataaaatacacatagtttatattttcaaaaacataaaaattacataactttatcaaaataaaattctaattgttgacttagaatttggtcaactgacagcagagtcttatttatgactgataatcaccacatgtaaataagaacaataaatagtaaagatgacacatagatttatagaggttccacccccttgtttagtgggtaatgacctacttcccttttagttgtaattactcttgagataagaccatgcagatcataggtaaaaattttataatttttagctatgactctctttagtattacaattgtgagaacaatgtgttacagatcaagcactggtaaggttttgtcaaggacttgagaagagacttgactgattgtctaggaggcatagatagaatgtgaaacttgtgagaatgaagcttcacacgggtaggagacctttatggagaatgaaaggagactttggctttagtgtttgtggaatgactcagactttgagagtgaactaatgccctttatatagtgtagagtttacaaaaaatcctaacccaattaggtaaagatatccctttaaaatagagatattaacatatttttatctattatttaagttacaaaaaagataactaatttccttaaaaataggactagtatctcgaggaaatacccctattttcgtgggttattgggcatgtcccgttacatttctcagtgttcggagttatcagcataacttggctggccatccctattttttagggcctagccaacctatgatctcttatgcctgaccaggtattgttcctgcacctttggtatgtgcttgccaacctttctagcttttttgtacaactttccttgtaaagaccaaacttccttggtcgaacaagccctttttgatccgacagtcactctttggacgaccaacctatgctcaagacttggccggcctataaccttcctttggctagctagacctgctccctttggtcgactagatatggttggtcagggccatgacaacctgcttaactccttttgtttattgcttgacagttttttgcttgattgctttagagcccttgacagttgacatgccgtgtaaggtgactttgtcctgctgttaacgagttatattccacgtgtcatcagtcttgactatgtggacatgccacgtctggtggacaaaatttgggataacatttactctctaagttcatgttcgtatgttgtacggatatggacttttcagctcttgtcttgattgtagtagcctctatcaagcagtcttgtctggccaagcatcgagcttttcgaatgatgtgcttttgaacctttgatcttctctctccatatatgcctcatattctcttcttcgtcatctcttctttgattctgccattaattagtttcaagctttttaattctcacgttttaaggtagttttttcacattataatctgcttgatagctttgggatacataatgtttgatttgatgaacacgatcaagttttagactggtatcttgttagagaccttgttcgactcttaaatcttgtttaagaactctgactaatacttagatcttatttaggaactctgtacacgacttagatcctacgtcagaaatctgtacctgacttagatcttacgttaaaactctgcctatggcttagatcctgcatcgaaactctgcctatgacttagatactgcattggaactctgtctatgacttagaaccttcataagaactctgtctatgacttagaatcttcataggaactctatttattatgacttagaaccttcataaccttaccttagccccttttaggagctctgtccggtatgttacgggctaaatcttcttgaacggttagtggcctttcattggctatctggttcatgattcttgatttatactttgtcagctttgtatttcacatacttcatcttttgttcttgtatggcctttagg

SEQ ID NO: 299988 - DNA, 2887 bp, Cannabis indica
taaattattattatttcttttttgaaaaaatatgtaaattatttattttttcattttgtaaaattaaatttaaaaaaaaattaaaatccgttgtcaaaattccacaatgcagagcccaaagtcagctccaaatctacttcatcattcacgccgagcttcggcttcacaaccaaagccaccgagcagccactatcctcctctccgctatcggctccaccttgactcagccgctgctgcagccgagtttcctcctccgagtcgtgactcactggcggtccagacaaaaccaaatgagccgactcagtcccaaactcggtctccgattcctcaaccttagccaccttcttcctcctgagccgttgccgagtctgaaccttaagccgatcacacaacacagagctctctctcttcgccacgtggcgaatatcacagctcaaattccccaccaactcatcagaaaccggcttaataggctcacctctcagtacggcttccactgcggcttcgcataagtgccagcttcctgactggaccaagccggttgagccgctaattggattcacaatacgaccacaagcttcgtatagcaatgacttgaatatatctgcacagagtagagaaaatgaatgtcgttttagagaattcaatgtcgttttttgaaatataataaaaaattgaatgttgtttaggtatttaaatgtcgttttttgaaatatattgttcgctatagaaattgaatgtcgttttagatatatagatgtcgttttctgatatatagaatgtcgttttttcgaattatatagtcatagaaattgaatatcgtttttatataaatcgatgtcgtttttttgaaatatattgtttgatatagaaagcgaatgtcgttttcaaaatattgtgtaatagaaattgagtgtcgtttatctcaaaacaaaattgaatgtcgcttttattcaaaaaagaaattaaatgtcgttttagataattaaatgtcgttttaagatcgctgtcgtttttgaaatatagtctgttatagaaattaaatgtcgttatagatatatagatgtcgtttctgatatatagaatgtcgttttcgataatttgatgtcgtttgacgagtgatagttgtcgtttattgaaatttattgttagagagattgtatgtcgttttttgacatttattgttggagaaatttgatgtcgttttttcaaaatccgacgtcgttttgggaaatataatgattttatagaaaatgaattaattaaaatagaataattaattaccaggtcggcgatggagaggaccggcattgatgaggttgatgagaccagcgcggccatagaatttggcgaggaagagagtggcgttggattgagagagtgaggatttgatccagagaagacaaggtctgatggaacagttcttggcgcaccctcgccggagaattcgacatccattacagcttaatcgcatcactctttttagtatgaattgaagttgggtttttgtttgggaggcgagaaaatgagtgagaaaaataggtgggtatgtgccaaaacatggggatttgtgggggggttttgtagagagagagaggaagtggttttccaagaaaactggggtctcaggtcaagagaggttttttcacccaactttattaaatgagaaaattcaccaaacaaataatttcaatggaaatatcacataatatgattattatgcacttaaatttggtatttttttttctttcaacaaaaaaaaatgaaattttttttaaaaaaaaaaaattacagatttttgagggcttaaaaatcctaattatccttcataaaaatgtaagaaaaaatatgtacattgtacaaaaaaatgtaaaacttttatcaatattaggtatttatgaaataatctcaatttaaaatttacttagtgctcttttggttgtttgtttaattaacatttttgtcttttaaattttggcatgtgttaaatcgtgatctttaaactttttatgttgttaaatttttttctcaaactatcaagattgttagatttaaaaatttttgtctaattccgttcaattttactaatgtgacgatgtccatgtactaaattatgtcatttgaacttttatatgttttatccacgtcagacattcgttagtaatattagactgaagtactcagatccaataattttaattatttgggaaaactttttaatgtactaaaaaatttgggagcacaattagtacatgtcaaattcgagtaaatcctaattagtccaaacataaatgttaaaaggtattatttaagactatgctaaaagacactaattgtgttgtggaacactactacgaggtatcataaaattatcaagtctagtaaatgatccatgatttaacttaactatatctatatgtttaacgccaataaattttttctcgcctcacttaactcttaaaacggaaaattcataacctcaattgctacaaaaaatactgtttgattgatatttgtgtttgtttgattaaaatacactctttataaagtttctcatgtgaattttaatacttaattacattaataatgtctagtagtattacaaaatattatacctaatttaattaagtattaaattatttataatttttactttttttggatgaatttttttattttactaaatacaatgaggaatggctaattaatcattttataattttgattttttgataatttttctaatttactaactataataaaaaaaattgctaacaatacctacaatgttttaacagaaaaataataaaaaatattaatagtattggatgattctacaatgcacccccttaaaagggatgtattggtgcacccttaacttgtttcg

SEQ ID NO: 299989 - DNA, 2673 bp, Cannabis indica
atgcatgtctcactcattgtgagcacgagaaagggaaaggtagtcatttgggtaaatttatatgttttaagtatatttaaagagagaagacacaactttacaactcatagtgccattaggacaaagaaacatctgcgttctgcagcagtagcagcactattccctcacaggaatgattacaggtattggacagttcagtaagacatgaagattgaataaaacaaattagcctcactactctctccccacccccacttgtgcctctgaccccatctgtgtaacacatcatattgtccccattccattctccaacccattttgaaaacacaacattcattatcacacattttttcaggcttaaacttggaataactgagaactgatgatgatgatgatgatgccctctaggcctctaccaaagcataacaaacccagagccttaaaatggaaaaagaagtctaataaaaatgaaacctaaaaagaaaaaaaaaatcaaaaatcaaattgggataagataatctaatgtggatataacgtcttgttaattgttgagctgaatgttgaaggtgaagaagcaaggggaagcacctgagaagatgagcttgaatggtgaatgatctcccttggtatgctcttgtcaacagtgatttctataaaagactcatcttgatcatcatcatcatcatcttctttaaggaagcttgaaatggtactactacctttgtgccatctatcacaattattaggcccttcagtgttctgatcacctttatcatcagtctcctcttcttccattaatctcttctcgagtttcttctctgcttcctgtaagaacttgaacttgggaggaggtgaagaccttaatctgttgaactcagcatctgttgttgactcaaagtggaagttgaagccattttggctataagagccaccgggagtaagaggaggagtgacaaatgggggtgaagctaaaggggtcaaatatggagtctcaactgtgacaatcaaatcacttaagcttctatttcttgacccttttcggctcttattagatctcccatcatcagattctaagtcttctttggtctcttctatgattgtgaagagaaatctaggatggcctgaagggttttgcagcctcataaactcaccttccattccctcctctccaaagggtttaaatagaaaatcattgtttgagttcatatgaagctgagaatttgattctgggataaggttattggttgaaattcttgttgaagagcagagttgttgagggttaagagctgagtggccaaaagctgagtgttttctccagcaaaacatgtagaaaagctcttttgctgggctactactgtaatcattttccatctctctatttgtgaatctcttcttccaccagaacaagtagtaaagctcagccattagagctaagaaaaggcaactgaacactacacttaaacctattcctacactactcaaagacttcatcttttgcctaaaaataacattagaaaactaaatataaactggttttaactcaaaagaaacaccaacataaaataagcaagagattctatagtttccaacttcaaatcaaacaaaagaaacaaaaaatagaatatgctttacttttacactactagttgctcaataccattaaagcctaattgggctgtaaaagaatcccaagaaagtgaaagaaaagctgatgagagtttctgaatggtaccaatcttctctgaacaaaggacaacccccccatgaacttggtcttgaacttgcacaaaaaagaaaaaagaaggaaaaactcacaagcacttatctactttgcaatatacaaaattttacaactttaaatctaaaatataatgtaaccccagttcagatacagcttaaaaaaaaacacccaacaaaaaatatttattattattatttttttttttccctgaatatcacattcttcaatcatgaaccatgattatgaaagcttttcactttaaaccaactaacactaaacccatatagttgcagataattacatcatttaacctctaatactaattagtaacaaactaattccccaaaatggtttgagaaaaaagaaaaagtatgttgttgtattaggtgaaaaaaccaaataaaaaacaagaaaaaaaaaaaggaataaggcaaagcttatagcagtgagagagaaaagtcggcaaaagagctgactaggttttatggttgaaaggtcgcatccctcgaggggtattcacatggctttgtaaacaaaaagtaaagtcacgtgtcactaaatacaaattaggttttggtaaataattacaatttaagctaagctggccattgcattgagcaatatctctatttatcatgttaattaattaacctttaattaactatttagtctcaaatttttggagagagaagagagacaagattattatgtacttgactagaaaataacaattgctaaaagctatttgtcctcgaaacacaggttagtagtattcgaccgactgtgccggactatactgatgacacatgacgaagacaaatattttggcgccatttctctcttcttaatttcattagggaaatttgaatttccatacttacaaaatcccattatttttttcctaaatacatacttactaaaattgctaatat

SEQ ID NO: 299990 - DNA, 4034 bp, Cannabis indica
tctaagatcatgttcgagaatcatatcttccgaatataaaaattagataattgtcaatcaaatatttatgtgtctttgttatccacaaaagtaggacacatttttgacagttatcaacataatgtggcgtcaacatcagcagaagatcaatgcctcatgggtcgggctccatcaaattgacccagtgtcactactacaaaattaggctttaggggcagtttttttaggcataagacgtcagttttggcaaaatctacgaccgatattgttttaaggatcgctaaaggggttgaattaaccgaaggcatagggccccctatgttgttggttattattaaatattcaacgacatagggccttccttaaacttttatttgcgcctatggtgtcggttattagtaaataactgacgctttataaatcctatgtgtcggttatttactaataactgcccccaaacatgagttttttttttaattttattttaaataaaatttaattttgatatgataaaatcagtttcttttcatatatttatttattaatatatttaaattaaatattaattttatataattaaaaattaatttgaaaatctaaataaatatatataattacattagtctaagtaaatatattatacaaaaattataaaattactctaagtgtttaagagtatctaaacataaaaaaagacaagaaaaaaaaacaagtacttctacaagtgttctagtcatcactgtgaatcacctcaagcaattttgatatccactctcattgtaacggcaacaaatccttttgtacattgtatcgagcctgtctcccaaactgtaaaaagaacaaaatattttttattactatacatattcaattatttgttactataataaataagataattaataattaaaatttacagctcttttttttcggttatgaatctgctagcatttgtagatttgactggtgtatttcaagacataaaaccacgttcttaatttttaagctattttggggaaactgcatctgttagttttggatacggtccaaggaacgcattcgtcccctcgatcttttcgtatgcgctattttgaaaattatattactattttaattaattagcataacttatctaattaaaaaatttcttatatagaaaataattaaattattacttcatcatatctttaatttgtttgggagatttgtggccagccatagggtccaaatgtaccatcttccctagtgtaacgacctcgattatccaatgtacactaaaatacatatataagatagagtaagaataatttcaaggaataataaagaaagtaattttaaattatctcttaagtagtatgctttacctgaaattcaagggaatggagaacatttggtattggctttcatcgttcccaaccaactagccaatctggtagccgcctcctcaaactgattctctttatccatatcttgtatcatggattgtgagaagcttcgagtcataaagcttgaaaatctgtctcattttagataagtttttttagatgcacctgcattaaattgttaaaaatttcctataaataggactacctaatctgtagatattcaatgttataaatagtaagtataaattctcatagagaatttaaagttaattaggttaaagaaagtatacctcaatctgaaaagcatgcattagtttttgataaagtcgcataatataccacttgttgtacatcttccttagctattgtgatgtgcatacgaggcgttataaatttattggataccgaaacttcaattataccatatttttcgttgatgctcaaataatcgttaatcatgtatcaaatcgacttgtggatttttttttctatgattgctagagtgaataattgatcatcattatcaccaacgacttcttgaggaggcatagagcattttcccttcaacagaatacttgttgaaggtgtttgagcaaagggcctacaaaataccataatagatcaaaaattgtataaataatttgttattgttatttttaagaaagaacttttacctctagtgttaaaattaaatgtttaggccaagggaggaacatattggttgcttccccaacatatcttatctcctgaatcggtattgggatttctgcaacatcttgaaacatttttgaaattagaacgtgtgcatgcgaatcatcatagggcacagtatgaactactatctcaccctcttttttgtataaatatgctttggtcactttgttgctaacattgtcctagcatagaactactatatcatctaccctttgtttagtgaaattgtacatgggggtggatcatataggggaacatacatctgagcatgttcttattgaacacactcctgagcatgttcttgttgagcatactcctcctcctcatcttgttcttgttcaataattgttttcttctttttaagagatgtaatttttgctttcaatctttctatttttgagccacaacattagaaacttctcttttattctttctaaaattcttggacgccttcgtagagaacctacaattgataaataaagttaatgaagatttattttgtacaactaatgaaataacataaatcaagtactagcatacccagcagccctaacacgtccaggatgctctggtctccctaaaacctgcgtcaatataatattttggccatggaccgtaacctgtccttggctaactttctcctccaattcaacctagtgcacatatcaccaagcagttagtatatatttatatatattaactcattattacgttattagcaattaatacttactatcttaacaataatttttttgtcaaaattagtgacaagtttcgattctttttatgtgatttgatccaaacttgatggcgtgggggatcttgaacttcaagtttattttctgcattgttttacaaaacttaagtgagtactgttgcactttgatgtacattgctaaaaaattcattttattaattatcaattacttactacaacttccctgatgttggccattctgctctgaccactacggtgttcggactagtttttcagtgatcgttctctttggactttaaaagttaactactagtacttgtatttaaaaatttatcttaacatataaaattagtacatgaaattcaagagttaggcaacttgcaacaaatttcagtcaatcatctttatcgatttcagaatagttttcaagaacacatgccaactatgttggaattattttatcaggatcttagatttactaacaagtatgcaatttaacatcctaaatatgagcttctaaacgatatgaaataaacacatataaagtataagaaacctcacagtggttgcagcataatataatgtctccttccactcagatctctaacccttgtatcctttctgtagcagagtatcacaaagatctgagtctgaatctccttctcttgaaactggattattcacagccttacacactatgattgagtactacttgatgtgtgtgggcactcactcttttcactatgtggcttcggcttagaagagagtaagagagagagagggtggtttcggctagggtaggaaggaggctcaaatttatctgaaggaatgacatgcatcatcttttcctttatgccatcactacctatttataggataccacctagggttaagttagatttatttggcattaaaataataaaaaattaaatggtaaatttgctacataagtggccggccataggttggatattgggccccactttacaattttgccattttctcattttctcatcttattttcttcaaaaataccaattttccaatttaaccatttaagtgccaattctaattatttaattactagaaattaaaaattaaataacattgtcatttaacatatttataaatagactaatcacagtctcttaattaacaaattaaccctagaaactctttcttcacaattaagccattgcttagtgaaaaattcataa

SEQ ID NO: 299991 - DNA, 5860 bp, Cannabis indica
  modified_base (5299)..(5299): a, c, t, g, unknown or other
aaactttcacacctgttaacagcattagtcaaacaaaccaaaaaaaatcgctaaatgcaaggtaatccagtaaagctaaaacatttgaaagattgtcaaatatgatatcttggccaaaacacacaaccttaataaattcatctgtcaactgaatattgaacaatatagtatcaccgaatcttggaaagtatacttaaattgggaaacaaagtggatgagacttcaatcaaattacaaaagattaattaaaatgacataccagtcgatattctggaacccgtttcgggtgttttaggtaggccatgttgctgacatcgtaatcccacaaaaaagacgtgtgatggacccatcggtcttttgtaatagactgagcattcccaccaaatttacgagtgccaaatacataatctaaaaccacattgcaccaaccaagaacactttaagaatatgtttcgtcctaaagtgttgccatatcaacaatgaaaataatgatacacaccacacacgcccaccatagcatcactaatataaaaccaaatataaaataggtgcgtaaattattaaagggtagagtttaaggatctgtcaagtagaaacaaaagttctcttacagatttacatggaagtaatatgagtagaacaaagtgattccaaaaaaatactaatgctgatttaaagggtttattttgataccattttacacgaagatggaaatcaccaattccttgaaacactctgttataagaatgccactccaggacataataggtcgaggataaggttgcaagccagcaatagcctctttgttgcatatcaaagtaacaaatatcgtgccactatcaacaataacagtaccacctccactaaacctcctgattacagaaactccatctcgtagcactgacttggtatcgattagctctgcagctgacctgctcagacaattcaaaataagattctttaacatttcctacaagaatattctgaaaaaacgatacacacaaattaccctgagatacccatgacaatggtaggatcgtcagttccatcattcacaatgcaccaattctctgatgtcgttcgaagcagttgttcttccaaatgaagttgcttcaaaatggaaagtcctttaaatctgaccaaatttattaacggaagcccaatatatccactttgaggtgcactcattgtattgtagaattaagtccgagtttataaccttccagaaccatttagcaggctgaaactaatttcctcagagttagaattgatgccattggtcagtagacatggaaagaagcacctgtaaatgagttaaggtttatagtatccaaaactacagaccattgacgcccagaaactaataattaagaaaaccattcaaataaaactatagatctcattgatgacttttatcaaacaggtggtagctatggtaagagattcaaaaagtaaaatttactatatatttacagtcatagaagggatcaaaatcaaacaagataagataagatgagataatcaaataagaaagatgttaccatatgatggtcggtcggaggagatagtcgtcacactcaagcgatcgaagaaaaaatgtacgagaggatttagcataaaaaaagccttaataattttgaagatgacaaacacaaattagtcaattttattcttccttcttttcttttaaatattacatcatatgctttataataaagtcaatgcctttagatggtagaattgcggttgcgccgtcagctgttcaggcgtctagcctttttgttctttcataaccataaatcgttttacagtttcagctgtttttgtcgtttaaacaattaatggcgctggcgaagtcgtttgtccacttttttgtcgttgaaaattataagtgttcgtgtttgtacgagtaatcaatcaagtgtcttttgttcatcatttattgtatttaaaagtttaaaaccagtgattatgtcacttcaaattgctaaaattgatcaagtacatttaatcaatgcaatgctagaattagaattagaatggaaataacacagaaaagaaaagaagtaatatacactttaacgctattcaccatcatcaatgggccagagatgaatgatgcactttttacatacaaaaccctcacgtacatattacaaatcacatgcatctttccttccctcataaaaattgaaaaaattaaaggaataaaattctacccaaaaaagaaaaaagaaagaattaccgaatgaacttttctactccaaatcccactaccaccaagttaataatattcatcaagactttgctatagacactgtggtactatttaaacttcccataatgtcgtcaggcgggggcttcacatacttccctataaccttttgtctatttcttcgcctcattctatccaacttctccctactcttctgctttctcttttccttttgttgatgccgtaagttcctttctcgctcgaacatgccttgccagaacacctcgcccgtcgagggccacaaccatcttttaacaggctggtctgtgtcagcttcctcagccaagtcctcatccatgctcttgagggtagagtaggagaaccatttgatccacatgtgacctctccgactcttgaacctgtgttgttcgttcatggcaccgctctcagggttcacgtaaaccattcgtcgagagctgtggtatgcccacacattcacaagtagttcgagaagccgtgagtagcaatgcttgtcctgagataacaatgtgttaagcatgcaataaacacacagcagagccaaaacaaaagtcactttaaattttagataggttttctgagacacttactttggatagactgagataacaatgtccagttgaatgatgttggtcgtatatttgagaatccagtgcattcacaaacattctgcaaaatggaacatttttcattagagatgtgaacttagccattgttcaagaagtcacaaactcaaggaagtaacaataaacggttctcaaaatgtacctagaaaacataacaaactcgagaaaagacttggttggcatagcccaactatgcatgacagaccaagtgtccccatcttgtggcatcggtggtaacgatgtcaaatctagttttaagccgtacattttcttgaaagcttcagagaaggcaaaccttcaatcaaaagcaaacaaaatgtaagaagtcatagacagagaacagaaaaaattatataaacagaaccaaatccaaatagcgttgggttattacttgcagtttccagcatttatagcatcacagaaggaccagaagtccaatttcaaaggattacgtggatccgtgtccatccgcacccaaaagtagagggcatctccatgtcttcgtgtttgaaccgcatgcaacaatgcattttcagcaacgccagacaacgatgcctgcttcaggaaaagacaatgttaaatacaaatgaagataagctattgctaatgatgcaatgagccattgcattaccttccttgccgtggctctccaggattcaaatccaatccaagcattcttgtgtattcggtcaatccggtttgctatagcaaagaaagccccatattcaccgagtacatctcgatagtaagcattattgagaagcgaaagacgagaaggtgcatctatatcatcagccccacgtcttcgtcctttggtggacttcaaagcattcagttttgtggtgttaagtcaataacattatacgagaaaagaaagaaatatggagtaatagactacattaggagtaaaaaagagtactaagaaatgactgataactcaccaacccaattcctcgataaagtgaagtacggtgaaggaaaggccaggctccttcaccgaaataaggttcatatatgcaaaggggctggcctgttctttcaagctccccgtcgtctctttcatgcaaatcattcttagcacgatcagcccttttggcatttcgatatacttcttcccaagttccatgagattgttcagctctatccttcagctgcataaaatttcaaagatggttctaagatgaatattttaggaaacatgttacttctcaaaccacaagggcactccttacctcttcatcctctcttctttttctagcatgagccatgtcaatgtttttctcttcttgccataggctgtacaaaaatgaatcatcgtttgcagatacacgaccagatttttctagttgactatggttccactgctcctcaaatttatccaaaaaagtgtatgttctaaatgctttattcaagttagtcgagttggagactgattcaaacaaatgccattgccatttatcttttaaactcaaaggaatttctgatacagcttttggaagtgcaacctctgaggggagcttgagaacattttcaagaagcagcacatatccttcaacacattcagacaccatcagatttttagcagtatttctttccattgaagccatattgcgagctaaaggtgataactctccctttgagataacttgcaataagacttgtgacagaaccttcacgttgccctttgggaaaaggaaaccattcaccttgtcattaacctaaatgtgatagaattgtagtcagtaatttgacaagaaaaacttatcaaaatgccgtaaaaaaataaataaattgcggcagcatgatcatttcaattttattttcataggtattatgattgatgtccaagtaaaacaaacagcagaaataagcacatgttcaattaaacaactatatgttaacaaaagaaaatgaaggcgggttcaatgtgaagatcataaaacaaggtggaattatctgaagattatcataccaaacatatgcagagaaataataaaaatgataataaaaaaatagggcaaaaagaagctgcatgtgaaggttgtctggatttgtctggattttcctaatggttaaaaatagatctcaaggtgaaggttgtgaatgtattcataataatctctggtccttcataaagaacttttctatttgcagtatccaaatctatgtctatgtgctccaaaagcagtgtaacgaagcttacatatttctttattatggagatatcaggagctatgattggttcccaagagtcatggctttgatcaaaatctctggaaaaacttgttcttcgaggaaagatccataaatcacaacatcagatgtgatgagaacattctctgcatcatccattggtggtgcttcacaattccatgtgggtacttcaagttgagagcaatggcctaagaggaccagaatntagataagaagcatcaagtgatgtaatcagaaacacctagcgtcacatttatttgattagtacctcaatggccaaactgtagttactcgttgaatgtgcacttagacaatgattttgagatgagaaactgaatcattatatgatgtaaaatggtcaagaagtggtaacaaagaccgtaaaacaatagaatgctccagccacaaacccctgtacaaaagttcacttccaactactgtaattacaatgtcttcagaactgtatcccatcttggaacgcaggacatcatttttggatgccacaagactgtctgtcttccatacttcagctggagaacccggaataacgaaaaaggttccagcatcaaaacttgagtacagcatctgcgtaattatagatgtatcatacaacaagaaacaatgcgagccacaaattcagaggaagcataaccacaaggtcatgacacggttcactttttcactcgtttaatatattatcatgtattatatttataggtctataatttgtgtaagtataaaaagcaaaaaaaaaaaaaaaacgtta

SEQ ID NO: 299992 - DNA, 1868 bp, Cannabis indica
gcaaatttatgcacatttaaccgttcgcctaaccaagaacaaaagaggtcgaggaattctcgaatagaagcaatctcgttaaaattagcccagcaaaaaccatcgtatcattcgcatacgtgagatgtgtaataggagggttccggtgactgactttaaacccaataagacatcctaactcttcctttctcaagaggagacaagtgagaacctcactacacagaacaaaaagatcaagagaaattgggtcaccttgacgtaatcccttcttaggaccaaattgcttcgaattccccattaagcaaaacaggaaaagaaaccgaggtgacacacttcataatgaagccgataaacctagcaccaaaactaaaggcagccaaagtattctctaggaagcactattcgaatttgtcgtaagcttttgacatatttagctttaagccgaaaaagccctctcgactgttaattttcttaaggaaatctaaaatttcatgggccaaaatactactctctaccttctcagaacaaaagcagattggaaaagggaaatgagattcttaagagtgggtctgagacgcttggctagcaacttagatatgactttttaaacaaagttacacaagctaatcaaacgaaaatcatcaaagcactgagggcccattttcttggggataagcactataaaggtttggttcaaggcctttacaaactcactcgtatcaaggaaatagataacattattagtaacatctttgcccatcacatcccgataatctttgaagaattttttaggcatcccatttggaccagaagccttaagaggaggcatagaccaaactaccttcttaatctcgtcaacgctaagggtaccaacaaggtcagtgttagtttcatatgagataattggctatctaacaaagcttggctcaagtggcaagaaaaagaggaagagaacacttcctgaaacttttggctgaagtagcgcccacctccatatgaccttcgatccaatcaacaccattatcagacacttctccaataaaattcctcctctgcttaataagggtggcagcgtggaaaaatttagtattcctatctccatcccaataccagttttcccaagatttttgcttctaaatctcaaatttacgagcctccacctcgccaatttctagcataatgtccgcctcaagttgaagattgttctgagagggaactcgtccttggacttgcaacaacagaccatagagcatttttagttttttatcacgaaaccaaaaaacctccttgttccacttggccaaacatagacaagtatgagagatacaacccataagctgaaaaactcttaaatccttgaatctcaagagctcaggcattcttaattacctccttacaactttcatccctagacaaggcatctaaatatcggaaaagggttctaaacctctccctgttcataagaagatcaagaaaagcagagcatgatctgactctttaatagccaatgaacgaaccccaggcttagggtaggctattaaccagttaaggtctccaacaatacggtaaagtatttccttaatgagaacttgaaaattccttccattagaccaagtaatatggttccccatacaacccaaattaactctgtcagagaaacttaataagccattcaacccattactgtcagctaggggtgtacgtcggtcgggttataacatatttttattaacccaatataaatatcgggttgcaaatatttaatcgtaacccgcccaatgaaaatttagaaaaagttcaacccgcccaatgattttgtcggtttggtcgggttaacccgtccaacccgttcttcttcttcttcttct

SEQ ID NO: 299993 - DNA, 1686 bp, Cannabis indica
acaaagtaatcttatttattaattctataattaatcctctataaatatagaattaaactattaatgattataattcaattcaagcttatatgaagatgttcaactaatatttataatcaataatgtctttataggctttgcagggcataatctccaataatcaaattgcagaattagcctatatcttaattaacttaaaatagatataacagtaagattatgatatcttttttattgttaataccagtccaatccaatgtaagcatgtacattcgattgaagtatattttaccaattccttaaaagcataccattagtcttagtgtaaccacgtcactgattatcacgttagtgtaaatctagtacactggtaaatattaggaagtaaataagttcggaacttataatcataattatttttcactataaagacataactgtaattgtgaatgactatatatacttgatttaataaaatttaaacatataatcatgtaaacaaaaacatgtgagttaagaaattgacaaagtggaaagagatttctatttctttactgatgaataaataagattatatagattaggttttatttagggcataaaaccctaatagaaatattgatgatatcatatcgaaaattggatcccaagtcgaagtgcaatttttggtatcaaagcataaaaatacgatctaacagtccagacctgatctctcaaatcgacgatccagatcccaaatacagctttaacatttggaatgatgacacaacctacgcactcttaagcactccaaaagtatagaagataaaccagaaacttatgaagaagctataaagtgcaaggatgcaaagaagtggaacaagaaaatggatgaggagatggactttttgaggaagaacaagacttaaggtttatgttccaaaaacccaaggaaagggtattgtgcaatgtaagtggctctttagacaaaaagaaggtcgaactaaagatgaagcagtgtgactcaatgctagattggtagtaaaaagattcacacaaaaagaaagaattgactacacataatttttttcctcatagtcaagtacaagaccataaggttaatgttagctttaacaaaccaattcaatatggagatagatcaaatagatgtaacaacaaccttcttacatggtgaactagaagaggacatctacatggaacatcctaagggttatgtagagaaaggaaatgggcacttagtttgcaagtttgttaagtccttatatcgacaaaaggttcgatgcattcatgaaaaagtagggtttttaataaatgttattatgatccttgtttatacttccatgggagtgatatcaatgatgtaatctacctgttattatatgtaaatgacatgctaataatcaacaaagaaagatctaaggtaaacttggttaaagagatgttaaagtctaagtttgagatgaaggacttaggaaatgccacttaaatccttggaataattattgtgagggataaaggcaagggatcctaaagatgtgtcaggaagataacatttcagaaggtgattgagaagtgttgggaatattttactaggatctagatttactaacaagtatgatgattaacatcctaaatatgaatatctctaaaacaatgaaattatatacataagagtttagaaaacct

SEQ ID NO: 299994 - DNA, 3013 bp, Cannabis indica
aaactatttttgttctcatttctaaaaataattttttaaaaataaaaaacagaaaacaatatcaaacatgctctaaatatttaaatctcgggatccaccactctggctttgaccataagattaagttttctcagaaactccaaaatagctcccgatattaatttgatattgggaggctcattacttcaattactccttgtgttcctcgaatagattttttagttgttgagaggattgtccaaaagtaatatataaggcgtactcagtaaatcttacaagtaaaccagatataaatatgacaactaaacttactgtttcccttataggcatatatagcccaatggtggatctctgaacatgcaacgtaatactggatttgaatgaatcacataacagcttcagtgtttagaaactaatttgctcgaaaaaatcgtgacaaatatgatacttcgtagttatatcctagctatagttcatcaataattacgagccttattataaagtgttagtagtgctaacaccatttaaaagtggcacatcgcaatcggacccataatttttacttgtggggcttatttatcattaaaaatatttatatatacattataatcactcttactagatttatttaattttatgagggcttttctattattttggtctataattattattaaattaaaaaaattatactcaattttttaaaaggcagtatttttgttagtggatagctcccatattgtaacttgtgggtccgtccctaatcgcaattgattagtgatatttaataaaaaatatattaaattatattagaactaataattaattgtaacaataaaactaattgtatatataggactagatatgtagttgtaccaatatcaatattacacataaaaaaatgttaattaagcactgctaatgccctttattagcatttttcataatttatcctttttgttgttattgttgttgagaataatactttagtttcaattattgattattatattatttgcacatggattggtgtgggtgataaatattatattgacatttaattttagtggggactacctttatattgtttatcacttgttcaaaccctaattattaaaacaactaggaaccacaattagttaaaaggctagttcttgcccacacttcttgactatttgcatcaataatatcatatctagatgagatacaattttctttctttatagaaaccatcatgagtaacactactactacttcttcaaatcttcatcatcatgaagcaactcaaacgacaaacaattcgaaaaacgacagactaagcgagctaaaagcttttgatgaaactaaagccggtgtgaaaggacttgtggatgctgggattactaagatccctcatatttttcatcataacgatcatcatgtaattgataagaagaattcattatcatcatcatcgtcgtcaccaattagtactactacaattccaattatagatcttaagggcgcaaattacacaaaaacgagagaaactatagtaaaagaaattggagaagctgcagagacatgcggtttcttccaaatcatcaaccatggaatccccgaaatagttatggaggaaatgataaacggggtttgtcgtttttatgagcaagatgatgatgatgaggagaagaagaagaagttttatggtagagattacaccaagccatttgtgtataattccaactttgatctttacactggaatttcaaccaattggagggacacttttttttgccctatggctcctcatcctccaaatcctcaatatttacccccaatatgtaggtatgtatttttgaaaaatattagagtttattaaatataccaagactttgtaattatatatatcaaatagatttgaaattttcaaaacaaacttttgtaatttgtattggaaataaatctcattctatataagtttattattgatattatttttattaatatataatattatgtaattattgtaaatttgtttatttgttaggttagattaattaggttatgtcatgttatgttatttgaatttaatgttaaacaattgccaaaaagataataattttacataatgacttagtataaattaaataaggataaaattagccattttaattagactatctcaagtggcttataggggacttaggtgttgaaatcaaacaaaccaaattaaaaaaaataattaaccttgttaaaataatagctagttttgctaaaatcatagaatagatgtttttttttaagattattttaatattatgttcatatttaattatacaaattaatatatactcaaataatcaactaacatgaaaaacttacttaaatttgcagggacataatttttgtgtactcaaaccaaataatgaaggtagggattttacttttggaattgctatcagaggctctagggttagagtcaaactattttaacaagatagggcttagtgaagggctaagtcttttaggacattactaccctccatgcccgcaaccagagttaacttggggtacagtttcacataccgatgctgatttcatgacgttgttacttcaagataacaccggtgatctccaagttttcaacaataataattggattgacgtaccaccttaccctggagcgttagtagtcaacattggagatctttttcaagtaagtttgtgtttaattttattatgaattatattttttgcctattttttcaacatatgcatagtggatgaaacaaagttggttcattatgtataacaagaaaatatgatatatcatgacatgttatgcatgtttaataattaatcattttaatatcaattattgttgtatatcactacaagatcaagattaaggctatgtttggtaggaaggaaggagagttagaaggatggagagttgatgaaagatggagaatataagggaggcagaggagagtaatgatccttttatattgtttggtaagaaggatggagt

SEQ ID NO: 299995 - DNA, 3850 bp, Cannabis indica
atagagtgggactgagtgggggttttctattgatgtggaaagaggagattaagctacgtgtggactcgagttcagctgggcacattcttgctatggttgcaggtaataattttcttccttggtctctgacttgtttttatggtaatcctgaagcctcacaaaggcagttttcgtgggaactgctaaggaatattaagagagagattcatggggcttggctttgtgtgggtgatttcaatgagattgttagtttggctgaaaaggttgggggtcgggtacgaagtgctggggctatggaggagtttagagaggctattgatgattgtcagttgattgactttagctctagtaagactgatcttacttggtgtaacgggcatgagtctaatacagttatgaagcgccttgatcgaggactatgtaatgaagaatggctcctgaattttgatggggcggatatcaaagtgcttgattggtgggcttctgatcacaaaccgctggtagttgatataccgttgattagtgatgaacaaggggaacaaaagagtaaaaaccagtcgtttccactttgaagaagcttggtgtgaggaggatcaatgaagagaaattgttgagaagaagtggagtgagtgggatatagtggtttcgggtggggattttaaacgcaaaactggtcaagtgggtaaagctctggataattggaatcgtaagaagaagaaagtgcttaatcaaaagatcaaaaagctaaaggctacactgaatgtgttatcctctagttcagatccaggagcttggatggaggtgaagaaaattgagaagcagctcaatgcagttttagaaaaagatgagatgtattggcggcagcggagtagggctttatggttgaaatggggtgattcaaatactaaatactttcatcgtaaggcctcgacgcgaaggaagaaaaatgcgattaaaggattgatggatagtatgggtgtatggcatcatgaagtgagtatggttcaacgaattgtggaagattattttcggaatatttttcgctcttcaaatatgccatctgatgtttttgccgatgtgataaatgtggtccagccaaaggtcactgatgatatgaatgagaggcttcttgaagagttcacggctgaggaaattgtaaaggcagttaaagagatgaatcccacaaaagcaccaggatgtgatggacttccagctcttttttaccaaaagttttggaataatttgaagcaggatgtgattggaatatgtttgaaggtgctgaatcaaggggctaatttggagtgcttgaatgaaactataattgctcttataccgaaagttgaaaagccgttaaaagtcgaagagtttcgccccatcagtctatgtaacgttgtctataagatagtttcgaagtgcttggtttctcggctgagtggtgttatggatttaatcatctcggatgcacagagtgccttcattaaagataggcttattcatgacaatgctataatagggtatgaaagtctacactgtatgcggaaaaatcgatttcagaatgggggaaaaatggctctaaaacttgatatggcaaaagcatatgaccgtgtggagtggtcgtttctcaaagccgtcatgagtcagttggggtttgctcaagtttgggttgataagatcatgtaatgtgtgacttccacaagcttctcttttctgattaatggggaaattaaaggcagattgatcccgaagcggggcttgcggcaaggcgatccgctctccccttttcttttcctcttttgcgcggaagctttctctagacttattcagcatgaagagagtgaaggtcggctgagagggattcgatttggtcgccaaggagtttcgatctcttatttatttttcgcagatgatagtcttgtatttattgatgctgatgttgctagttgccaccaatttcaacaacttttgagtaagtatacggctgcatctggtcagttggtgaattatcacaagtcggaagcttgttttgggcgcattgtctctactgaaatgcggtctcagttggctgggatgatgggggtccgggaggtggaaaatcatggtaagtatctgggttttccgtcctttgtgggaagaaaaaaaagaattccttgatgagattaagaataaggtgtgggcaaagatgaagggctggaagaattctatgttctccgtggcaggaaaggaagtccttatcaaagccattgtgcaagccattcctacgtatactatgttttgttttaaacttccaaagaaaacaatttctagtcttcatcggagggcatcgaggttttggtggggttcatcggataaggagaagaaaattcattggtgtaaatggcgctacttgtgtcggccaaaggataagggaggattaggcttttgcgacttgtggatgttcaatcaagctctccttgccaagcatatttggcgttgtttacgacatccgcaattgttgtgtagtcgggtcctgaaagcttcttatttcccccgaaagggagtactagaggctgggtgtggagctaatgcgtctttcgtgtggcgaagtctagtgtggggtaaaaagttaattttaaaaggctatcgatggcgagttggtaatggagagagtgttcgggttctagaggatccttggctgccacgtcctatcacatttaaggtgtatgatcagccttctcttcctgcaaatttgtatgttactgatctaaagcaggctgatggcaatgggatgaaggttttattcgctcagtctttaacactacagatgtcgatctcattctagccattccttgttcggattgggacttgaagacaaaattctttggcactacagcaaaaatggagagtattctgtgaagagtgggtatcgaatggctgcctctttaactaccgaacagcatcagtccaatgatcaatccattgtacagtggtggaagaagctatggcgcttgaaaatccctccaaagatcaaacattttgtttggaaagtggctcataactggttgccagcaaatggtaatttagcaaagcgtggaattgcttcgggtgtggtctgtagtcgatgttccaaccatgttgatgaatctattgctcatgcattatgggaatgtaaggaaagtaaaggttattggaaggtgagtggtttatatgatgatttgaaacagatgttgggtgaggattatttgtctatgtttatgagaatagcatcggaatgggaaaaggagaagttagagttctttcttttagtgtcttggaatatttggaatgtgcggaatactgtggttcatggaggctgtcatccgaagccagaagagatgatcgaatggtgtgggagtttccttgctgagtttaggggagatgctggcagtaggagcagttaagactcagccgaggatcgcagatgggttcctccatcaatggatcaagtgaccatcaatgttgatgctggagtgaagcagggaggcatggtctcgagattgggatatgctatgcgggattcgactggtgctgtgatttcggctgctgctacggtgctgcagcaagcactcccaccgctacagctggaacttatggctatcaagaggggaattcaagctggaattcagaggcgacttcagcggtttagcgtctaaaccgattgtctacgagctattcaattaatccaaaataaggagaatggctgctgtgacattgatggattgctagatcaaattagagctttaatttctcatgatagttttattggtatctcctttgtatttagagaggccaatcgagttgctcatgctttagccaatgatgctttggttcacaa

SEQ ID NO: 299996 - DNA, 771 bp, Cannabis indica
tatatttaattaatttcaaaagtctatcatgaaagaaatggaactgaagtggagttttcctgtagtagctaaattatattatatcttgacaagaaattaagaacaatgacattattttcaaagtagaaataatagtttgatcgcttccattttagtttatcactaaacaagtaaagagatttttgtttctttagagcaggtatttcatttatttgtattaggtatcttcatgtattaggtatcttcatttggtgtattttaaaaatgattttattttataaatgtgcaatttgtcattttgttttgtatcgtggatatagtgtttatctttgtattcattgtggcttattttgtatcatgtatggtaatttgtttatattctggtgtgacttatttggtatcatatatggtggtttgttgaagtcattttttgagttcagtctaaaaatagtgtaaggtagcagtaacaccatcagttctaaaaacatcaaagataatttatttttttcataataattttcagcaaagaaattaaaattcctaaaaattactatatcatgaacattattaaaagtatccaagattgatgattgttttctaatgagtaattttgtgttacatatttttggacagtcttctaggtagcaggataagattgagatggatccaagatgttagactaccaatcaggggcgtctcaaatatttttgaggccctgttctaattttaaaaagtaggcccctaacaaaaaattataatttgtaaataata

SEQ ID NO: 299997 - DNA, 1354 bp, Cannabis indica
gaaagggttaagtgctaacagaacttgagtttaggaggttttactactaaaattttagaattaagggttagttgcaaaaatctgaccacttaaagaagttatgccgcaaattaccctattttaaattaatgatgattcgttttgaggtattatacaacaacaacgatagatatgtgatgagagaccatgtcgagattttgtgacaaaacatttgaattatattaattcaataaacctaattatcaatatccagctttgttgtgttcaaaggaaaaaaaaaaatccagctttgcttaatcttcgattaaatgtggtggttccattggaccatttgggttggtgagtggtagctactaatttaattattgaattttgttaataaaaatgccaccgaccatgaatatatgaacaatgttcataactttatatacagagaagagtatattatatgctttatggaaataattttgcttaaaaatatgatgaagataatatgttggcatttaagataaaatggatgaggttttatctcaaaattaattgaaaataagaaaaataatatatttattatatatatgatattttattttcatacatcatatactaattctaatattctcatcacgtttgaacttaaaaaatgagtataacgaacgattgttaagagactacacgactgagcgtgaagtttgaaaaaatctcacaaggccaaattgagaaatttatagatatacacgtcgagaaatttgtgaattttttaaataggttagacccaacactaaaaacggtcacttattggatttttatttttgaaacaagtctaattaagaccccaatactagaaactgacacttattggccgaaaaatcccaaatagagattaaataggaaacactagaagtttttttggtttggctctactatattagaatttaagatatatatatatatatatatataagatgcagtgtaggtttctttcatctgaaaattaattgacaatataaaatgagtaactctctacataacacaccgatctcaaatcaaaatcaattaacaataagatgcgccacataaagttaccagtctttatcttttatatacacaccaaacccataaattcttttttcagagccaagatcccaaacatatcttccaattctcaatgtttctaaagtatagtgttgattcttgttggatattagagtgggtatagagggtatattgagagtgttttaaaactgttttcttttgtttgttctttgattgagaagtaataatataaaaatcaaacgagtaactataatagaactttatattaattaatatatataaaataaaatatagaacctta

SEQ ID NO: 299998 - DNA, 1119 bp, Cannabis indica
aaataatgggaaggaccctaaaatggtcttttctcttttcaaaaaaaaatagagagctcaaataaatccaaaggtccaagcttttggtcttagttgcatattgaaaagaataacaataacaatatcaaaatacacaaaaaagaagataaaaaataaacttttataaagagtagaaatttaacctattccaagatcaggatgaattacagctatgtttaacttcaagctatcttttttggccatattgtactttctttctggctactccaccaaatacctctctgcaaattaacatacataacaaccttaaaattcccaatgaataggcatatccactgcacaagccatctttcagaaactacacaatttataacaacatatccatgaacttgtgggaaccattctcaaatggtagaaattcaaagtaaccaaaagtgtacaattgcctttatatagataaaatactaaaaaattgattacaatagaaaaaaaaacacttactattcttcttattgtgaagaatttttctcataaatattgacaatctcatatgaagttttttcttatgtatttacaaaccactcacagtcagttccaaatttcaattcttcttatgtatttaatttacttaattaaaccacaaattataaatttaacaaaatcaataaaataaaaacagaaatccaaatctctgtataattaatatatgaatgatgctacaacaaatgatccattggcactaaattcatacctgtgattgatgttagacaacccgaagacctatgctcaggaacctaaagggaattcctcttagagatttgagattaatgatcaaatcaaagaaagaaaatgggttttgatttgagaaaggaagagacttggttctttctttctggtaagagatgagaaaggaaggagaagaaatgtttgggctcatatgattgggctgatgaaatgggcttgggctcatatgatatggcctaatgaaatgggtttgggctgggctaataacgggttaaacctgacaaccccgaaattacactctataccctttttatattgtcctcttttatttttaccttttttttaagggaaattttcatgggccaccttattttg

SEQ ID NO: 299999 - DNA, 3026 bp, Cannabis indica
agttggcaaccctctccatagctgagtcaggcccgactcagattagacatagaagaaatctcaaggtatccgattagcgatttacgtaaggtgaaggagagggtttagaccagacacccattatgagaaaagaaatattgaaggaaaatctgagaaccagaaggatagagaaaaaggaagaaagagagtgatgatctcaaccgttggttaattcgattgatattattgacggtgaggatcatagatgatgcaacaaccggttgtgatgaaatcatgtataatgagttacataatcctttgcttatttgaggacccaggattaatcataatcacgtggcttatgttgactttaagtttacatcttggccgttaattgatatcattttgcaatcatagtcaatactaggcttacaagtacttgagaaagtcaaggaggaatagaatttgggtgtaactaagggtaattatacaatttatcacgtttgagaaactacaatatatttagtggtaattgaggaattctaattacactcttaaaatgttattccaaaaatcacctaagtgacgtagtattaattggagtgacatatgacaaaaaatggacgttgggtcagcatacaacaatcctatagattggacgggtgaaccaagagacaagagactggtcagcacatgacaaatctaggaagtcaagtgtaacgtgctatgttagaattgtcgaatcagctcgactaatccaatagctatgtctaccaaacgttgaccaacagaccttatcgactaaaggggactaatccgactccgcatcaagaaggcgacattctggtcggaaagtccaaacaaaaaagtagcactgacttattccaaatttgtgacttcaactccacaattcttgaagactaggtcattatggatacctagaatggtgggattgagggaatagtagaattaagagaataaatcagtttttaatgtatgattttgtacttaatatcaactaattcacttgtaatcctataaatggtagcttattttgctatttgaggaaccgaattctagactttcgagagagctattacgctatagaaatattcacttgtaatccttggaagaatattgagaaactcgcgtaactctagttcttgtgatcttaatatcctctcaagaaatactaaaaaaaaggagtagtttattatcatataattggagccggatctctataaaatttggtgtcgtttatctctttactttaaatccataatcaaaccctttatttttgtttatttgacttcgcgtcgttaatcaaaaatagggtcaatattttggtatttttattcagagttaaaaacactttgctcaactcaaaatattcatatttccttcctaaataattgttcaaactagaagagctttgtccactaaaccacgtgacccgatggccatcaatccaaatgttcaggtgcccaccaacaccaacacggataatcccaatgtacgcctgccacctcacaacaatgccttagtgggaacaagggtcggtgacccagtatccacaaggatagaggtcagattatcggttggggttactactaagacccacaggtttaatcctggtgtgcaagagttccaaaacaccaccatgttgtttgttggagaaacatgggatgagactagccaacctaaagtaggagagtcatgtgtcgacctgagagataatgcacaaatagacaatctctaagaggttctggggcaggtccaaaaccacactaatagccttcaccacaaccaagaagaaacacgtaccaccataaatcaagccttcgactagcaccagcgtgaatttcaagagtggatggactgcaccacccaagatatgtgagcacagcaagataaaatcaattgttgggaaagacaagccacaaaactcatcaaatagttcaagcaacagactaatgtctagctgcctaaagaaaacaataataagggaaagggccccacttatgggccgaaagaatgtccgaataactgaccaaggcctaactaagaaaatggtcgttagggacaaagatcgcctactgatgaacaattcttgctcggacattagtttgggaataacaatcaaaacaatttctgacccagatcagaaggaagaataaacgaggtgcctgcccaacctgttaaggtgtcacgagatcaagtcatcccacactagaggaaccgagggatccaagtttacaaacattggaacaatggccagcagcagtagtagggtcagagaaggaaggataaccccaaagtttccagtcatcgacaatattatgatggatatgatgatgacgaggctaaaagttgagcccgagatggcgatcgacagtgacagcatgaaaatcatcgtgtcgaccaaaacaacaagcataatgatgctgggataatcacaacaatggtagaaaccccctgaggcaagaaagagcataaagccaaaatgctggtgggagaccatgatcaaatctgtgttctaaaggatgggtttgaggtttggtgatgacttacgagactatctgaacagaaggagagaaaactgggattcaaattttgccccaccataggaaaaccagtcgaacaatcaaggcaactttgtcatgaataaccaaggaaactttgtaccgtatagagttgtaacaccctaactagcataggcgtattacgtgatttttaaacgtattgtgcagctcgttgctaatcaacaaggtttatggaaatcgtgattaattaaaatttttgctatttaattaaacttatataatatttcatacaaaatactttgggatcccatttacaaaatactttacaaaaagtttactgtctaatacaaaatacttgtcgcccagcgactaactacaaaagcactgttgtcccgaggatcgtatgctccaggcctaactgccccgacatgtacaatcttcatcggctcgtcctcacggttcctcaaccttggccttgcccatacctacacataaacatagcac

SEQ ID NO: 300000 - DNA, 2575 bp, Cannabis indica
aaaaaaaaatatgaagtaattccccttaaattttaatagtaaaacgattcgggattattctatacagaataaataaatacaaaatcttttataaatattatgtaaataagataatagaattagtagttacttatgtctagaagggaggtaaataacaattgttatcataaccctcatcattattatattaattatattttccagtgttatgtagaatatgctactcttttttgtctaaaccatctgttgttgttaattgggctggttgccccgcttttggattggttcaagcttaattgtgatatgacagtagataacaattgcatgatgaattaagttgtggcaatgaaccataatagtaatattgtttaatttgatatacgaaaatttcattttactcatcctttcttaagagaaatttgagccaattttctggcattggaggttagtgctgaaaatagttagtctttcatcatctttaaatgcgagtcacaagttgttgttaaaactctaagagaagaaatttctacataaaaaatagcaaacaacatttaccaatgttttgttttgagctaatattttatttcttgtaatatttctaagattaatagattttgtaatactaatttggctaactggaaattagttcatgatatttttttttttgaattaagcgtttatatattacagtgcacatgagactcgaatcaggactttcaacacacatgcatcctcctatggccacttgagctaacctcaagtagttccatgatatttctagttttgttggggggcgttcgctcccaaatcacattctttgtagagaacgttttaatcttttgatttatatataaatgtttcttttcaaaaaaataattactaatataatcatatataaaatagatttttaattatagcgtgtttagcatcaaacatgagagtaattttttttaaacgatgaatatattattaaaataatcaagtgtacaaaaataatagaaaaaatccatctaattaagtttctatttatgtgttcgaaattcatgttaattaattcttatatcatggattccactcatatttcaaaaaagagctaagcacgttaatagtgattaaattaaaaagtaaaaaattcgatatttaattacactaataagttcttctcaaaccaatttggggccttagacacaaaaaaatctaattaaacttttttttatatatatatatatttttgtatatatttgattagttatattttttaataaataataataaaaatataacatatagtatttttttttaaaaaaaaaatccttgaatttcttttattatatattacagttctctaatttaaggacccaatcgtatttttttttttgcatgtaatgtgatttattttattatatataaataaaaagtgactcatgaatttctcataaactattttatttttaataataaactattttatttttaatataaataaaaagtcaccccatgaatttctcataaaccaaaaattctgttatataggcacactttatatagaatagatatttgattagttatattttttaataaataataataaaaatataatatatagtatttttttaaaaaaaaattaggacctttttgttaaagaattttttgggactgagtgggaagctttgagcctgagcctctactgtccacccttgagtctgtcttgtacaccaatagtgatataacaatttattttatataataccagacactataaataccttttgacatttctctttataaaaattagaaaacaaacttgaggagttcatttatatgtatttttaggaataaataaaagatatatattaagagtgatacattacatgtatacacatgggagcattaaactagctaggaaggggggcgttgtccatatatacattcataacaataacataaagagtagttggagtttgatgtggtcggcaaagtaagtggaaaaataaatgaagaaagggcttttgttatttgctacttaacccatggagcctatatataaagatgttgatggatttcaatatcaaaccttcaaagcaaagatacatcttcatcatcatgctatatatcattattattattattattattattattattattatgaacaaacaccaattctctatatatttatatctataatatattggtgacggttatatagaaggtcttatttggtctttctttcctttttaccaatacgaaatataatcttgttttagtacgtaaatttattttgttttgtttgattgttagtgttgagtttagaactttaaacactgttgttgaaagttggaggagagaaaagtgaggatcgcgtcaagttataatgctatttttttttagttatgatgtttattgtagctatagttgacctcttacaatattttatgaaaattggattgatttatgttaccgaactcaaaatataaaatctttaattttcagaggtagaaaagaaaataaaagaaaagaaaaaaaaaaaaaaaaaaaaaaagaaagaaaggaaaaaatttatttataatttttt

SEQ ID NO: 300001 - DNA, 3328 bp, Cannabis indica
ttttgtttcacaagaaaaataaaattgggtttcttttgagatacaatctcctcaaggaattgaacagtccatcggttcccaagcccacggcaaatccagcttagaacattcataattcctggcgggtctgtccagcagattccgccccattcaagttttttgaaatgtcattttcctctatgactattgcttcaaattggcccacaaccggcccaatcactttttctaaagttgtcttccttctctttaaatccataatcaagagactatttttctttgccacctcatcaggagaagattcctcagcaagatttgacttgttaattgagtgactcatcactccagctgtctctccatgggccgatatcttactatccacaatcccataatttttgtccatcaccccagttttcggctgttgactaggagaagatgaagatactggctccttaatgtgatttgctaaatttgtgggagtaatcaacggtgatactgcttgtctgccttccgccgtggtaatgtttgttgtcgccggtgttgatttcagagccactcctgactttaaccacttcgaactggttgtgtaatgcttccttctggggactgctttcagctccaggttgtattccttggtcaaaagatgtgctggtgtgtcaaatagcttatcgcaaaatttctccgagtgacccaatacgccacagataaagcaaaatgtaggcaaaccttcatatttaaactgaacatgacagaaaagcccgttctttcgttcaagtttcatcgttttttccaaaggccgtgtgatgttaatcttggttcgaacccgcaaatagtccctccataccccgataaaattatttgggtccgattcaacgaactcccctatgtaatttgccacatcacgaaccactctttccgatttgaagccagacaccatctcatgatgctgaaccaaaaaagtcagatgattaagctctactcttctcgggttttctcctggtttaactctttcaaagattagtggaactctatcaaatgtccacggactgccttccattactcgatcgatatccacatcatgataaaattgaaaaataaataggtttggttctagttctttgacatataagcctctgcccggttgccataacgtagccattttatgttgcatagcttggaaatcaatgcttcttgatgtaagaaaacgtcctacgagtaaccatcgatcatctatttcagacagatcatcatcgttcatcatcatagaacaagccccccactgccctgctttctgtgctttcttgatcataatcatcttccaactctaccaccttcttgccccttgaatccataagcccttaattatcccacgtaaaaacaaaatcagaatgaagaaaaaaacaaaaatcaaacagatcaacaacacttcataggtgaatcaaaccatgtcagatgacaagacctttcttttttaaaaatagagttacttacactaaatgagtaaaaaaagcttaaatttacaaaatagggtttggagataggaatttactactaaatgaatgatgtttagtatatgtatgatgttaattagcctgattaacaagacaataaaaaatgttttttttcactaaattaaaattgaaaaaaaatagcaacataaacaaaagacaacgggacctctaaaattgaattgacacgtttggtgagcaaaaaaatctgcaaatatagcatttactaatatctggtgagagcattaataataacattaatatctagtcgttacttgttagatatgtatatatattataaaagcattagttattatcaatagtgtttaatactttttaaatctgtcatcttataattatcagcaataatctttaaaagttattacatagtcttgatacttaattacatacagttagaaaaacagagagaaaatataaaagagctcacctagcttaattaatgagcttgctccaaaatttatatttagataagaagtggttacaaatttagtttggacgtgtccattctgttaaggagaaaactaaaaaaaataaatcctaaaagattagacactaacttcctaaccaactacttaatagtcgttaacactcaccttaagttacactaaggtgagtaagtgttaaaattgattctgaatttatcgaactgtggtattgacaatggtttggtaaagatgtcaactacttcttgatttgtggagacataacgaacatcaagttattgtgttagaactctgtcacgaacaaaatgcagatcaagtttgacatgtttggtgcgagcgtaaaagatcagggatagaactacaaaaagaaatactatgtaagtttcctaattgacaagactgacaaaaaagtagattattacacttggaatgggagggtaatagctttattacatactgtagaactggcttggaggagtggccaagtctgtagtgccaaagttgagctgatgtgttattggagttagattgacatgcaagcattgtggggttgtgatggctttagtaggattgtgttctgtgagacttttttctcttcaggttgacatggtagagaccatctataaaagagccctgaagaagtgcttgtctcgtaatcttgtccatgacaacacatgaattggaatcaaattaaagaattgtatattgtcatttgttattttcaaattgctaattaaattctcagctatagcaggagcatgtaaaccatcattcaattttaaatattttttaggaatattagtaggaattgatttgtaaccaatttgagagattgcgatacatgatctattacctacgatgactttagctttgtcttttatagtcagtggattaattcatctggtttgagtcatttgttacatggtgagaagcatcactgtcgatgtcccaaccagctcttgcactttagttggtggaccctactaacagtgcttgagggggttctttttgaggattgtgattgctgttctgagagttatcattactagagttgtcttgatcatacctatagtagcacttgtaagctatgtggctaatctttccataaatttgacatgtggggcgattttcacgtcctttagtagatgatccacgacctccattcctaaaatttcatcgatatatttttgtttgtgcactacaaaaaactgctacttttagtgacaactttttagtcacaacataatttttttgtgactaaatgtggcttttagtcacaacaaaatgttacttgtgactaaaacatagtatttagttacaagttgtcactattttagttttagtcacaacaagtattgt

SEQ ID NO: 300002 - DNA, 3025 bp, Cannabis indica
cgttaactaattataaaatgtcacatcaatacagtgttagacactttaaattacataataacaatattcctaataattaaggtatcctcttttttctagacctaaagggtgagaaaaggagaagttttggctgtacaaaggttttggtgaaaaaaaatattaccacatatattttagacgtaaaaattgagtaataggttataacaaaaggttgacgattattctagtcttttattaaaaaaccatttcaattttaatattatgttttgcatactttaactttaaatagagtatttctagggaggagtacccaattgttactacatcatcaaatctcattctatactatattgttatacataaatatcaaataacaatacttttaaggatgttgaacaagtactaattaaaagtgcatataacttagtgcatatatctttactcacattattagtgtaattattaaaatcttaatttggacagtggaaaacattatataggtagattatatatgagaaatactaaaggttaccaggggtgcattggtccaactaagtatctagttttatataatttaatataatagcttttagggagtatcgttagtcaatcgcaacacgacatatcgagaaggtgctaagcatcctggtgccttatagcaatgctcattatatatatagagattaattaagctaattaataatctattacacatacgtacgtacctgatgaaaaccaggttctctagtaagaggaacaccaagctcagccatacaagcctgcatacgatcatcactcccatacaacccaggatacctctgaatacaacgatcttgcatcttctccaattcaacagccaaaggataacttatagcaaatccaccaccaccataagccataccataagaaaaataaatgttttgtacgtgactctccgaagaactccccacataataaaactccctatgatcatatttcgataaaaccctaaccaaattctcaacaacaaaaaccgtatcatcatcacccataacaaaccacctcacatccttcatacccatcctaaccgtctccgaaactaccctagatatcctcaccgccgatctctgaccctgtcggttagtgtacttaaaccgcgacgtgtcgcccgagattctaatctcgggcaacaccgcctggtcccgccaactcgtccttaccttcttgtccatccaaacgaaacccctcgtctctttcggcctccaccacaccttgatgtactcttttcgcttgttccatagcttggacgaggccgcgatcccgaaaactacgtgttttagctccgttggagttagggcaccggcggcttttttgttgacgcctttatatttctcgtgttgctgttcgtcctgtagaaatgtttcgggtttggatatttttgaagagaggttggtggggagggattcgagatcgtcttcttcgtgtacggtggcggcggtggtgggacaggtgtggtggcgggcggtgaggatgagattggaggaatagagaatgtagagaatgcaagtgaggagaatgaaccatgtgagggtgtttcggaagcttgggatgttggaataatggtggccggaagggagaacggaacgcggttgtgcggtggtggcggtgatggtggaatttgataaaggcatatttgtagtttgactgatcgatcgatcgatcagagattaattataattattaattaacatatgttaataataattagttgtaaaatgaggttttgggggttaatacctgtttcggattattcggatcagagagtaagagcttggttgcatttgggttttgagagagtaaattttgtgtgagatgtttgttatgatgatgatgaaaaaaagagattcaacgctagtaatttggaacaagtcaagtggtaaattaatgtagctatatatgcatgttatatatgtaatgggaaatgctaaaaggcactagtggtgtcaagcactcttctacgtgtcaatattgttattggtctaatttagtatcgggtcccatatagtttaatataataatttttaaggagtatcgctagccaatcataagacgacacgtcttaagggtgctagataccaccactgatacctaataacaatactctatatgtaatacattatatacgggaattgtattgtattgttccaattacaaagccaactttcacaaaaatatataataacaacatcttcaaaggaaaaacttcacatcattaacacactaattaaattattagtcagcaccaaactccacattcattctaagccttcttttaaggagaaattagattctataccctttttatattgctctattttatttttaccttttttaaaaaaaatttatcatttttacatcttttttaaacactttaccgattttacccctgtcaccttaatatactctccacgtaagttccttatgttagggtattttgggcacaatacatataaaaagaggtatgtttcaattaaatataaaattacaggtagatttggttaattgataaataaaagaggtatttttcaataattactttaagaaataattaactttttttgaaaaataatcataaattatttattgacaatatacataattatattgtaattaattattataaattattaattgagatcttttaagtaaaatattattattgttgaagtttgatttaaattatttatttatttttttatctatatttataaagttgtaatatttttaataactattaattatgagaaaatgtgttttggtgcacaataagttttacactatgtttggtagaggagagggaaagagggagggagaaggatagaaggattagagaattaatacttttgtttggcaagagagaagaagggagaggagagatggaaggagagaatctcccttcaaaagtccaaacacactatttttaatctctcttaacatgggagaatttaagaaaaagacaaaagaattatataaaatatcttttcta

SEQ ID NO: 300003 - DNA, 5805 bp, Cannabis indica
gcccattaggggcgggtccccatagggtcccatctctatggaaaaatgtgccaatttgtccatcatgtaatcctataaataggagccttaactcctcattgtttctgagactcacatttgatactaaaacattgtgcaattataatctcatacctagagcataagaaactcaatggagtttcttcttgttatcttttttcctaatccaatgaatataatctcaaagtagacatagctctattaccaatgaaaggatgttaattactataaaagttcttgactttattttattacactgctctctatatttataattattgttttcttcatatattgccattggattttacgacagtcaatattttggtgttttaattgagggcaagaacctctaaaaatccaaatcatattccatggctatcaccagatctacaagtgtagaacatccaactgttgagacgacaccttccatctctggcatacctatacctttgaggcacactgaaacacagattgtacctcataaaacacccaagtgagtcccactaaggtgttagtacaagtgtactagcccacaatgaacctcaagttgacttaggggaagacttcaatccttatgttgagcaattgaaagaggcgagaggccttttaaactatgactgctaattagatagctacttaaggagctatcaacgagacactatggaagaaaaaaagaagacttcaaatagtaaggttctaccgcaggtaaaatgagttggaagctcatcaagagtaagttgacaagaggaccgttgtatatgcccgctttgtacaagaagatttatacatcaactagtttggagtaggtactgtaagagttggaggtcaaggctcaagagtaaaccatggcatcaaaatagtttatgatagggctcacccaaggagcattgatcacagaggtactagaccaccgagtgagatacgaattgggccttcttaggtagttaccaagagtaattcagcagattggggaccttggctaatcacctatcatcaagatcttcctactaatgagcacgtactacccaataattatcaagaaaattatcaatgttcttggtttcccaatgccttatgctctgcattaagtagacactctagggatatcccacatgatccattagctaatgacgaggcaagttaacaaaatacacgacaattgagtggtggtcaactaaataacagtgacatggaacctgcccatcatcccaataattgtaattacgatggaagagatcaacattgttatccttggccaacaagccagcatcaaacacctgaggtaaagaagagaggagtttgagatcaatagcggctatcatactatgtacatcaatgactacgatgatgatgaagttgacaacatatattatgaccaggatgatcaacacctaggggcacaatatgtgtcttcgcctagtcaatgagtccctaaaaaccctatttttccctagggtgacagagataataggcaagatactcgtagtaggtgccatgaaattcctattatgcttcaaggtgattgttatgaaaatttgtgtgtaagtgtacacagtatcatctcaacaaagattgaaaattaaaaattaattcaaaaagctaattatttttaaataagtttcaacaaaacaaaatatagtaatgagaaagtgaaaaaaattaacaaacataactagatgaaggaacaagctaaaatgattaaaatggcttaaaatgcaaaaataatatactggtaggagtattgtagcaaaatgagatttgtcaacttagaatttcaagcaagttcataaactttttccagtgccttatagttatagttctacaattaatttaaaatactcttgacaacatattttttttgattgatgaagtattagctcacttaaaataatgaacaagtattgggttatgataataagtctataaatttgatttgatcccacaatcaagaaacaagttcacattttatatttaattcttacacaaatatacaatattgagtttaattatttataaaatgagaacaaaattaaaaaaggtaaaaattaagaatactcatttagaaataataaagttaatatttatttaaaaataataaaaaattactaaaataaactaaaaattacttgagaacaaaactaaattaatgcataaaaagagttaataaataaatatatttttatagatttatcagtgataggaacaaggaataaccccctgacaacaacaaaagtcctaacattcttattccgcaataaggtgataggaataaccaaaaacctccaattctaggtaggctgatagccaaaatgctgagggaaatccttgaacttgtagtgccttcatcatgtaagatagacaacatgaagacttgagggacaatctccataaaaatcacaaaggcgaagggtgccaggtggaatttagtaccttcttttttgccttttaacaaacttcttgttgtcaaactagttgtacaaccatttggaaaactggacaattttaccaagatggtacatgaattcactacacctcaagcatataacagttaccttgatagggaaaggaggtctccattgcaagacattattaatgcattgtgatacctacctacttggaaaatataaaataggaaggaataccctttatctcatgttcaaaattttgaagtccaaacatatctataaggagtcgaagatattgtttagtgtgaaaacttcttagtgacctttggtaacactgctgaacagtagttttataaaatagctttgggaccatcacctcatgcgaagcatttttaagagccttctacgctaccaaaactctcctgatcgagcctaatgacctgttggaaattaatcaaggactaaaggagtccttaaaggaatatattcaatgtttcatgaaagcggctgcacacacaaatcaaggttaaattatcacgtttattcaacttaaaaagaaaatcgtgtgcattttacccatgaatttttaggaaaagcagtcgacttcattgaattggaagaagtcaaaaggagggcagatgggttggacccacccactgttgtgacctgtattgcccaaagtgctgaagtaagctccgctccttcaagcaacaaaacacagggagtaatagtgagaaccctctcgtgaatgaaaatagaaaagctaagattggcaatcaatcttcatatgagcaaggcctatatggctacatatgttacaacctcaaacttgaaagttgactcggaagaacaaacaactcaactcccaatttgtattaagatattagaacgttgaacatctgcacaagtactattaaaattatagtactctttagcagtgctttatcccgctaccacaagataaatttgatttatttcaatcagagaggcttgtttaaccttctaacattagtcatgaaatagcacactgctactcaccagtggtttatccctctaccagtagacagatttgattcatactgagttaagagattcgtattttcttcttgcactagttgtccaataagacactcctcttcaatgttggttgatcctgctaccaaagaataatggtggatcaagctaccattgattggatgtaattttttctaatcggagatgcacgcttgtccactatcgtattgattatgcactagcacactactcttcaacaaggctttattttataccaacaaataatttgattttatgctagtatgagaggctcattttcccttcttgtgttggtcatgcaatagcacactcctctgtagaagtggttcatcccgctactaatggatagcaatgtatctagttaccagtggatggagctaatttaacttaattgaaacaacattctacttgaacagttttgattcttttattcataagcaataggaattgggatttcatgaaaaaaaaaattgagcaagtgaagtctttactgctcaaaaaccattttacaaatgaactttaccaaaggtaaaagatggggtaggttcaaataagcagttctccgtagttagttatgtattcgatagggttggtcattttcataataagccaaccttatacaagtagaaagactaccatgggggaaaacaatttccgctaaatttaacaagatgatgtggactcgacatcttcaagattttaatatagatttgcttggaaaatagtgttggtggttactaattaacagttgaagatgctctagtatatagaatttacaaagcccaatattatccaagagggacttttctcagtgcttctattggtaataaccccagatttatatggaggactcttatggaagctaaatctttgttggtagcaggggctcaagggtccattggtgtgcaactgtcagtatcctctctgactcttggttaatcaatggagatcctcctgttgtattattttctcaccctgctctagtttgtaagcaagctagtagtttgatgatgctgcattctcggttgtgggatacagagatcatttctgatttgatcgagctaagagatcaataacaaattctgcttattcagcttgcctcttcggtgagtgttgataattgattctgaaggtttgagaagttggggcattatccagtaaagagtatttataggtacttggaaggaactactgatggttgggtggatgatagtaccactaatttctagaagagattatggaatctaaagattccaccagaggttactaatttggtgtgacaacctgtgtctggggtactacctatgtgtgttcagctacaaaagcatcatgttcttattagttctcactgtctagagtatgaattgagttttgctagttggtttatcgagtttatcaactgtgcaacccgaaatagctgagatagttggtataaaggaggctcttagttggattgatgagcatctgggtgaatgtcgttgttgaaacgaatagtttggtgtgtgtgcaagtgttggagagtcaatttcatatgccttctccatttggctttttggtccaggattgcaaacataaattagctagtctgagtaatgtttcgatttgttttgttgaacaatctgtaaacaaatagatcgattactcaccattgtttggcatggagttcttaattttccacatgtcgtgtgtttcaggagcaagatagtttcctaaattacgtattattgttatggaagacgattcttattaatgaagttggagtttattaaacaaacaatcactattataatggtgttcatataaataaacaactatgaaaaaaataattagaaaaagtttcttttatcatatcaaatatataatcctacatatagtaaatttattactttttcaatttttatcatctttatagtaatataaataataaaataaaaaatatttatatattttataaatttttttattgaaatatatatgttgcatgtacctttaatttgaatgattgtcacacaccatgatgtgtaaaattatcattaaccatgcattaaatttgatgtattggtctaatagacataatttagtagttttccacttctttctttcttttttcagcataaaaaaattctatctctacttaagaaaatttataactaatattattcatcttgtgtaaattaagggtacttttggtaacacttttttaatcagttttgttttttttaattagaaaagtaaaaatattttccaaaaacatattcttcactttttaattttttaattgggaatcaaatttttttttaaaaaa

SEQ ID NO: 300004 - DNA, 1238 bp, Cannabis indica
ggtgctttcattgagagcccaaaattctatttcaaaaagctctcatcttttgtatttatattctgcatggctatcacaagatgtggaggttcaattgaaccacgagaccctatggccacgaatcctaatgtccaagtgccacttgttgtgaccaatccaagcgtggctgcccgaccaccatgctttggccagctggccgacacctccaccatagaggtctggctaggagaataacctcctactagacccactgtctagccaaccactgaagttcttggcactggtgttggacctcgtgtttatgttggtgaaactggacttggggttggcaaccctagcattgacaaaccccacatggacttaagggatgatactgaacttgctagactaagagaagtcgtaggggaagtatagggttatacaaatatccttcatcatgactagcaagaaacacacattgctatgggcgatgccttcgcccagcagagacacaaattccaagaatagatgaatcaataagtcgtgatcctccaagcctaataggcagagctgaaccacagggaggctaatggatgaatatggaaagcctttgcgctataaagttgttataaaaaaatcttaattaataataaaaatataattaatatatataacagtaacagatttatatattattaataatattttaattttattatatgttattattgtttgataataacaagaccatttatcataataatagtaaagtgactaaataaaattaaatagtattatatattgtaattaaaatgtgagtgttgtgttggtgtcttttttattttatagaatgttatttaattattttttccttattattaaatatttttttaactttaatccataaaattgtactattaaaaagaaagtaataataatcaaagcaaaaaatataataatttacaattgatttatctgtcaaaaattaattcaccaaagtaaacaaaaaattatgagaataatattattgtattagatagcaaaaaattataatagtaatataaaagataacaaatcatgatttattaatttaatgaattgttgcaacaaaaaattaataaataatattttaaaatatctacctctcattcaataaaaacgttaaaaatttacaatatttaaattattaatacttaaattaatatttttaaataaataaaaaaactttaaaaatatttaatttaaatatatatgaacaa

SEQ ID NO: 300005 - DNA, 4522 bp, Cannabis indica
tttgatacatactaaattgtaaattgtgcaatttaaacttcaacatgtacaaaattgtacctttacaacataaaaaattgattaaaataaaaattaaaggaagaatataagcgtggacggcaggattcgaacctgcgcgggcaaagcccacatgatttctagtcatgcccgataaccactccggcacgtccaccattgttgaacagaagagcttaacaatatatactatcttgtaaattaataccgattatattgctaataatattaaataaataataataataaaaacaacaaaagagaaaccattgattagttagtacacagattcaaacgattttattcatatttaacgcagaaccagaatcagccatgccaacctacaacatgccgcatctcttttcttgttagcttagtgtaaagaaccatactttactacttaatcccaaacccactttgcatggtttcaactcataatgataaaaatctctgcttttagatgatatgatgcttattacttgcatttacacaaaccccactttcattttctgtgatttagttaggaaatatgacaatcttttgtggctgctaactttaacttatattattacaatgtgatttgcaggaagaattgggagagagaaagagagagagagtcatttctaaaaaatcacagctgggctggtggtggtggttttccaaatggttctgaaatttgtaagtttacatgtaagaaccaggagattgattcgggttatgtggttgatgtgtgctctgattttagtattccagagcttaagaattttaccttctttaagtattcagagaaatggggtttcatcccattccatatctgagttcataggtaataataataataataataataataataatatgaaacaaagtagaattgtgaagaagacacaaaatttaggatttgtagattttggtttttccaaatctcaaacccctttagctagtttatcattatatacaaaggtaatagctttaggaccaagtattgattctcctgcaacgtttggaaaattaaagactattgcttttcaggagaaaaactctgattcagttgatagtaccttagattcaagtattagttcttcacccacatctgaaaattacaacatctctatagttagtgtaaaaagaacaaaactttctcagagaaagaagttttctaagcctttgtatagtcatatgagtaaagtagagaacagttctcttataaataaggaaaaaatgaatagtagaactgcaaccacatctgggaattccaacacctctttggtaaagaaaaagagaaaatctgagtcagtggatagtgatttgagcaaaaagggcaaaaatgctgccatgaacaaagtgtccaagaggattcgtgggtctaagatgcctgtttctggtgtatattcagtatctgagatgaacaatttgttgattcagagtcatggctctaactattcagtggtaagagttgtgaaagttcagacaatttcttagcaatgaaatggttcaattttgttcttatatttcatatttctgtatgtagattccacagtggtcttcagcagttgaccatgaattacaagatgtggtattacagattgagaatgcacctgttgtagagaatgatccaaatctatatgcccctctttatagaaatgtttccatatttaagaggtaaatttttactttgtacttgattacttttaccatttattcttctttggaagttggttttgatgtttttcctttcgggtatgactgaattgttagaactcttcttaagcttctttcgaaaatgctagctcttcctttgtagcataccattagtcttctttgcaaggtggtttcaatgttatttcttctggggcatgactgaattctcagaaatcttcttaagcttctttagtagaaatcacaattgtttgctcaggcaagtaacaattacatacatgagtgaaacaatatatttgattgagctgcacacacacctctagtcctagctaatgcaaaccattattagcttatatcatttgctttacaagttgttgttactactgtttaatacataataaataaatggtaaatatgatttagaccttgtgttgtataaaagttacttattgattttttttttaataaattacaatttgaatcctgtatttttcaaaatggtacataagaatacactgatcttaattgtagttatttttcttttaatacagccaatctgaaactagtttctagcataaggagatacaaaagatgtaaccaacctggttataacactttcatcttaggtcattatgtttcattttaactaaaattgagtttaggatattattatgttccattctgaaaaatacaagatcaaattggtaacttttgtaaaatacaagattcaaaatgatatttacccttaataattttcatttaaagatgttaaacaaaatgtattggcaagtatatatttaattactagagcttatgtgaaatttatattgttctaagaatttcaatttttatttttctcttttgatttgcagaagctatgaattaatgaaacaaaaacttaaagtttacatttacaaggaaggagagagaccaatactacacacaccaatcctccaaggcatatacgcttctgaaggatggtttatgaagcaattagaatctaatgaagaatttgtaaccaaagatgcccacaaagcccatttgttttacttgccttttagctctcaaatgttgagggagaaattatacgttcctaattcgcacaaacgtaggaacattgtgacatacctgaaaaactacttggacatgattgcagcaaagtatccattctggaaaaggaccggcggagcagatcatttcctcgttgcgtgccatgattgggtaaatgcctttttcaatcttgctactagtgagcattgaaatgtttaattgacaattcaatcagccttagatcctttatcttctttatgcctgttagctgagaccacagttaagcattaaggtaatttgacatattgtataggaattgtgcaatagggatatcatggcggtctctcgaatattggccagtagccattttcttcttggtattttaataaaaatcagatctttcttactggtttgttcttatattttctgtatataagcttactggttcttatatataaatctcaatgtcacaatagtgaagttctaaccaaaataaatccatctcctcaggctccaaaagagacgagtcgatacatgggaaaatgcattagagccctttgcaatgctgatgttggaggaggctttgttttcgccaaagatgtttctcttcctcaaacctacatttactcgcctaatgatactctaagagaccttggaggcaaaccagcttcagaaaggtcaacactagcattctttgcagggcgaatgcacggttaccttaggcctattctgctagagcattgggagaacaaagaccccgacatgaaaatctttggtaagttgcctaaaaccgaaaatgcctataccaattacatgaagagcagcaagtactgtatttcagcaaaaggttaccaagtcaacagtccgagggtcatcgaggcgatcttttatgaatgtgttccggtgatcatatctgacaattatgtgcctccattttttgatgttttgaattgggaatcgtttgctgtgtttgtgttagagaaagacattcccaacatgaaaaagatacttgtttcgatctcgaagaagagatatagagaaatgcagatgagcgtgaaaagagttcaacaacattttttgtggcatggtactaagcctgtggattatgatatgtttcatatggtacttcattctatttggtataatagactccaccaaattgagtgaaataccgtatgaaaataagtagtctttcttaagcctttcttattttttactctaataagtttattttcactatttattattaattatttgccctttataaattaataaatctaagaaattttgatgaaaattattaaaaaaaaatgtagtatatcttattaaaaagttatttctcgttttagcatttagaagtaacttttttcgttttttttttcatgattgtgtacctcactttactgtgaaagttatatttcgtgaaatattattaatggctggtatacaagggatataatttagtaatgtaaaaaatttaagggcaaaaatacaaattatttgtcaagataaagaaaagtttttttaaagaaaaaagtcttagagagcatctccaataggaatgatttaaatcatacttgataacatagatatattttgtacattttttaatggatgcttaccatttgattgaaaaaaaatgtagataaagaatgttcatattcatacgataatttttttttttttgcatcttctctttcttattttattattactttgtcacaaagtaaaaaaaaaaattatttaatatatagtatgatggaattcaagaaaaaaa

SEQ ID NO: 300006 - DNA, 2072 bp, Cannabis indica
aaactatatgggacccgatacttaattacaccaatagcgatattgacacgtaaaagggtgttaggcactagtggtgccctttagcatttctctttttatcattgcttggtttgaacttagtaattaatgtaaaatgggattacattaaaagttattttttcataattatgtattaatatatcttattgttaattctataacttttattaaaattttgatgtccacataatataaaaatgagcatttataatggtactaagtaatattataaagtatcaccctataaatggttagcgattttttataattattattaaagtaaaataagtaggattcatattaaattgcaacaatgacaacgtgacaccttatttactagtatctgtccacgtgaattttatttctagcttcgtccctattcatagtagtgctaggtacatatagattaatgacatgtttactaaactgtaattgaaataagaataatgaaggtaagaaatgaattagttcaaaatataaaataattataaataatatattattttattgttaactaaactgaccggaaaggaaatcagaatcattttttgtatatatataattaggaaaggtaattaaaatgttttagtttgactaaattgttattgttagaacatataattattttttatttatatattttgaaggacatatatatcttttttatatttaattaataaaaatataattaatataaagtaagttaaggaaaaagaaatgtatttcttatgaaaatgggagaataatctttccttttatttttttcttaatttgtgtggatctcactagtttttttcattttaaaatttaataaataaatgaatgaggatcaattctttttagtaaaatataaaaatattggtcatatatatgtccaaccctggattaagacgagttagcccgtgtttaagacccacccaaattcaaggcccaaaaatattatacacatatatgaacttaatttgtatgataattttggataattttgtgaagtaggagttttttttaaaaaaaaaaaaaactatattaaatacctttagccgtacgttttttcaatggatctatatataaaaattatagactactccacttattattaattaattttaagagtttttctttcttttcatttttacacttttaaaatagtttttttttatatatttttattaaagttcacatagcaatcaataaagcaattttaatcacaactaaaatttatatagtaacctacataaaaataccatagcaacctaaactataaatttaaaaacaaaataaaatatggtatataaaataatccccgataataatactcgtatttgtatttgttattatatatatttttgacatagtgattagaatcactcatgaatttacgatgcagatatctgcaaactgcgtacaaatctccttgaactaagataattaatcgtctaaccgaaggacatgcttgtcaaaccataaattattaaagtaaacgagcaacaaactgcccccaaaaattattattatattttatttatagcattttatttttaaataaaggatttaaaatttatagagtatttgctgacttggcaatggcgttgataaaacgatccgtacagataatatcaaatttattgcactattattaataaaataattatataaagataactatacttttttgttattattaatatattaatcagatattagaaaccggcctttgtcggcaattatttactttcctccacgtgtacagttcaacataagagttttatttacattttaaatagggatattgacgactaaaccacctgaattttacggtttgtaacacttaaccacaaaaaccgaatttttggcggctaaactacttaaactaccattccgttttgttctgcacacctccgtccaaaaattacagttaagtgtcacgatggactgtccacgtgtacacacttgtagacgtggcaaatttttagtggtccacgtaatattatttttaaaaaataattataaatatttaaaaaacaaattaaaaa

SEQ ID NO: 300007 - DNA, 3721 bp, Cannabis indica
acccatgtcatcgtcactctctttctttggttcttcctaacctatccctcttgggtactctttgtttttcaaaagggggaaaagatccacaaaagatttaaagcaccaaacaggtaatcgtgtatgaatggttattcacaacatacagcttaatagtctaaaaactacacatttcacaaaaaaagtcaacaattttgtaccattataaaaatacccatctcagtcatgtaaatatatccattaacactgatacatatggtaatatgagcactggtgtacatatcctattttctatttaaagaatataacaaatttccatcagctgagttataatagaatagttgcattaaatggtatctgaacaagtaaattcaaacatgcctaagaaaataacaaactgactacgtctacactagtacactgtaacatttgtagtttataccacatttatatagagaatacaatttacaattcaaaatcagaaactatccaatacatatttctttagaaacctgtatggacacttgtaattgtttttatttatattaaatattctatttatgtaaatctttctgctccagacacgaaattacttgtatccctacatttgtgtttcctattatcgattattattcatgaatctaatctctaattgaaagatagtacctctaattatattatttatgattctatttcagattataaaaaatgaattttattgtctcagtacctcaattttaacatttataaaccgcaatctcttcccgcgcccaataatgatgattggttgagatctcatccagtgagattctttaaaatctccttcctcacttaaacagatagtctttccacaaccatcatatgtatactcattaacatttgaacaatttgccactaattgtctactgggagagaggtgaaccacatcttcgctttgtttgtaagtaggttcagataggacaatgttactgtttctacatagtgggtcattcttaggatccatagtttcctctcttccagtaattgttcctaaagctggcacaaagaactcagtcacagcgagaaggaaatcaggcacaacaagaactctaggttgttgaactcgaaccacaaatgattgagatgattttctccatctgtaatccatcaagaacattgtcgaaactggtaagtctccatgtaggccaacttcagactctgcttttctaaagctccccttatttagaataaaaggcatatttccagcagaaacttgtttcgaaccatctgtggatgacccaagcatgaggcgcatttcaggttttgtatcagggcgaacgtcaagaacagaaaatttaggtatagtgatgtagagatctgtctcggacaatgacgtcattcgatatgatacccaaagaccttctagctgcaatgtgggaaaagtgaaatgtaagtccacatcccaacatgagaaataaatatagtatcagaaagcagcaccaaatttaatatttgacatcctaacaccatgtccaaacagtaacgtcaaaacggttacaaaagttcacaagtaattgaaaaccaacaaatattaacacagatgatataattactcacagcaatatgagccaaaggtgactcatcatggatgccattatacaactccagcaaggcatggtcaaccacaaccgtcgatatggtgacagtacgcgacagaagattttgactattcgtgttaaccttgtcaaccaacagccgcattgtatcttttgaaccagatttgccaccacgaaaacttggaggaagcctcggttcttcacacaggttcatatatgcacaatcaagaataactttatattctttgctagtcatgacacagtgcaataagccaacctggttaaattgaaatctgtaagaatgcttttaaataacaatcctgcatgtgcatgacacaaaggaaaacacagcaaaaaaaaaagtaggaacaaagtaaatacaagacaaaaagtaatacactaaaacacaagtaaggattagtagataaaaataagccaacatgattaaacttagcaaaaaatcccaattccttaacagatcagaaaacgaaaataaggcaaaatctttgacatccgtgcacttaatacacagtgcatacaagcaagaggatggcttaacagaagtaaactcctaatgccaaaaacttataaacatactgcaaatcaaattctataaaacaaaccaagttaccttcacttcaagagaaaatgtcggaacctttttgaagacatccctcaaacttctccgaacataaatgtcaagtcctttggcttcacgtatcattggttcaccaatacgaccattaattcctacagacatgttaatacctagaacctgcaatttgctaccagtcagacataattttataatttgaagtttatggctcaagacaacaaaagcatgtacctcagcatgcagaacatcaatatggacagctgaaggatctttctctgcagaaccataccacctaaatgaattttcaacttgtagctggcccaaatcaagttgaataaaactgccccaaaaaaaaaggtataataaacaaaacaaaaaatgctacaaagacatggaaacactgaagtggatcaagcaatagcataattttattatttttatctattttcttctagctgaagtcattttttctctcaaatcacaaaatgggtattcctttctttttcttctttcaattcttcattttcccattaaaagaatcagctactgtcaaatgccaacaggccccgcactggtaacataaccaggtcattgtgatcaaatcaccaccaacatccctacaattgataataatgaaccataggcagccataaaataaaaggctgccccagtaacccaccatgctacatccaaaacattgccacaccacagtcaaaactaccacaagtaggacttcatcaacaatgcccagtcgtgactacttatttaatctcccattttatgtattaacaaacacaaccataaccttttttatccatcacatttcaacatcactttctgagggataatttgcagtttcatgatttctaataaattaagtgatatagtgagaaacacaggcagccatgtgtctgcattcttagctactaaacttcttaggggcttaaaaaatcaatttgtggttttgtaatttctaattcattttactggaaaacccatagtatgaaataggatcgtatatacgcactctttgctagtagaatttcttggcacaatgattattggagtgtccagtgagagatccaatttaagtgcagtagctccatctatctcatatttttgaataaaccactcaaagcctccaactttatcaacaagtttaatagcttcttcagtatgcggggtggcaagttccataaaataaactgtaatctgcagcaaaagttgtaattaatttgaaacacgaagatacaatgtaaggcccacagaatctaaatagtgatagtttacaaaatagtgaaatatcattcattccttctaaaaccatattcaatagtttaaagtcatttccaacatacctcctgaacaaacctatagaggaaaacaatacgaacagcagaaagtcggccttgcaagctgtaatcaaatccttcgtagtcatcatcttcagcactataagaattaaatttgaactggaaaagaaatgaaaaatacaagtaaatattgatct

SEQ ID NO: 300008 - DNA, 3016 bp, Cannabis indica
gaaatagaccgcgtaaattataaactcacacactaagcaatctcaatctcatatagatatatatgatataaagttttgatctttatacaaaattaatcatctgaattttccaactcctccattaaaatggcttcatctttccaaagattcgattctcaatcatcatcatacactccttccgctcctcctgtccccgacgactcacaaagttacaattctacccctcatcctccttcttcttcatcttcttatccccaatttcatgcccatcaacccaattctctccccaacgaatcacaaaattactacaattctacccctcatcctccttcttcttatccccaattccatgcccatcaacccaattcttcatacggctataattcatatgggaaattcccacaagggacgagtcctgatgtgattaggagctttgaattagtggatagagatcgaagtggattcatcgatgaaaatgagttgcagcaagcactttcttctgggtaccaaaggtttagccttagaacgattcgtttgctcatgtttctcttcaagaatacccatgattctctcagaattggtaaagtttttctctttttctaatttcatttactctcctttcattttcatttattaattattaggatatttctgtaaaaagggtttcctttattgaatcttttggggttctttttctttttatgatgatgatgatgacctattgttgggaccaatttggatattaatattaggctaattaagattttttggcctgtaattttgaggtatactaaatcgtgcctttaaagtacaaaagtttaagttcggaaaatataattttgttaatatcaaagttgggtaacttaatttggtacgtaaacaatagccacattagttttttttttttttttttttttgaagagatagccacattagttgtcccttagtaaacttgaacataattctttgaatttagcaatctcgatagattttagagaatttttcaacggcctaaaaagtttaaagtttgagtatacgatttggtacaaggtattaacataatttagtacattttaaagttcataaacaatcttttagccgttagttctaggggatttttagacttgaaaaattcaaaggcataatttaatacaagttaaaaaaataataggctgaagtttaatatgtataaaattatgccctcatacattttaggttaataaaatttatctgaactattaagattgttagatttaaagatttctattcaattatgttcaagtttactaaaattattcatataccaaatcggatcccttaaactttaacataaattgtgcttactaaatttccgtccacatcaagcgcccgttactaaaatcaaatagagttagaaggaagttctttgcatccaaccgaattttcaatgacaataaattcgaagtcacgatttggtacatataatccaaattaaccttcttaattagtcttattccaactttgcaagttggattatgttgctgtgtgtgaattttggtctttttgtataattctgtaaagagggtctcctttattgaatatccaatattggcttctgtgtttttttttttttttgataatgatgataaccaattgttgtgactgttctaattattatttaagttggctttgactataatggtaataaatattaatggtacctatatatatgttgtgttatttcaggtccaaaagagttttcatcaatgtggacttgtcttggtcaatggcgcgtaagtacctaacttaacattctttttctctggttttgtttgtgtcttcatattagtttatagcttttcatatgagtagggctttttaagttttctaattaagaaatcaaacaaactgatatgttgcgaaacttatataactcgtactcatgttgttgctcatcctcggtttgctgtagttgaaattcacaaattttacttgtcttgtaaaggacacatctcttgttattccccgaagaacttcggttctgattttactaaaaaaatatatgcgttttttttggagagagttaaatctatttcaccaatcgagttaaaatctattttctttttttcttcaaaaagtaacttttgaacatgcttcgttttctttgcttttttctaattagacgatccattaatccaacttgctgaggattataaatggattaattcttttagatctctcagagatttcataaaacggactttttagagatccccaaggaccaatccttgcatgaattgataaggatccaacaagtccaacattaattctttcaaacatatcatccgaacgaagataactcaattttctccaatgaactatttgtgtcaatgaacttgtacctcttattgtcttttgcttagcacaactctaaaattgttaagctgtgattcacagggcatatttcagcaatacgatagagatagaagtgggaaaattgatctgacggagctaagagacgctctttttggtttaggctacgcagtcccggcttctgttcttcaacttctgatttccaagtataacaatggaagtggacgaagagttgagcttgattttgatagtttcgtcgagtaagtactctttcgattaattgacatatatgttgaattaaatttttcaatattctcatttctaacattgtgatatgttgatttacagatgtggaatgattgtcaaggtaagacactcttctaattactctttaagaagtcaaacaacacttgttcaacataatcatagctttgtaatttcgtgtttttgttgaatttcagggtctgaccgaaaaatttaaagagaaggataagcagtattctggatcggcaactcttaattacgacgagttcatgtgcatgatcattccatttcttgtgtcatattgagttgaatctgtgtgatcctttgtaaaattactttcatgaaattctttttacgagttttttgagttttggctttgggcttgtaatgtaatgtacat

SEQ ID NO: 300009 - DNA, 3590 bp, Cannabis indica
acaatgtttgaaatttgtcattctatcaggttttttctcacgttgcaagcaaaatattgatatggttgtttagacaattgtcacgtaagcaccatgtcagcgccacataatttaaaactttttaatttagttttacatgattttttttaatcattaattgatttttattttaatggtctcttaaagatacaaattttagtttttaaattttttaactatatacatagcgctgacataacaattatctaaacaatcacatcattattttgttttctaaacaaaacttaacaaaaggaccactttataacattgtgaatagtttggagactaattttaattgaccggaaaataaatggcataatgatacataggtcaacattgtgaatagtttggagactaattttaattgacgggaaaatagatggcataataatacataggtcatagtttgggggacaaatcttaattaaattgtcaaaaaaaaaaaaaaaattgtgctaaatttatggaataaaagaaaagaagtatttttcaatttttattaagtaaaacagtttatatttatttatccaaaaaaataattatatttattataaaagaaattaaaaaataattcatagtggtacataatatctattagacgaaaaaagttactatattttaataaatttaattatctaaaatcaacaaacaaacaagtaaatataattatacattttaattatcttagaaaaacataatttaatagttttaaaaataaacaaaatcactcattttaattacgattaataaaaactaaatgaaagtataattattactatctttaacataatttagaaaattacaaatatcactcagttttttttaaaaaaaaagtgtaaaagagattcttctcgctcttctaaaaagtaacacaagcatccataaagaagttaagctgattatattaggaagctaaggactttttaaacttctacaaacaagttgcaaaatcggtttgtaccaggtcaaattacagcttcaatgtcatacatggaacctcctagtagcaggaagctagaaggtcaatgttaatggagagcagtgtctaccaggaaagagagatcaagtttgggagctttggttcgaaactctataggagaggtcatagcagtatttgcgaagagttgcccaaggatgatgtctctgaaaactgcagaggcttcgactttgttacatgcactaacttggtgcaaggatcatcgaattgaagtgcaccaagtaaaagttaattgtttgaacttagttcgagatattcaagttaatgtcacagtcctatttgagtggtgcgattgtggatttcgtgcatgaggtgttatcttctttttccattgtttttctgtcccacgttcattttttctaatttaaccgtttatatactaaacaatgcataatctgagactcgaaccgaggacttacaatacacacatctttctatggccacttgagggtgatttcctatcccacgtccataggtcaggaatacagccgctcataacattgctcaattcttagtcggataagataacacttgaatttagaatggaaatgatctctccccttgtaattttgttcaagggtctcttctccctaaaataaacacaagcatccataaatggtcaaaaatcttttttcgtataacgaaggaaagaaaaggtcaaaatcatgtataagcatttaattattttttattttttggtgagaagtaaaagcctttcaattgtttgatcaatttggtagcgggataagtgtgttcccaatgccaatcggcctcacgcccgcacgcgtttggtcttcttacacaaacgacgactgaagcaagaaaaaaaaaaacaatgactgctgtacagtcatatttgatttttgaaagagcttgttattcagatttacaaacactcctttaatttctcatattttcattttcacacgtaatttaaaacatattgtgacaatttagtcctttcattgcacaatatgagaattgtaagaataatacaaaaacaataaagaaaaaaccgttgaatgtggctgagactaatgaaatgtgttagatacaccgtgtaaatcctatgctaagaataaatttacttttgtattgtcattttcaaatatttacaacttaggtgttgtttgttactatataatgtaattgaataaaaattataattgaaatactaattaagtgcggatcttaagttgaaatgggtcataagcaaaaaaaaaaaaaattgtttagccccttattataaagataaatagtatttttaaaaattattaaaaaaatatgtatttttaaaaggtattttttattttaacacttaaaatgagtgaatcttaagcgcgagtttagtccacctatacctaagaccaaacctgaatactattatagtgtttggcttatctcctaaacaaataaagtactatattgataaaaaaaaaattaatagttttattatttttaatatttaaactttaaataaaagtaccaaaaaaaggcaaaaaattatattttaacaatgcaaccatcgttacatgagtttaataatgtaatatgaattaaaaggtataatgtaatagacaaatgtaaagccattaccgtactttaaaaattaaaacaaacaatataatgacaataataattctattacaatgggtattacattaaaccaaacatgcttaaaacttcaatttttatagatgatataactattcttcccatatataattttttaggtgacccattttatgagagtgcaggggtatgccagagtgtaggaagataagtaaattctaatatattcgttatcaatattgtaccaaggatttaatgagtatggtacatgtataataagttattgttaacagggtacatttatatttcaccaactctatttagagttgaagctcatattaattcgtatgttattatggcaaaatgttaaacaacggcaatagggtaggtgaaagatttatatgtgagattcgaaattggaataaggaaaaatgaaagatgaattgagtgacccacatatatttcatgtattggttttaaaatctctaatacgatcctatctttgttaaaaagtttggtacaatatttattaaacgacataattgtgttactcataataaggggaagtacttcaaattattaataaatgatcaagatacggaggctccaactcactcttaattgggtcaaatagtgagtaattttgaagtttaatacttaaaatattataaaatgaaactttatttgctgtgaggcacttaaaagacttttaattgtttttttttcctacttctcaaatcgcctaataacttctcattaactgttcccttcaatccaaaatttattgattttttcacctgaatcatgaatcctctcattgatataaaatgaaaggaatgatgactcttgctcaagaagatgaatcaacacttatctgatgttaatgtataaactagtaatttagatattgtgctagttgctagagtgctcgttaccaaatttgtaacaccctaactaccttaggcgtattacgtgattt

SEQ ID NO: 300010 - DNA, 6326 bp, Cannabis indica
aattggtgaacaacttcaccaaacccaaaaaatcagctaagtgatgccatcatatcacttagacttaaaaaataagattctagcacaatttcccaaggactcagcacccaaatttatatcgtgcaacttctctattgcaagattgtcaacttgagtattggcggctgaacaattcgcaaaaaaagagacataagtctctcgatactactccaattgatgtgattcaaagtgcattggaaagatctttttacgaatgtctcacacacatatctcaattctgaaattttccttttagaacaagatctacctctacttactttatgtcgggttttcagacgtcctctaacgtttagtgcctctactgcttcattcctggtttctattttacctttctttctaatttcataaatgttaaaaattggtcaaaaaaatatatatatatatatatatatatatttattatttttttttgtttaaaaattcccataaataagaagcagtgtgattatatgcgagacagtacagggtaagaaatatgtggagtgtgatgatctccctcctattcctgaacgagtgaactcaactgtgcttcactcaccagataaactcagtttcattctttctctgtttccattttcccaaacctgtcttctcactagttccatatcaatatcatgcttcttctgccgacaccactttcggcaagattcccttgtattcaattccaccaccattacatattccctttactcctctcaaccacaaccgccccagctctcgcaaccaccaccaccaccgccttttcgggtgaaccctcttactcgtcttcaaaacgaagctcagacccccaaaacgacgccgttccctttcgtaaccgccgctacgatttcggtcccctgttgaacttccttaatggttctgagtcgggttcggtttcggattctccgacttcgcttgacccggaggagttcaagctggccgagtcgtaccgggctgtacctgccactgtctggcacaatcttcttaaatcgctttgctcgaattcatcgtctataggtctagcatacgccgtcgtttcatggcttcaaaagcacaacctttgctattcctacgagcttctctactcgattctcatccacgccttgggtcggtccgagaagctctacgaggctttcttgctttctcagaggcaaaacctgacgccattaacgtacaacgccctaattggagcttgtgctcggaatgatgacctagaaaaggcgctgaatttaatagctaagatgcgccaagacgggtttccatcggatttcgttaattacagcttggtaatccaatccctaactcgcaaaaacaagatcgattcccctattttacaaaagctttatagggaaattgagtgtgataagattgagcttgatgggcatctattgaatgacataattgtgggtttcgctaaagctggtgatcctaaccaggctatgcattttctatctgtagttcaggctactgggttggtagccaaaacagctacattgactgctgttatatcagctttggggaattccggtaggatagtggaagctgaactttgtttgaggagattaaagaaggtggattgcagccaaggactcgagcttataatgcactccttaaagggtatgtaaaagcaggttctttgaaagacgcagagaccattgtttcagagatggaaaagaatggagtttcaccagatgaacgcacttatagccttctaatcgatgcttatgccaatgcgggtagatgggaaagcgccagaattgtgttaaaagagatggaagcgagcaatgtacagcctaattcatacgtcttcagtagaatcttagcgagttatcgcgatcgaggggagtggcaaaagacattccaagtcttgagggagatggaaagtagtggtgtgaaaccagataggcatttttacaatgtgatgattgatacttttggcaagtttaattgccttgatcatgcaatggctacctttgagcggatgcttgctgaggggatcaagcctgatactgttacttggaatacgcttatagactctcactgcaaggcgggacaccatgacagagcagagaagttgttcgaggaaatgcaagagagtggctgcttgccttgcgccacaacttataacattctgatcaactcttatggagagcaagagagatggagtgatgtcaatggcttgttgggaaagatgcaaagtcaaggtgttcttcctaatgtagttacttatacaacacttgtggatatatatggaaggtcggggagattcaatgatgctgttgactgcttagaagtaatgaaatcttcaggcttgaaaccatccgcaactatgtataatgccttgatcaacgcttatgcacagagagtatgctcttaggctttatatatctatctatctaagtatctatatttatatatatgttggatttgtgagggtgaacttctaaccattattgtaaacttttggcagggtttgtctgagcaagcactgaatgccttcaggggcatgagaggagacggcctaaaacctagtattttagctctcaattcactgatcaatggatttggtgaggatagaagggatgctgaagcctttgctgtacttcaatacatgaaggataatgtaactaattgcttattttccatgttcattttcattgttcttcctaaagtcaaggtgttcttcctaatgcagtttcattgtactgccttgattaaacttcacatggttctttattactacagggcttgaaacagatgtggtgacatatactaccctgatgaaaactttgatacgtgttaaaaatttgataaggtagatatgaattctttccagccattgtatttatctgatcattttagcctggtgtattgtataagagtaaaacaacaattttcatggtctgaatttcaggttccagctgtgtttgaagaaatgatttcatcaggatgcaaccctgataggaaagccagagaaatgctacggtctgctctcaaatacatgaaacagtccctgaaataacaattgagcagaatcagcagattcatttgagctatacaactaagtgagataacacatgttatctgttttagtacataacaccatgcatggtaagctagtttagacaagtttttttgagatttcatgttgttttttaacctcaccttctctttgtgttgttttctttttgagatagaaaaggaaattatccttgtttgatgcttgtttcaggatatgataacctggtgagcttgttaaaccagaagatggaagattatagatgatttaaaggcagcattagctctaccctgcataatttatggctcttcatgtagatttgcaagtataatcattttccttgtgtatactaatcatgcactatttatttttattataattattcataactcctcttttttgcactgaaagcaacattcattcttgtaattcttgtattataaagcaaaacatagttacaactttcctattgtgtattacaatagatattttatttctttcagtacttttattggaatcgaatattgaattggaacaatagttgtcacaaaaactaaaacgattagtgccaaggttgaaaaaaaggaaaacttaatgatttatgcctcttttttactaccctattaaaatttaagagtaatgatatgcacacatgaaattcaaacacaaaattatgtgacaagtaatttcattcaatcatgtttatttaagatggtctcatttataaaaatagcttgccacataagtgtgtaaattatgtgtgtacatattattactcaaaatttaatgccaacataatttaaagttggcaaaaatatagggttaagtttataattacctctttttgttatacattcacctacaaaacaaatttaattaaaatataccctattttataattgaactacctaatataccctcaacttttattaatggaattagttcgacttctccatagaaattgaactcacgcaagctccaccacgagtctaccattgccggcgtttctccaattactctaccaccgattacaaccgcaatcgctactgtccttcaatatttgaatatgtacgtaaccttttctttctattttcttgctttctgaatttgttttagtttgtctctttaaatcttattttccctcattcaatcctctatttattatggtttgtattgcctatgtatatgtgtacaagtttatgtgcgttttgtgatcattgttcgaaaaaggaaggaggtgcagaggttatggtgttatttagagatgcaattgaattttatttctttttactaacctaaggctataacgggaacaaaatctaaaaaagcgggtataaattaaagaatattaaaagagaggtaaaaattaaaaaaagtacaataaagtggttatagagtgtaattttctcaaaaatatatgccagttgcctttcttttgacaacaataccccgaaacccgcttgaccacctccctacactcttatcattcccattggccgaccacctccttcgcgtaatgcccttcgtttaagagtgtttatgaattggtttggttcaaatttttaattttgtcaaaaactaaacttgtattatgattttttataacttcaaaactaaaccagactaattaaatgatcaaaccaaactaaaccaatacattgaagaacaaaatagttagttctattttttttttatagtaattgttaatttttttggtaattcttttacttttaatgaatttataatatattttctaaaaagtatgttttttttttacgtaaaaagtataaatttataatacataaataacaataaaataaatttcattacaatattaagttaatatcaatattctacataaagttatttctagatatcaacattttgtctggaaaaaaaataatatcaagtatatataaaataattatacggattggtataacttgaaccactatcagaaattttaaaactataactgaactagagaattataaatgatctggattgaccaaactattcacaccgtattcgtttggttcggtctcaaatagttttgtccagattggttggaatttaaaactatgaattgcatattatatgaagttatgaacacccctacggtcattcaccattgaccatatcattcattttctttaatgctttcaatgattgaaaattcagttcaaaacttgaaccgcacataggaatggtaatttgggctattttctcgggtctggttgggcccccggctcggcggggcagctttgacccgattttatcgggctcttaagccaaatattatttcggtcgggcccgacccggcctggtttcagttttttttctgacataaatccttaaaaaaaccagtcccaaattcttcattttgaacttggactcttctgacttctctgttctctcccattttctctctcttcgacgacgaccgactccaatcttcagttaattagatttctttaatatcatatatatattagcgtaggttatggtgaaagcgtagtctttttcttacttagcagaagagattcaatggccctaaattgggatagactattgagcttatggtcagttatacaactaaataatattactgtattagtataacttggtcttgtcttacaatttgctcactagtcacttctgaccaattttgtatattttaaaatacctttttatgagaatagacttacataatcaatgcaatgcattttgatactatcaaaattatcattggaagcatatatataattaaatacatgatatatacttataattatattgtgcatgttaaagtctttatttttcttttaaaataaataaataaattgatttttttttactggtcgggcctgccccggcccgatcatctcgggtcgggcctgaccctttaggctaaaggaagtagtcaggccgggccaggtctatagcgggtcgggcccggcccagtcccgattgacattcctaaccgcatacctcatatacaagtttcaattagatttatgtaataaaaaataaggaattatttcataaataactaaaaacaacaaaattatatttatatttttatgaaattgagcttttttatatatatatttacgatatttttcttacagatttttgtttacatgttgtcttaagaaaaaaccattgtttacacattgcgaaaatatagtatcaacattgcgacaacataaaaataacgttgaaataacacaaaaacataaaaaatgttttaaaaaaaaaaaaaaaa

SEQ ID NO: 300011 - DNA, 5980 bp, Cannabis indica
tctacctgtgtatatcaaagtcgggttgcccaagccggccccctctaccaaatccccaagtgaagacttcacctcgagcagtcactgcaacactatgaaacttggaagcagaaaccagcttgatcagtgagtcatgaagcgagtcaaccttgcaaggcaacttctgtagatgtgcatttccagttccaagctgatagttaacaccacttccccaactgaagacctcagtcactactgaacacaatgacaacaacttgatttattcacaataatattcagaaacaaaacagtaatatcccttaaaacatgcaaaggatggtaaagcatgcctgaattacgcccacttccgacaacctgtgataaaggcccagataagagatcaactggtattcgagatttagaatcctccaaagtaatagaagccccagactgcagaaggacacttgccacagctagatgaccaaaatggagtgcccggtgaaggctactccatcctgactccccatcctgaaatatgtgataagacatattgcataagacaagacaccttcccgcaaaactatccaatttacaagttctccatgtaataccgacatcccaataaatgtgatacctttactaaagcaaaagaaatctacacattccctttaagataaataagcaataatgtaatccattgggcaaagtgacaaaccctagcatctgaatcagcaccagctgcaagaagccttttaacgatgggaatatgatttctccaagtcgcaatatgaagaggagttagtccaaatacacttcttgcattaatattaaccccattcttcttcatcagtgctaatgcagtatccacatcagccaaggagccctcttccacagcatgccatatatctttttgagtcccactagagacaattttgcgacctaacatctgcttttgcccttggggtcgatctagaacctccataattatatagggacgacttccggtacttgacaaataaatattccggcacaaaccactatcgtcgatgacaataatctaaaaaatcctaccaaagtatgtatctttaaactgagtcgaatatgtctattccatgttagacttgcttttccattccaaatcaaagatcacgagtacacactacacatgcatgatgttctcaacaagctaaagtagcacgaccatcatcaccagctatgcagaaagaaaaaacaaagttcagcaacgattgaaagccccccaccattcacgtaccatgaaaaatacaaagtaaaaaactctacaagttcttgttcagttgaaaggttatgatgacaactaataataaaccaacatacaatggaatcatcaaaatattcatagtcatcaacataagaaaacaatatatctgattagaaggtgaaagcaatgacaacggaagttttgttggtgatacatagaataaaataaaaagcttaaacctgcataagaaataacaatacacaaccccaattaagactattacattcccatctttggaatcaaaccacaatcctcctactaaaaatttaaaccaagggtccaatgtaggacactctaatacctcccacacacgcacacaacccttaaattggaatgttatatttgattgataccttctttatagcaataagcaggtaataaaccacaactgtgattataacacaacaaattaaagtaagcaatgtgacaatgtcaatgtatgtgtaactgtgaacaatgctatcaatgtaataataaaactactaaaaatggattccactacataagataagaccccaagctctatgtatgtactacaacgtatattaaacagattgatgttcttccatgtactgcttagttctataaatagagagagatagagagagggagctttcaattaaaaacaaatcggaataaccaatgccccaaataacttcgattcaacagaaaaaaccgaactttacatcaaactacctctcaaaatctaaaaattcaacgaaaaaacaaccacacattgacttaaaatcaaaaatgccttcattcatcaaatcaacaaaaccaaattacgaaatcatcaacaaaaacaatggaaatgaagccgcgaaaaatttcaccaaacaaaaactgtcaaatacacaaaaatttatataattcgaaaggataaaagaaaaaattgaatcacctgagagattataggagtagtacgaagaagtgggagaaaacgtagagaaataacagaggcatttaaggttggcgattttgtagagagagagaatcgaaaccaaagggagagaatatacctttgtgagaaacgaagacaaaaaccgcatcagatgcagaaacggatcatcatcttatgctcaagggtattttcgggatttcgatcgctagagaagagagttgggtctgaaatttgcttctttgcttctgagcgtaacacgtggcgttaatttaggctgacgtgttggttggaaaatccaacatcttcaactaaaaaattataattatttgttgctttttctctttattttctttttctcgataaaaaagacgtgggtactatttggtacttttattttaagttgggatagtgttgtggtaatgggttggatttttttgaggagcacgagtacgataggcatgagcacgattcgaaataaaaaataatatatttttaggcatgatataaaaaatataaacttaaatataatacgataagtctaaaaatataatatataagtataaatcgattagatcaaaaatatgacatattaaaaaaattaatgattttataataacaatcatcacattagtaaaatatgtaaaaacgattttggtacttatttaagttcagagtataatttaagcaattgtcacaataataaaattagacaaaaattcataaatcaaataatttcaaaatttatgtaaaaaatcttaattaacctaaaaaaaaattataatttaatattttttttatatacatgaataaaaaaagtacaccaatatgatatatgaatatttataatttaattttttttatatgattgatttatcatttaattgtttaagacatcttttgaatttataataaatgtaaaataatttataacataaaaaatatatttcaaacattatatttcacactataaaataaaagaagtatgcatagaataaagtacttgaactttattttgagcatgataatttattttaaaattttaaaaattttacgaaatatgttaaatatttacaaagtatgatttaacaaaaaaattaaataaaaaaatctattcaaatatacaaaaataaaaaaataataataaaaaaagtttattggtacaatcatctcatttttcaagagtgcacacttttgcaataaaaaataacctcacccaagaacttgtcttcttttatttaatattttttgcattattctaaatttgaaaatagtaggtaagaaatgatgaataaaataattattagtagcatcaatgaatttacatgatagtgattgtaatttgttagggactgtttggacttaaggatgttcattagttggtgggaaaaaatacaattcaattttaatgttaagtaacattcctttcaaaataaaaaataaaaaggaaatgttaggtaacaaaataaataaattgtgggattttgttttttttttttttttttgaataattctcccttaatatttatatttacagttatttagtcattttatgaggttctatctcattattttgtttaaatattgtaaattattattttttttatctactgaactttaacaactatcaaatcatactcctcgaaataaaaataataaatattctaacattttttttggtaaatcttaaaatattattttagatccttaaaaaaattagttttaatgattaaaaaaataaaaaagaaatcaaaattttacaactacttaaacgatataaaaattaattatttttattgtaaaatctatttaaatataaaaaagtatattcaaagtttaattttttgtaaaaattaaatttaaaaggaacaagtttgagtttatttttttctcaaaaatctagatttgtttaagtaagtattatttttttagtttaattactattttttaaaagaaaaattttatattgttctttattttttaaaatatgagtttgtaaatataaataaactttattttttcttctcgaaattttagtttatttaaattatttattggatttttaataatttttgttttattttttaagatatgtgtttataaataaaataaaattttaaaatattttttaggaataatttagggtgtttaagtgaagttaatattttttttattaatttaatacttttattaggtattttaatttttttaagtaatttagaaaattataattttttaaattattgttgtttaataaaattgggcaaaaaaatttattggtcaaaattcagaggtagaaatattaattttaaaagtaaaataaataaaacctcataagaggtataattatgtaactgttatattttagggaaaaaatttaacaaagcgtatattttatgatgcatgattaggtattgtggaaaatttagggagcaaaaatgttaattattttttattttttgttaacaattttttttataaacgaaaatgtattatatatataatgtgaaatagtttagatttataaaattatcttccccaagaatgtatactaataaatagagcattgctattaggcaccagtagtgcctagcaccttctcgacatgtcgtgttgcgattggctagtaatactccctaaaagctattatattacattatatgggacctaatacttagttggaccaatagcgatattgacacataggagaatgctaggcaccactggtgtcctttagcatttctctaataaatacttggtaaaactaacatataataaataatacacgttttttatttaaaaataatagaaaaaatttatatggtgttttggtagaacttcttatttgtttcggcatcgaacaactctttttaatgtatgaccacctgtaaattttttagaaaatcctaaatagtttaccgtgcagaaaaaaatattcaaatattttgttacacgcatgactgttttttttatacttatggtaagcaatttaaaccttatctaccgtgtcgaaaataagattcaaaaatatttttgttacttggcatattgttttgtattctcgatttgaaactacaacacattaccccctttatctctcgatctcatacttgaacccaccccctctatttctcaatctcattcccaacccctaaaccgaagccatgaggcactcgctaccaaatcacaccccctctaggcacataatcaatcccaacccctaaatcgaagcccgagacacgaagttggttgtctcatttccgccattgcttggataagcctccacgagatttttgcttttttttttttttggttctttgatttgcaatttaggggtttggtttttgtgatattgtttaatattacgcattacattatttttttctcttttttttcgtttcttaatgaaattaggctttctttttcttttatttttaattgttttaaactcgataggcttgatgaaatttcgatgataactcaatacaagattgataggctcgacggggttcatttttgttgaatgtatttggttgaggatgagctcaataagttatcgatgtgggtgttaaactcgaggaaaaaatctcattgatcaaatcctatcaagttatttgttgagcgctgtgacagtcagtagtcccgtgatccgtaaggggaaataccgagtaagctgtgcaatcccacatcgcctggggaaggtcaagtgggatgattctgagactgtgtaggtataggactacacagttgaagagggcttaaatggattgattggtactacttatgtcaacaaggtgcat

SEQ ID NO: 300012 - DNA, 2432 bp, Cannabis indica
aaaagaaaaatgaaatctttatggtaagattaaaaaccatgatgattatgttagtaacatgacattgttcattgttacttactctgtagagagattgaataaggagcttttcatcgaagcaccagctgctttcgcgcctaagagggccgactaaagagtgaaacaggtgaagaagtttaaggaacacatgtttagatgggaagagaaagttgtataatgtgtgaaagaaagaaaggaagaaccttgattttgattggagtaagaaccaatgttactgatactagcagctgcagaggcatttctcctaagcttgggaagagtattattaccttctattcctctgcaattatagaagctaggatatcaatcaaagcataaatatattatgaaacaaaacatgaagacactattctatgatatgattggttgggagaaatgaaaatacaagaatatgaataaaaatgggagtaggaatagaaagaataaactttaaagttcataaaaaatttgattttctttactttctgttttatctcccaaccaaacgcagcctaaaagtaatgctacataagatctcaataaatgagatgtgattcctgagattaattatatatttgagtatatatttgagtataggagtgacaattcatattgacgtgtcgtgttgaggttttaaatttattaaaaaattgttgactcgaacagaacccgtgacacgaaaaatttgtaaaatacgaacacaaacacgactcgaataaatttcgtgtcatgtcaaacccacagaatctcgtgtcgtattgatgggttgtaagttaaattgttgttttaagtgtcattgtgttagtgttcgtgtcgtgtgaagttcttaaattttttgtattgtgttgaacacgtaaaatttcaagttgtgttcgttttaaagtcgtgacctgaattttaatcacaccaaacagatcatttaaggttaagatttgataaacccaacaaatcaccctcacatgaacgatgtaagaactaactaacaattttcaacgttcgctcattgctgtattattgaataagtaacaattttcaaataattaatctccaaaataccttgatcttatttcaacaccactactctgccttcttaatgtaccacctgaaactgaaacagagttttttcccagtcagaacaactcttataataaccgttcgatcaatccaactaactaataactcgaaattgtgagagatgaacagaatacattggggttcatccctttgttgaagcccagaaaatgaaccaaataagcctgacaatcgctctaacgttgactcagaagttgaccttttaaaacactataaacaaaacaacacagtcagtcttaaaatactttaatttacaaatatatattataactaactaaaatactatggcttactgatccattgtttgaaccaccatacttgctctgaatctgcataaataaacaaaccacttaattttaaatatataatcaatagaaaacaaattaaagcttttaattaattaaaaacaacataacattaataattacctttaatgaaaaatctgttacatccaacaacaacaacttggcttcaaagtaatgagccaaagccttggccagcatttgttggtaaagttcttcaaaaataaaaaatcaaaattactatacaaatcaagattgaatgtttataatgttggaattaattaaaattataccagcagggccagaaagcaaaatagctcgactagcaggagaaaggtttcgagtgtacttagaaacctctgcgtgtttcagatgtacatatgctgcacttgttagtagtactcttgtctgttcactgtaattaattaattaataatcacatattaatattaattacagacaaatattattaattaaattatctaaactaattgaacagaaccatgcatgcatgcatgcaaaatccttcctacgtgttttataaaattatcttacaactaaaactgatgatcataacaaacaatgaccaagccagcccaaaaattagcggaaaactaatacatattaaaaaaattaattatttttatttttctcatgtaattttttttttaaaaaaaaaaaatttaaaaaagtcccgtacctacttcgttcattgtataacctaaactactttcctaaacctttaaactttaaaaatttaaaggttaggtaaaaaggtaaaaacgaaaaccaaaaaaaaaaaaaaacgaaaaaaaaaaaacgaaaacgtaaaacgtaaaaaactaaaactaactttaagttacgaacttagtttagttagttaagttaactttcgttacgaaactttaactttaaacttaaacttaactaaagtaaagtaaaatttttaaaacttttaactaaagtaaaaagttaaaaagttaaaaagtaaattactta

SEQ ID NO: 300013 - DNA, 2468 bp, Cannabis indica
tttttggctctttaatgattaattgatgtaatttaaactaaaaaaaaacatgattaatttcaaagatacattttaaatagagtatttattagaaactagtagtatcaaacaatttctatatgttatatacgactcgatacatgattacatcaatagtcatatattttagcaattttcttttaaatacgagagtatctctaataccaaattaatgataaggtactaaaatataatacactttaaaagtatgtatgatttgaaattataatataacgtataagtattattaaaaacatatagatgccaggtatatatctctttataaaaagaggggaagatatgatattgaactagatcattataaaagaaaaagagggaaaataaatgagtgagtttgataatttacatacaagaatttttttgacaagatatcacattgtagtggattcatatcacctttcatatataggatcatgtaaaaggcatcttggctcaaattctactcatatgttatatatatatatatacatatacatattatgtatatatgaagtcaacatttgtgacaaagatataactagtagagttattattatatcattttctatgacaacatgatgtttatttgttttatcattacacccgggttaacacacaataatataaactaaaatacaatatagtatggcctcttttgaagtagttaaagaaataattcttggatattaatttacattaaatgttgtcttatatgtaaaaatatgactagctatctagtagtctttattattaatcatatttatagaaaaacatcccaaaagtatgtatggagaaaagtatagtcacatgcctttgtagtcaaacaaaacaaaatttctttaatcttttatgttttaaagcaataataaaagaaagaaactactaaaatcaacaataatattggaaaattaaaaagtggagagaacataaagctagaaaaagatcacacttgattaaatttaaaactaacaatataattcttttttaacaaaacatgattcattaagatagatttgttgttacagacacttaaaaatcgttaataaatattcgtctaacataatcttctaaattagtaatagaggttgatagtgtgtgtgcaacaccatttactgatcgagaaataacgttgtaagaaccaccactaacaacaactaataaagataaatatttaataaaataaattaaaaactaaaatttatgtaaaatttattaattcaatcgaatcaactcattgtagaattattattaatgatagagatactaaatctatattaatatgcgagagtctgacctagacgaataacaagcacttccgtcatattaatagataaatcatctaccacaccaaatgacgacgccatccaaactacacccgcagtatctcgtaaacataaatagattatattcacaatttacataaacatagatagattatattcacaatttacataacatagatagattagagagatataagatgacccatcttaatcatgtactaatgagtgagttgtcagacaatagtgacaagtgtcagctttccctttaaacaaaacataaaataagcttaagtgggtccatcctatttagggttagggtttgacattgtcttcttatcgagagagagagagagagagagagagagagcaggctgcacgattggcagagaccataggacgcgttataacttaaaattaattaaattaaagaccctttaattaaattaaattaattattatgacacttatttgaaatattcatttttttttcttgatctttgagctgtcttttatcattttctctgttatgttttgcctgtcacgttctttttttcttttcatttattacccaaattcctctctctcatttcataaatgcccttcataatgatctttttacatatataattaataatatggttaggaatattcacaatttacatttgaaaaaaaagacacacaaatgagaaaaacattaagggtagttattgtaatgagtcaaaattctattgtatttaaataaagaaaacaagaccctttaaaattaaaaaaagactaaaattagagtttagaagtataatagtaatttgggatttggagttttgaggtattattaatattaataataataataataattaaaataaaagaagagactaaaaatggaaaagtgattagattggtattgaattgaacatatcatccaccaccactagcatttaatttaacatttaacatttaacaattaacaccaccatttgtgtctttagtttcttccttccaaatgtttggtctgctagcgctttaaggagccaaatccggaatcgaggaacattgtgttgaatcctttgttcaaacctaaccaaacattaaaaaaataaaaacaaaaaataaaaattaacacacacagaagaaagaaagaaagaa

SEQ ID NO: 300014 - DNA, 6936 bp, Cannabis indica
tttttaaaaaatttacaagatgttttaaatacttatattgtacactgtcatataataataagattatttagatttttatcccataaaatttaacttgtaccaaatcatattctttgaactctttcaagttattgaaaattctctttaaactactgagattgttcgattaaaacttttttatccaattttacaaagtgtaaatgaaaattgagaggacacaatttaatacatgttaaaatttggaaggcatgattttgtaaatattaaagtttggggaacacaattagatacatggacaaaattaaatagaattggacagaagtcattgaattcaataattttaattgttcgggaaatttttaacgacatgattcagtacatgtcaaagccaaaatttttagtctaataacagtgagcattgctattatggtaccttaaggtgcccaacactgtactaatgtaacgcgttgtgaatggttaacgattttttatattatttattaaatcaaaaagtatagaagccgatattaaataacaccaataacaatttgataagtgcttgacactttaactctttaagtacccttagcatttttcaacttttaataataatacgaaaattgctaaaatgtatcattagtgcctaataccattctcggtgtcatattgttattggtaaaattaaatatcgaatcccatataactttaaaaaaataacttttaagaaatcgtggggcgccacttataaaatgtgctgaacactacctgtgtgcaatagtaatgctttaataatatgagatcctaaatatcactcatggtgtctaacacctttgggctcgtttgtaacgtcgtattaggttgtattgtattatattgaattggattatatatcatatttttatataagactatattaaacattaatttatactaaaatattacatatttatgtgtccatgaaagttaataccacaaataattttacataaaaatattgttaaaatataatttaatataatacaatacaatacgaacataatatggtattacaaacgagccttttatgatataattcaataatgggtcgtacatattttcagtccctaacaaaaattagagttattcatcaaattgcttaaatcgctcgtaccacaccacactgaaaaaaaaaaaatacaatttaaaattctttacaattaatcgcaattaatttttcttagcaaaaataatcaaaaactgcaccaactgcgaatacccttgcaaaaacttaaccaaaggtcaaatggaaaaaacagttaaaactacaaaaccgccaagacgacactgatgaattgagaagttgggactgagctaagctattgttctgttacaaatctcaatcttcgctagggtttacatagctttgtgttcctccagatctgaaatcacaccttcacctcactgaatcaccgtatctttcattcaaaatgcatacccggagttctcacaacaatcgcttatctggttccgcttctcgctcccgagtttcccctctttttctcactatgttggcaaccatggctactgtttatgttgccggccggtgagcttcattttcctttttttgattattataattgatccattgttcgtgatttatgtttgatgaatttgaatttttgatagtctgtggcaggatgcagagattagagcttatttggttcaagaacttgatcaaagagctagtcaggtattttatttgtttatttaattattatgggattaatgttacataaaagtggtatagggatatgaaatttcatttcacatatggataatgaataaaatgaaagaaaattaggagttatactgactcgaagagtgtgaaccgatactttgtatcaattaaattgttcataagagaaaaagaattaaaatgttgtatgttttgttccttttgctaatgtagaggaatttaaattttgaatgtattgttactttagtaatatgcaagttacatttgtctaaagctagattaagttgatttgcatgagttgacatttccttgaggtcatctagaaagatagccttactgcccttacatgcccttctctcaacattgtttgaaagactctttgtggagacagtagaggtgccaactttttaagatgatggataatgaaatgtcaatcaatcatctttttcgataattatggcgcattgttgaattcattgcctcataagcatctcctttaacattgaggcatttcagagttttgtggattctccccttccctgtatacagtattaaagggattgtggtggtggtgtttccattaatgcaatttctgctttctaaagctatgtaaagtaactggttgattcggttaatgggatctttgaacaacttataaacaccatctactaacagtcccaaataattgtactcccacccacattgggcacactttaccttgagtagtaattattgagtgagatgtacatgataacatattcatcgattggtcaaagacattacattttatggttttcattcattaagtcatgaaatcctggcctaaagttttagcttaattctgcatttttcttttcctaagtgtatagttcaaaatttggagactggaatcaaagtttaccattatgtaaaatttgaaatctttgattgagctgaatgcaatttttatattgatgaggaaattgtcctctctcagggtcaatctatcatatcagtagatgatgatactctcaaaactatagcctgcaggtaatcaatgtttctttttccttctattttgtgaaaccatctataaactttgagaaggccaccaacagtgacactttggttatctagcgaacaacagaagaagttatcagctcttgaaacagagctgactgcagctagaaaggagggtttcattttaaagaacatttcaaaaaatgaagaatctcatcctacaaaaaatcttttagctgtaataggaatcattacgacgtttgggcgcaggaaaaatagagatgcgattcgtaaggcatggatgccaactggtaactgttttgagtttcatttatttgttttcatcactttgatagtaggatgtaatgtaaataatagaaattggggtgccatggtttttgattaaataatataacaactttggtgaaattgtttggcaacttttgttaatttgttaataagtaatctacaactgatgaatttgttactgttacttttctaaattttcttttgttttctattaacttggagacacatattttgtaggatcagctttgaagaaactagcagatgaaaagggcatcattgtgcagtttgtaattggaagaaggtctgtaatgatgatttagaaattataacaagaactgtactaagaaaaaaagaatgacaacaataattgcttttgagttcattcttcagctatattgtggttcttgcagttcaaatcgtggagacagcttggaccaggagactgaagaagaaaataggtaaactaatgacttcattgttcttgtatgtttggtgatttaaaaatagaaatttattatatgtggaaatataataatctgaacttacattaggtactagaaaatgcacaattcaaaatctaactgaactttatttgtctaacaattctaaaatccaaaattggatgtcaaacattttgtcaaaagattgctgcaaatctgtaacatatttagtgcataaatatcagattcttgttctacctttttgtttaggatgatcaagtggaatcacctgaggagcgtcctagaaagataaagtcattcctcattcatgctgtacagaaatggaacgccaaattttttgttaaggtcaatgatgatgtttttgttaatattggtatgtagcccttgtaaaataattttctagtagtagtaacaaacaatggagaattctttcctcacttaatctgtttcattctattggctattttatatagacaaaacacacactcactcacactagaactgttgctcatttgaaaactccatagccacaaactattacttggaaatttcagggaccatttagtgccttttcgtaggtttcaatttgcgatctaacccattactgttcaatgacactctaaatgtcaaccgcatgatacaggatgatttgtttattattattttgatccaagcatgtaaagtgttaacattcacaaagtaaatagtgtatatgaaccaatgtttgagctaattcttctacaaataactattgagaatagttgctatgtgggtggatacgcaaatcccaagtagcacaaggatctcttttcctcttcttaccaacgtggttgctcaaatattttctttatggtcactgtagatcaaacgaagaagtcttggctgttttatttatgtcagttaaaaagtctgtagacctaaagtaattagtattatgtatgtgctgatcattgattttccttttatttaaaactgcagatgctctggaagcgatcttaaatactcatttggacaaacaagatacttatattgggtgtatgaaatcaggccacgtcttgactgagccgtgagtttagatgacataacttttagttgctaaatgagcctgtcaaatttttcaatgctgaatagctcagagtttgttttgataatgcaggaccaacaaatggtacgagccagactggtggaagtttggtgatgcaaattcgtgagtaattaacttaactagcttcctgttttatcattaagcttcatgtttaagtgttcttcctctggatatttgttcaagcattctagtaagtaacgaccaaggcttagagtatttttgaattggctcataattgcatttgtttttgccttatgatacagatattttagacatgcctctggtgagatatatgccatttctagacatttggctcagtatgtatcaataaacaggtaattttctatcccattttcctttcttttttggttgacattatgcattatgcaagcactgatggcaggactcagagactgtcttcccttgtttgattaggtctattcttcgtacatatgcttgcgatgctgtcagtgttggatcatggtttctcgggcttgacattgaccatatagatgaacagaagatgtgctgctcatctcagtctgaaggttagtttgtagagaaaataaaaagtaaccaaatagaagatattgagctaagtttctaagtggatccgggaaaagaaaaaatcatgaaaacgcagccacacatgaatgcaaaaacaaaagatctatagcaatcttatgtagagttttatatttctcatctcagataatttgtttatatcccatttcaaaaacacttttttattctctatgatgtcatttcatttttcaggagcaatatgtgcaaatgcgtggtgacaagatcttacatacaaaattttgttgaaaacacaattacatgtctcctctacagaaaacacagttgtttttctgatcccggtttttgcgagttgttcaggttatagtcggctttcggcagattcaaagacagtggttttgttcatacagaggaagttttctcaacctagataaagttgtgttttgggaattttttaaaagcttctccaaatttaggggatcatatcttttttcgtcctcggagatccttttactccccaatttttcacccaccccaatctctgaccttggtctcccatagtcccttttgtaaaactgtttctcatccttgttggaatggtttgcttcttgtattttggggcagtttgaatctcatggctcatgtaggggcatatagtaatgtagataatagatattaatagtcatttgattttggggtgattgattgtctattgtatggctttctacataataactttcttcacaaccccacccaaagtaatgctaatgtgttccataaaaaaaggtaatcttcatctaatatgaatgattaagcttggtggctttggttggtgtttattttattagtttgtttggttttaaagtattagaattttattccaatagtaccactattttattattttggtagaatcactattttattttaaaatagaaggaccattctaaattttaatgtaagatttgaaaaaaaaaaattaataatattttttatcaattttttctgtgttttaaatttgattttatttgtattcctttttttttttttttttttattatatgtatatatttattttctttcgttgtttctaactaaacgttgtcgtgaatttttaggatgacacattctaaggtttttttattgtttaatttgtgaaaatcaactcttttgaaactaaaataattttatggagtgtactacactcatatttccatggtaaatttagtcaaaaaaaaaaaaaaaacctaattaaagtaggtgaaaattctaaaatgtacctctagaaaaagtatatcgatgtacttttatttattttacatttaaaaatcaaatttaatttattttttatagttataattgtgtacgttataattatttaaaatattatctaaaatagagtatgttatagggataacacttgtaaattgtttaactattgctattgtaaattattgtgaattttgttcatcctaaatgacaaaacaaatagagtgtgtattgatggactcctttaggaccgatttacagaagaaattacattgtatacccactttgttttacttgttttaatttttacctctattttcatattttttttagatataccggatgatgtcttagaccccttaagttatgtaaattatatgctacacttaaatagagagtgagagtatattaagcagtccacttaaaatgagtatattttaataaaaaattaatatgaatgtatttttgataaataaataaaaaaaaaaaagtatttttcaacttagcctccaatt

SEQ ID NO: 300015 - DNA, 5534 bp, Cannabis indica
aagaaagaaaaggaaataaaggaaagaatgactgtgaattaataggagtgttggtgaattgcaggaggtagctgtaaagaagttcttggatcaggatttctcaggcgctgctttggatgagtttaaaagagaagtaagcaataagttagtctttcggattaataatattgtgctatatgttggccaatcatatttgggaaattttgttttgaaaaatataataaaaattgaaggccttgtacagttataaggtagctatgtgaaaattaggaaggaattaaaatgcacagaacattgtgacattggtagtttgatatgctgattagtagtcttgttctggtggcagaagtgtctgtgaggatagaataggatttaatggcattggtcctgctgttattgatattctaatgctttgaagttgctaatcttgtatatcttgtcaggtacgaattatgcgtaggttacggcatccaaatgttgttctttttatgggtgctgttactcgaccaccaaacctgtctattattactgagtttcttcctaggtataaaattcatccttcatctttatcctattcctttctgaagtaataatttcttgctgtgtgtgtttctgtggtgttcctgatccaatgtctagtactatttaaatatggtatctatttcttgcatttgtacatcattaaatgtgatttagtactattcaaatatagtattcaattttaacacatcaatattgttaccacggttttcctccgctagggaggttccctaataaatttgggaagaggtcaagttttgacctttgtctctttttcaaaatttatatgtagcattatctttgcttttaggcataattacatgcatcgttctctctcatcaagtaattcattggtttttcagaggaagcttataccggattatccaccgtcctctttgtcaaatcgatgagaaacgtagaattaagatggctcttgatgtggtatgagctagttcgttgtattttctttgtcagcccacattctattattataaatgctaattgacatgtataattttcaggccaggggtatgaattgcttacatactagcatacccacaatcgttcaccgggatttgaaatcacccaatcttttggttgataaaaactggaatgtgaaggtaaatatatcttgtcaatatggtggagttgattggcagatgatgatttattacaatttcttaaccctggttatttgtttttgggattttttttcttttgggtgggagtgggggggattgtatggaaactcatgagtaatgagttcatatataaaatatattattgtaaatgagcatgcaccttattggttacttgtgcactttattgtgctgtattatgatttttcagtgactctcacttttaggccaactgattgaagcataggggaacttagggattagtgtcaaataaaaaatgaaacagataaatagccagcaactagttatttaaccttatcaggcaagtttagcttgcctaaaaagttagtgaattttgctcatgccttttattttgatttattattagtgttgtaagatcagaatacaaagcgtttctttgacagttgaataatgtaccatttttatttgttattggttgggttgtctttttaatataaatatgtaatttaattgtacaggtttgtgattttggactgtctcgcttgaagcataatacatttttgtcatccaagtcaactgcaggaacggtaagaattgttcaaagcttttagtagtttccacagaatgacagaatagaggcgtgagtatttcttgattcccatatcaagtagtcttgtaatgtattttcatttttgtgtatttagcctgagtggatggcacctgaggtcctccgcaacgaaccttcaaatgagaagtaagtactcttgtattgcattttgttttggttattgtatgtttctgttcttgtgctattaataccagttttgtaatttttcattgatataatagtacatgatttatctgcccgccaagaaggcgattgtagaattttcttataaatttgtctgaaaaccttattactaacaagaagctaaaaactgctttgctcagtcattctccctccctttctctctctgataatctaattgatttatccaatttttacctgataatgtgtgacaatctacgagaccaccaccaaatgatttgaatgttaaaactaacatgtattctatgaaatgtgtaggtgcgatgtatatagctttggagtaattttgtgggagctcgctacacttagattgccttggagcgggatgaacccaatgcaagttgttggtgctgttggtttccagaatcgtcgcctcgacatccctgtggaagttgatccaaaggttgcaagaataatatgggaatgttggcagacgtaagtgaaatcctttaagcataagtcttagtatatattatactacaacattatgttccaaatatctagtccaactaactatttccttttctcttgttgctttaaagtgaaccaaacttgcgtccctcgtttgcacagctcacagtagctctcaagcccttacaacgacttgctgctgtaccatccaatcaggaccagccaagctcacctctaccacaagaaatctcagtaaattctacaccttgaacttccatcctcagattctcccaagtgtgagtaacaattatgaatgtgtgatatacatatgtaattacttgtgttgccaaagcgttgcagcatgcctttttgtatagttgtccataatttataaacccatgtgtctatacctcatatataatataaacatatatataaatataagtacaaatataaatataaatacaaatacaaatttattttatactgcaacatatgatctctgcgtttcattttatgctttattcgtaaccttgtgatgcctcgttaatttgcaaaatccgacttgttattgaaaagaaaaagaagattaaagcttcatagaatatttgcaaaatccgacttgttattgaaaataaaaagaagattaaagcttcatagaataatgcaatttaaatattccatcaagggttcaatttctctcctatacaagtccttgtatatggtaataatgtaatatcttgactttagaccttaaagaaatactcagtaccccaagtccagctttcattaaatggccaactagtaactttactgtctatctttgttgcaagtccaacaccagtactttgcacacagccagggcttcccttccagttttttctgggatgcatgtagatcgatttgatcagacagtcattaacacaggtcgatagtgggatcaataacctgcctgaggaacgccacagcatggtccctggcagtaatgagcattctattgatagtagagtgccacattattatcactggcccatgcaagaaattataaactctccacactagggctattggtcgcactcgcagagtaatttctataggggttataggcttcttggacacaaactctccatgctaggatttgatagtaaagaacaaaattatgatgcttaataaggctagatgggagtgtggtaaagttcaagtagaatcttattatcattttatacccctttgcctcattaccgctaaaagaaataccattaattaattataacctctttttctttcattggaaacaaaaatataattataacaacagtacaatccgagcaaatgatttggcaagaacttcgaagtggctaattctaagatttttcatgacaaatcacgaatttttcataacataagatttcctcttctattccaagtcctcacactgttggaaaacatttaattacagcttttgaggaggaaaatcagtggataaaaagctatacacaaaaaaatctctgagttttcctttaaagaaagtatttttcctaaggagaccttccttttgaaacccaactttctccaaaaccctttgagatcccttattctcaacctcaacataagcttccagccttaccaagtggggcaagtccttgaaaacttgaggaacagctatgttcatggcttgagtagccactccttggccccaatagttgggggtcacaccatagcctatgttggccttaaacatgtcttcatctctaccagggaagaccgaaatgaagccgatcgaacggtcatcgatgcatatggagcggcgccaagggtgaggaatacaaacttcttttatgaaagtcaacgcttcatcttttgaggtcaacgtgttccatcgaagatgttgagtcacttgatcatcgcctgcaaatagcatcaaatcatccacatccgtcagattgaatggacggagtgtgacttttgatggattgatctccatatactctcaccaaagacaatatacctaataatattgttaagagttgaaagaaatatagttctctatgttatactttaaaaatacagctttatcaaactttgttacgaaattgtgcatgactttacttttattaaatcagatatgctagtaaaatgtatcagtataatatttttattagtgtaattaaatattgaattctatataatttttttttattatttatttaagcgtttatatattacaattatgcataatttgagactcaaactcaaaacctttaatacacacaccttctttgagctagcctcaagtggttaaattctatatagttaagtaattacaaggtactactataccactaacaatactttattaattatattataatgtggagtaggttctcagccattgaatctttcatataaatatattcatatataataatgagtggaattgcaaagaaacttcagttcttggttttatcattaaattgtacaataatattttttcgatttataataaaaaaaaatgtatagagagcaatgggtgttcatccgattgaggtgaattgttgattttatattttgaatctaatctaatttttataataactaaaatttaatatgcaaaaagtgttgattggattaattatttaaaattagttattttttactattgaattatttaagagtttttacaaaaatattaaattttgattaaaagtctataattttactgtcatatggaatttttttacaaaaatactatctttttataaaacaaccgtaaaacaacagcgaaataattaaaaacaactgtagaacaatttgaaaacttaaacagtacacagtataaaacttaaacaatatttttgaaaaaaattccgccccaaagtaaaaaagtaaaaaaattaaaaatttcagtatgtggtgtaaaaactccatgattatataatttgttggaagtgggtttctctgtagtgaatagaaacatttttttcttgtatcatttccaacaaggttgacaaactaggtggatacgtaaatatattctttttggtgcctagtatcctctttggtgtcatatagtgtaattaagtatcaggtctcatatagcttaagataataaattttaggttatatgacttatt

SEQ ID NO: 300016 - DNA, 3316 bp, Cannabis indica
actatcactcgcaagattaacactcaaaggcacctgttagatgagctcaacatcacggggatcaaacaagtcctcaataagttctaagtcccattgtctactatctggcttcatgagttgggacactttacaattgaccagtgcctgatgagtagataccacacaagggttggcctcagacaaaagccaaggtgtattaagcactgcagtagatgaaccgaatcctattactaaaaaaaaaataagccttaattttgtgtttctctatttttttttttttgtactaatttgtattttaaaattgtattgtggattggagtataataacaacaaatataattctagttttttttttttttgcccaaatttagtaatatattatttaatattggagatagtctaaatctaaaatgcttgacatatctctaatttaatttccagtttatgaaatgccatatgaaatggatttatactctagttattaactgaaccatgcttggtttagaatttagatagcaatcaaaaacctctttcagctcattaatgtttatgtactaagattaaattgtttgttgagacagagtacaatttatgaataagcaagtaagttgtgtatttttcatagatgattccagtcgtggtgagcttgcaatattaaatggtcatcttcccaaatgtcacggtatgtctctggctgtaaactccctctatttatagttgaaagtaacatattaatcctccactcttcaataaattcacactcacactcaacactaagccaattatagtactcaatctgcaaaagttccaaaaatcatcataaaaacaaacaaggctatactcaattaataatcacttagtttatggaaaacataccagagattctcctatgcaatgagtatacctctttggcaagccagagatttcatattagagtaaaaggattcaacatctttcatcatctcttctgctgttggaagctggattcgattcgaaagaacacctgctatccacttgctctgcaactcaaagaatggaaaaggaggaagctgccacaatacaaaccaaataataatattactcacattttgaatttcattgtagtccaggcaaaatttgtagaggacctactataactacaataaaagccatcgtaataccttccatggtataccaacaaaggatagcgagggagctaagtatggggggaaaatgtgcttatagaggggtccaactctgttgtcatccacactcacaatgccattggtttcaaggaaaggaaaatggtattcataccttattaggttgtgaaatttagttaatacactaaccaaaatagcaaagttagttagctaacatatatatgtagaaaattattagttaccccgtgcagtgaataatagtatgagcaaagacaacagtgccatcctcaaaaactacactaccatcctcatggactctttctatctgcattattaattattagttaaaagtatatgtatatacgttttaagcttggtgatgagatgagagtagtattaccatagaatagtgtagccatgtgttgtcatatcctggtcggattgagggtgcagtacttctaggagtagtgtcgaccgatcttattgcaatgtggacttgttttgtaactgcagctatctctcgagatatatcagctgcgctcattgatgctcctatcaaaaccacaacctgaatattataataaaaactacatgctaagaattgagatcatcatcatatcatatatataacatggcaatatgaaaagtgatgaccaaatgacctgatcacgaaatggctctggaattcggtaattgtggctatgcatttgctttcctggccatacatcaatgcctgcaacaacttgaaatgcatcacaataatcctcaatatctgaatagcatagcctatgatgaaaatgattggttttgatggaaattaattaagaactacaccttgaatttgagcaacacggggttctttataatggccaacacagacaacgacagcatcataaatctcatcaatctcaacaaactcttcttcattcatctcatcatcactatgactataatctctcttccttggcgttgactttgactttgaccttactctccaattcttggtggaggagcctccatcgggttccattaccataccaacatgaaccacctgagtctcaaacctcaccaactcaacaatctcaaactcattggcaaactctgtcaagtactccaaaacctccctgtgacccggaaaccttctcccatctctcttctcggaatcgttaaccctaaaagggtaaacccgaaaacccatcgcctctcttgggaggttggtgcgaagagagtggtagaggctggagtggaccgtgttccgaacagggtcaaccccaagtgggtctgactcggtctgtggagtatagacccaggtgccacccacttgcttttgctgctcaaagacaacaactttgtgaccttctagccggagctcatgggcggctatcagaccggcaggtccggctccgatgacggccacgttgcgtgacatgaatatgatgggctgatcaatgttgatgagagactctgctatttatatctgttttataaaataagattatttcgttatatgccagaccacagaaacgtggtttgagtatttaattaaaaaattttgaaagcgtttcatttaaaaaactttaaagcccaattgaaatttaagtgatattaatattaattgactatgttacacattgattttaaataatattaattaaatgtcgtggaagcaccagtggtctagtggtagaatagtaccctgccacggtacagacccgggttcgattcccggctggtgcaagatttcttttccctttttcaactttaatcttaaaaacgacaccacaataatatatatggaaaacgacaacttttgaaagtcaaacgatgccacatagaaagaaaaaacaactcaattttcctatgcagcttaggcttacaacatgcatttactctttttagttaatcagtttttcagctttgatatcaatttgttttgagattatgctaccttcagctttgatatcaaatacgaaaagggagattagacttctttactaaactaaacaaagctcaactaccagaatacacatttatcttatatactagcaaaaattacgtgcgatgcacgtatactaaattttatgctagttttttctatgttatttgaaaatgatacaattaaaaattaaagaaaaatattattagttattaggtgagattattattatgtctat

SEQ ID NO: 300017 - DNA, 2266 bp, Cannabis indica
acaattatcttctctagcgcactaacttttaaaattttagccaatcagaagttatttatttatttatttaattaaaaaagacagggcacaatgttgtatatagaacacactatttatatgtttcttttctcatctcatattggccggtagcccactaaattctttcggcaacagttgagggccattgaagttggccttataagctataaccctacttcattagtcttgctcatattatataaaatatatagagacaatagaaaattgctaagaaatactttgtataaacaccaccaataaaaaaagagagagaattgctagctaaaaagacatccatagtgttcaattaatagccacttaattaatgcatcataatagtttaatatctcgttgaatatatatattttaatataataaatattattataaaaaatattaatcactcatatgattctagtcagtgcccgaaacctactacaaatatatataatgctacaaaaagacgattaatatactttgtttgaattttgaaaatattgctcattagtcgagaccatgtatagatttttatcagggtaaattagccttctttggtttctacacattcattcagtaaaggataaattaatataatttaatattattcacgatgttactaatccacttgaagtattcgaaatttccaaaggtacgtagatttggtgatgatgtattaattagtagacgtacaacttattagaagtgttgatagtgtggcggcgccttgtctttttcatcccttgaatataaaataataataataatgaaaaaactaattaaaacgtttgataaaaggaatattatcataattaattgatcactaatttccacacctggttgttatatattattacttgctcattattggcggaaagcctaccatttattgactcttgacttttgagccacatggatatccccatgcatgcatacaccaaaaattaggtttaatatatatactaggaatattatatgaatatatttacatcgatcgattataggctgctttttcttttaaacgttgaaataattaaattaacccccccaataatataacaaacaataatgtgtatttttcatttggtgaatacgtttttttctaaggcttttcattttcaataagtttaaaatggtagcttatcattaatttaagtaatttcttttactgaaaattaattaaagtattttcagaactaaaatatatcactaaaatgagttaaaatgtataacttttacaatatatatagtattgaaaaaataaagttaattaggccctaaacttttctaaaaaaagttaatatgttggtctttttatttattatttatttttgatttttttttttaaaccaaagttagttctaagataacaaaatgtcactaaaaatataatacaatcaatcagtatattatatttagaaagaaaaataatatgttgaattttggccgaaccatctcgcgcgcattatactctttcatttattgcgtattggtaatctgaacaaatataaaatatacatatatactaaagaattgtgattaaaataaccaaaaaaatatgttgtctagagaatgaaaccatattcacatatatattccataaaagaattataattcacatatatgttaattgctaccaaataacataaacatgctgcagatattaaaattatctaagctaaaggatgataggaattattttaattggttaaggaaaaaaaaaactaaaaatgaaagattttgcatctcgatataatatattactccaaaatattaaatgtggttggcgtagggtgaggtcaacttagggttgtgtcattagcgacggctttgagcttagactccacccacccccttcccttcgtatataattaataaagaaattaatatgtatgtgtagaaaaggagggaccccacacgaggattatcgaagcaatatacccaaagtcataacactcatgagttgccacttgttctcttgattttttaaaattaattaatttctaattttctttctaacttttctaatttctgtagccaacaaattaatgaaataatttaccaaaaaaaaaaactaataaattaattaaattctcgagtatgatgatacatttttttttaacaatgaagatttgaaacactattcaaattcatgtaatttctactatcaaaaatacaaaaatgtagggtccgacgggtccgatgtatgtgctgaaatgcgagagagatg

SEQ ID NO: 300018 - DNA, 1451 bp, Cannabis indica
tcaagactttttcccatatttgtaagttttttaaaaaaatgccatatttagtataattaagtttttatgccatatatatcaaaacttatctttatttttccatatttttgtaaatagccctaatattattttcacaaatttaggtttaaagggccgaaatatagaatccaaagccatagatagatatatgtgttatctaataagcccaattaattaattagtactactgttttcgagtttattgggttgtatgcatgcatgcatgccagccagccagccagccacttcaatgtataatatgtttgtcgtttttgtcttacattacattacatatttatatttataattatatacatattaaccggcaagaagaggaaatgaaggaattatgttcatattaattagtacccactaaagttaataaagcaatagctagcttatatatattctataataaatataatatgcatgatatttcctttgtctgatcatcatgtaataatatccaatataaatctaccttatatgatcaaaaccagtagtactgatcaactttgaccaatattattgtttcatctttcactctctctgatctcttttgagatcaatctttgagtttatagtaaaagtgagtctctgatgatttctgatactataaatattatacctttcttattagtactgaatctttttgcagaaattaatatatgtatatattcggggtatacataaagccaaaccatatatcgatcacaatagttgtaagtcatgatatgacatttcctttatttttacataccctctttacctagctacctagctcattatttctttgtttttcagctacttcatcaatattcttcttcataagtctccaagtgggtagaaagtacaaaaccaataattacactgatttcatgtgttttttcttttcttttttatgtatggtattttcatacatgaaattattaatcatctaattattgttctatgaatgatcatcctatgtattatggtaatgaattttaattatttttattttactttttaatattaaatatataataacaattttgtcctttaaaatatatcttacaaaataactatcatataatatagtttaattcaaaaggacaatttagtcaatttaagcattccgattatattttctaataaagtaaacaagatatatcacgactattctatttccaaaaaaatttagtaaacaacatattacaaatattggttctgattatttttcatttaacccgattgatttctttcattgattattctgattccaattacagtttagtaaacgtgtcattaatgacattccttacaaaattggtgagaaaatttctccctttcttttcttccttatttaataaagttctccatttcttaattttaataatttaagtaaacaaatgtaagagaatgattacctt

SEQ ID NO: 300019 - DNA, 2261 bp, Cannabis indica
aagtctcactaaaggataaaataaaacttggcaaaatgacaattttgtgcttccatactaatagccactaaaggtcactaaggggtattttgggaaattgtaaaatcccgacaatccctgacattcccaatgtctaactaaaccgccccgctatactaaaatactaagatgtgattgtaataataaaacaccgctttccaatgttgtcgggcattgaatatgcaaaattatgaaatttccatatatgacatataaaaagtattctgaattcaaataaatcatcataaattaataatttaaaattaataaataatttccataactaaaccctaattatctgctaattttaaaatttaagctaagcggtctttacatgctatctatgcattttggctttgttgtttagagttggcttgttaaccacgtgttccttgtgttggtagatactcctaaagaaaaaatgttgaagtccatcagtgaaaatgtccaagatgggggctcaacagaaaggggaagggcaagaccaaggcccacaagactcgcaagctaaagcccccgtctacttcatccatattagatgtttgggatatttctcctcctatgaaggttagcgcccaagctttcagatctcaaactcctactagggcagacaaagatctagccacaacaggagagatttacaacgaaccgactatgtccgggagaggcccagctaaaactggccatctcgaaccaccatctcaggtggaagcttcacaaacactggccatggaggaaactctccaagagactttagtgcatgccaacgctttggaagagagtctgaacgggctcgtctttcccaggaaggacgcgtccttgactcccaagtgcatgactccacccccacctttcgatagggatgctaagaaagtcaaatctgctgcagacaagcatcgttctctaggaagagagggtgatctccgcagatccacaattaatccatcctcgtcaaacacaaccaaccaacaacatcaacaacaaaaccagtagagaaaaacaacatcaacactccaaaaacaacaacatccatcatccaaaccactacagccaccataacaccaacaacaattaggggccatcgttccctcaaggggccaatactctaattttggctagccacttgggcttgtcacctctcttccccaaatcccaccattgaactttaaattcctgctgaagcctactcgccttgaccatgaaattctaaagaaggtaggagaggttgaaggcatttaaaggaagtgtcacgagagggaaaggattgttctcccaaagagggcgaacaacctttccacgatgaagagggcagaaattgttaagggcatccgtaccactgtccagggagggtcgatgatagacactgagaccttataaaagcgtctggtacccaaggttgggagagaggtggcacattttttctgcagaatttcaagatcaagtggcaggtagtgcggctaatctgacctctcagaaatgggccatctgcagcagcagtaatgtgtttatgctggcccgggcattaaaacatgaagtcatgggggtaagttttgactcttttatcttagctattgttgttgtgtatcgttttattatattgttctattttaccaaatggcattaatcgtagagtgcactttgaaggaagttgggaccttaatcatggagattcatcaagtaaattctaaaaaccaagctttacacacagaaaacaaggtccttctcgttgatcttgagaaagacaaatcccagaccacttttgagctgaaccaagtcaaaaaagaggtcgagaatcaattaaatcaagtcaaagctgattgcaaggctatagttgaacgtgtggccgaggaagctagcgataagtactggaagctttactaggagtataaggccaaggtttaacaggacaataagtcaatgttggatcagttcaatcccaagtatcttctcttcagaaaaaatttctctaagtgataggggaaagagacagcaggggagctcaattgatgtcccaaggtgaggctctacaaataaaactctgagaggtcaataacttaaaaaataaaatcaatgagaaatacttggtaaaccaaggcttatcaagtgatattgataatttaaagggacagctcgaggttcagaagaaggccaaagactcattgagtgttaagtatgatcaataggttctggtcttgcaggccttgaaaccattgagaagatga

SEQ ID NO: 300020 - DNA, 5467 bp, Cannabis indica
aaaaaaaaattaataaatattatgtgagataatttctcaaaaaaaattcaacaaaagatgttctccaacgttaaacaataaaataaaataaagagactaaaaataagtaacccctataatatatttaggagtaattaaataaaattacatgtttgacccagaaatccctgtaattacgagtaatccaagaagattacaaatgaaagaaaagaaaattacataaagtaaccgccttgacaggccaggcctcccacgtgccaataatcctaatattgtactagcataaaagacaaatcatacaacagatttaacgcgattgactacacgcgcctcggaatatcttatcctaatttcaaatttcgactccttcaaccttttcttctattaaaataacaaagaaaaaagaaaaaacatttttttccctgtttcttttgacaaaatatacaccaacaataatagcagcatcatacttttcaattattttctaatattactcaccgcatttttcgtcttttgcttccaaaaattataaatttcatgtattctatctttgggtttaagcatttgcttattagtgactaaaaattagaacttacagaatagctaaagattaacaacacataattgatttgtaaactcaaaagaaaagaaaaacatatagatgatttctttcttgtcttttctacattcatgagcatattttcttaagaaaaaaatatatttagtgaaaatcaacaattgattaatgtcaaattaagcatatgttaccaatattcatagaaaagattacaatatatataatttgggaagagaaaaattaccagccaatgccatcctcctaaaccaacagccttcttcaccacaccttgaagacccaccagaacagacttagttctattatttccagtcacaataactttggtgtgccttggtaggactgagagttcttcatctccactttcttctctcaatggagataaaattctatgagaggagcataactcagcttccaacattttcttttttgtgaagaaaaagaaaattgagattaaccaatcaatcaatcaattaaatcttccgaaacaccaaaacccacttggagaagaagccaaaaaattccaacccaatactcccttaaccccaaaatccaacaacaaaaacttgtagattgggcaataaagcgattacaaacagaaacccatttgcacaataatcaatgtgtgtggggagtttgttccgttgattagaaagatttcccaatccatttcaccattgattcatttcctagacgaaaccctctcctcgttccaaaagccatatctgaaacagaaaagtaataataataaataataatgataataaagagagagagagagagatagacctggttttgttcctcataaataagaagagagggatttgagtctgacacgaattttttggtgaagtgttgaatgcaaaagagcttagaagaaggtatccaataacaggttcacgggctccaattgatcccaataaatgaacctcactcactcactcacaccaatcactaagatatgcttcttcttctttgagatgacatcattattcatatgctattccattacctgaaatacaaaacacacacattaaaaaagtattatattattatataaataatataaacacataatacccaaaacggaaaaaccattgtttggttcccgggaaaatttgaaagaaaagagaaaatcgaatagcttttcactgtaatttcacgaaactaatcaaacccatttcgcaaaatcaaatattttctcttgcggataaagaaaacagtggcatttgagggtaagaattgaagaaggctcgtattatacctgtatgaatgaatgcatgtgagcccgaaacaaaagcttcaatcaaagataatgaaaatggagagagaaaaagcaatgaaatgagaatgataatgggaatgagagagaaagagaggagaaagggcacactaaatgcttaccaactgccagataaacgacctaccatttaccatgtgggtatggccgtacggtcaattgcaaccggcttaacaggtcacccttcttggctgctctattcggctcggctcggctcggctcggtagtcggtatggttttgatatttgagtgctttttgtcttgtcgtttcctgggagcggagatcgttttgtgatctttgtgggacctgctgacctctgctaatatagagtacgaaagtgagaaacttccaaagtttttgaaccgtaacgctcttcaatttttttttttttttagtttttttaattctttttaattatttattattattatggtttgtagtttttatatataaaatatatatttttattttagttatgtatatttttagttatataattaatttttgttatgtaattcaataaataaaattattttttattaataaagtatttaataattttttattagagaaattattttatatattattttattttaaaattttttttttatttgtacagtttgagcttttagtgatttttatataagttgttatatgaatttggattgcgatttaagttgctcaattgattgctatatggattctagtataaatttctataaaaatatataaaaaaaaattgttttgaaatgtaaaataaaaaaactcttgttattaattataattttagcttaattaccctaatacttttaattttataatatttttcattatttttgccatatcatacacttttttttttatttttttaaataataataataaaaaaagatatattttatttaaatatgtgtaaggaatttaaatttaaattgtcatattaaaaaatttaatattatataaatacatttaatataagatacaaaataaacaaaaaagtgtagtaaatttaaatttacattataacaatacttttattagatagcctaaaaatttattcttttttgggatgagtgagcgagaggtgtaatagttgacatcactatcatggagtatggacctataaattagttctatgatcacaacacctttttttttggaggggctaaacaatataggtcttctattttttacacaaatctaaattgaccttctttttattatttgtatttggggtgagctcaaacaaaatctagctccattaagttgattatgatattagtatctaaaaattatttaatttgtagtttttaattgctgtattcgtacaccacttacaaacacaattagacacatagggtcacaattgaccattcacacaagaaaacaaatgactttgattttaccatgtaagcaatttgcaataacacaatataccttagaatcttctaactttgtcgaatcaagtttcaaaaatcacaaagttataaaacacacattagggcacgaacacaaaagaaagaaattaaaaaaatagagggagagaaggaagatcgaacacagttttaaagaaatttgccccaaatttggacttcttcctctttgagctctcctttggaaactctttcattagcactatcaatcaaagattacaagaacaacaatcgagaattcaagtcacaactcgattggtaagcctcaaaattttattttcacaattattatccttaagtttggcaatataaatgtgactgccttttgaataaataaatatttttattcaaattttgaaaataacaatactaatagtttcttagaatatcattatctaataaggatctttgatttgaaagaataaataaataaatgaaatataaaaaaaaaaaaattggctaaacatcaaactaagatgagggcacatgaatgaggaggactttcatcgactggtagtaagcgctcattgttccatgctcatggcacatgctgtccgttgaggcgagcaagcttgtacactccataccttaggactgtttcaatttgacatggtccttcccaatcgggaccaaggaccccagctgtcaggttaggtggaacacctttcttaacatcaagtcccctattataaactccttatttcaaacacaagagtcataatacttctttgcctgttgttggtgagcggcattacataattgtgacccctctcttctttcatcgagtaagctctagtgcttcctctagttcctctagaagtagttggttacgatgttattcatagtactgacttcggtgtgaggtgacttgggtctcaacttggagcatggcctcactcccataggtgagtgagaagggagtatgccctgtaacgattcagtgtgaggtcctataggaccagagcacttgtgggagctcctctggccatcttcctctggcagattctaggcacttctttaatccggtcttcaatgtcttgtttactgcttcaacttgtccattcgcctgtgggtgagctactgaagcgaaacttttaactataccattattcttacaaaactccgtaaataactcactatcgaattgtttctccattatctgatactattttgaggaactccatagcaacatacaatgtacttcatgacgaagtcgagtaccttttttaaagttatggtggccaaaggttccgccttagcccactttgtgaagtagtctactgtgactactgcatatttgactccaccttttccttgtggtagagatccaatcaaatctatcccccacacagcaaagggccacagggaggtcatagaagtgagttccattaaaggggctcgtggtatcgttgagaagcgttggcacttgtcatacttttttacgtaatggagagagtcttgacttataataggccagtagtagccttgccttattatctttttagctaagcgatcccctctagcatggtccccacaaaatccttcatggacttccttcaatatgctttgtgtttcttaaactgtcacacacctcaataatggcatggagtgtccctttctatacaatttcccatccaacaaggtgaaccttggtacgttatacagtaagttccttacctcattcttatcagaagggagactctcagtggtagagtatttaataaatggagtcatccacgttatttcaacatcaaccagctccatgctagcttcctcgttctcttcaacattgacgctcgatttaggaaggaactctactgggctgagttgagtgtatcagcttccttaagtggtggccaattgtgttaaggcattggcattcgagttttgttcacaaggtacttgttttatggagtagtactcaaatttttggagttgtttttgcacttgggagaggtaagctgccatttttaatcctcttgcatgatactcactcaatacttgattgactactagttgcgagtcgctaaaacaacgaatggctttcgcaccaagctcctttactaatcatagcccagccaacaaggcttcgtgctcggcctcgttgttggacgcttcaaacccaaacctcaagg

SEQ ID NO: 300021 - DNA, 2237 bp, Cannabis indica
acatccaatgaaatcatgggcatcttctccgactttggtgctctgcttgctgctggcatcaacttagatcgagcctgagtcaagtgcgatctacatgtatctgctccagtagaagcgttgctgccgacgaggatgagaggtttctccattggcttaatgatgctcactggttccttggaactatcaatgatagttttgacctccggtgaaataggtggtgcctgagctgaggaatccaacaatgtcgcagtcgacaagccgtggctctcaaacatggcatctgtacgcaactccacggatctaatcattgatcttacgaactcacaaagctctttgtcagtcatattgcagagctctcaatgaaatctctcgctaagatgctctcaatgaaagcaccaattgttagataatagtcctcttcgagacaggacaaatctccgaaatgcactcttcgagtcagtgccaaactcccaattgaaccaaagttctatttactcaatttcatatcccacaatagctacacaattacatatttatagtgattcacactctttacaaattactaataagcccctacactatttcataatgtaacacaatataaccacccctgaacggagccttgacgcgatcgtagtacactttgattaccaaaaaaaaaaacctcaatgcagatcaatcaattccaagttggagaagactagggtttatatgtagaagatacaaggtagagaaccaaaaatgagggctggctttagtgatcgtacggaaacatgtctcattcttcttcttgctcacgaaggccaggatcatgtcgtaactgctttggcaatctcccaatataaattgaatgggatgttcacaaagttattctcgaaaaatattcctcaatgccaaaatctaatttcacactgaactagatttggggtaaaggaaacgaaaccgagaaagctattggcacgtacctgtgttggctggttgaaaggccatagaaaaatggttgagggctgaaggtgatgccgcgtagcatttaatgagggaaccaaaggtgaaatgctgcataattggaactttttccaaaacctcaactttagcaaactactgttgaccttgttctagttaaggactccatggatatcatccaaccatggtgaatgctttgaaaagggacccttttcacctttttcacgaaagcaatgcaagaaagatgaaggtacttatgagagaaattttctgatatatccttattatgaatcgatttgggcctcgtacatttgtggttaatcaattaagatgacccataaatgtctaaactccaaatcccatgagaaccagtaggctttaaacaacaaactgtctgaaatttcctcatcaaagccatttactttacaaagattctgatcattactgaatcataatcctcttcctcgatcaatcctaatctcgccaagcaatacaaccacgccgcaaaactagtctcgtgaccagtaccatattcatgtaatatggatttataagtgaaagtatatttggggatgtagctcaaatgatagagtgctcgcttagcatgcaagaggtacggggatcggtaccccacatctccattttagttttaattaaattttatgtttgatagctatggaagtggcctaatcattcaaatatcttcacttggagttccatagtatcccttgtattctaatatgattggggctttcatcttaaatgctccatttaattgatggcacatttactactcagtatttagaatcgaaataaattaatagagaaatgtaacgaaataaatgaagaataatcggaatcaatatttataatatgttgtttactaaaactgcttagaaattgaatgatagtgatttattttgtttactttatccagaaatgttatcaagaattgatagttttaattaaattttatcttcgatacctactctcggtactcatatgtcacttacgcctgtacctacgcccggtacatcgccaggagtattgcatcacctaatcaggtgagcctgtacctacgctcgatactcatatgtcactgatgcccgtacccacgcccggtacgtcaccaggagtatcacatcacctaataatgtgagcctgtatatcacattcatagtattacattatcattgcttaaccaatcaattatttcattatatgataatattatatctcaatcttaatcaattcataaaaatactaattgtatt

SEQ ID NO: 300022 - DNA, 3122 bp, Cannabis indica
tatttttatttttatataattataacaaataatattacataaaggaaattagaattatatctagctatttaggcacacatagggattctacatagaaaacaaaatcattttttttaattattacacacttacacatgaatgtttattatttaatattttttcattgattcattaatttacttatatattttggcaggtgtatacttggaatgttaattgataaaaaaggcatagaaaaatcaatcaatggaactccaacactttgctcatgagcatcctttcatcctaaaagaagaagatcctacatctctaaatcaaactcttcgatgtaaaatatgttgtcttcctaatttcatagctccattttacgcttgcgatttgtgccaacattacgttcacaaatcatgtgcagagttgccgcaatatttgtttcatcaccctaaacaccctttccacactcttatggtgtctttcggtcaaaattattataagtgcaactcatgtgaaagttactatactaattctcccactttcacatgtttccaatgtgattttcacttagatgtaaaatgtgctatcatagcccccataacaatcgaaaaagtagtacttgaccttgacgatcaaactactactacgattattcaacattctactcatctacatccattggttcgtatcccactagacattgttgatgaaattattttttgttttggttgtcagtcactaattagtgatggtagtctagtttatacttgcaacgaaacttgttggtatttccttcacgagtcatgtgcagaatttccaacaaaaattcaatatcctttccatttgaaccatagtcttcttactcttcacgtacaatatttcaactggctcaatgataaatgcaacttatgtaacaaaagctacacaacactcttcattttcaaatgtaatgagtgtagctttcagttatgtttgaaatgcgttgcaactaaaatagatgcgaaagggtctatcaagtatagatatcatgaacaccttctttgtttcgctttagaaggtgacattcttgttgatgatcagtgtagtagttatgattcttattgcaagcaatcaactgctatacttgacactaaagaattttgtaaaacctctccttatgcattttattgtttggaatgcaacttcaaatcacacttgttgtgtgggccactaccgtttataattaagtatgagtatcacattcattctctgtttcttctagagtgtttaaccactgaagaaggtgtagaagattattattgtgatgtctgtgaaatggaaagagatccacgaatacgtgtgtactattgtgcatcatgtaaatatgctgcacatgtacattgtcttattcaagaggtacgataataattcttattaaaatacattaatttattatttattattgaaaatgtgcttaaaatttgcttatgtataataggtgatagtattatttctaaatttttttagtttaaattcattaggagaggttttaacaagagttatatagaatcattttcttatgagttttaataaaaatattagattttggacaaaatttataattttactgtcacacggaatattttacaaaaatactatctttttagaaaacaacaaaattgaataattaaaacaacagtggaataactaaaaaataaccgtggaataactgtgaaaacttaacacagtacacattataaaatttacacagtatttttgaaaaaaaaaaaaaaaaaaaaatatgccccacagtcaaaaaaattaaaaatttcagtatgtagtgtaaaaacccatttatttatttatttattttggcttggacaatacatctttttttaataacccaaactttttgttttgatgaatgttaataggttataaatatatttaaaggaggtcgaaagcttttcagaattatgggagaagatctttggtctttggaatgggatacacctacatcaatggaagaagatgaagccaagtctccctcaatattgattgatatcatgaatgctcttcctcaatcagacaaagattatttaaagaaattttatgtatgggatgattcgtggtcgaaaatcaaaggacaacccgaaaaacataagcacagtcacaatactattcagtctaatcttgaagatgaagatgttaattggattttggaactttcttctttagaatacaatttagatcattttgtaaaaacaattgttgtgccccggttttctagagaaacaagagaattgaaagccgaagatttgggtttaaagcttgtgaccgtggaaggttataaaatacctcatattgtggcatcggttttcaaaagattactaagtgtgcatggcgacattagtttgaattgtgataagatgttatcaaaagaagggaaaagtgtcctctatttcatcttgtgtcggattttgaaaaaaatgggcaccaccaaaattgctgacatcaccatagatcttatgacggagtggttttacaacatagaaatagtaaaagatgtcggcttcgaagttgattttgtagttttctatatactcagtagaattgtaccggctttctttggtactcaagcaaaaagacttgaacatgaaattcccgcaatgataaataaacggatggaaaagctacaacaagagatgataaagcttaagtctcaattagagatatgtaaggattttcctccgaaatccgagttcatgaaagagtgtttggcctttgcttgtcaaaagaagtggagtagttcatgtgaaggattgctttagggcataaccttgttgttcttggttatatttgtgtaatttgtattgttgtgtgaatttaaggtttggaaattcttcttggaatatttgctatttgtaaacaagaatattgtgtatattttaattattgcatggtatgcatgggtataattatattttttcttttgtaaatcattcttatgtgtacgttagtttaaaagaaaaaagagtagcaaacaattattattattattattatttatttagtatggatgctaaaaatattaaaaaaaaaatttttctactaaattgtaatttttgttgactaatatttttagtcacgga

SEQ ID NO: 300023 - DNA, 1898 bp, Cannabis indica
aataaaaaagcactcccaccactgtagttcaaaatagctaaatcttcaaaacaatagctgaataatcgatcagatactataaaccataattcaaaataaaaataaacagttattttttattgctctccacatctagagatgcaaccttcctactttttttaattaattattttatttctatttttctctcttttaaagacttttgcaattatggtattattttattgtttaaatgaataaataatatttaattagtataaagaaatatataaagaagttaatgtatgatgtaatataaatgtgtaaaatcaaataaagaaagtataattttagtgagttattttgaaaaatagagtagagaaactaacaagagtgctcttatcattagaacattttacaacaaagtatcaaaaataatgtagaagatgaataaaataaaataaaatattatatatctttaggtaaattagagatttttgacaccctttaagagtgtcatcattagagatgctttaaggtacgagtagtacctagcatgtccaatattgaacaccatccttataaatgttatccatatttgtaatagttattaaattgaattatgtgattcaatacttaattatactaatgatgatacaatactttaagtaataccacatactactaatacttttttgcatttttcataattactaattatccttaattaaaaacaagatatgacatatttctctttttatcttaataaatatttcaaatttagtactccactaggacttgtatatatatttgacataccaattccatatattttgaaatatatattaatttcatttaaaagttgaaattttgattatgataaaagctaaatgacatgagaagtactactaagagagttatattactatttatataattaaaataatggatctcaaatatttttatttaataatcattataatacactgctaattatttatgaagtgtaattttgtgatagtgctaaattagtagtacctacaagcaatgttcatttataaattatgattatatttataaaattaaatataatgaaaattgctaattatgtgtgaaaaaaaactctgttatgtaataacgatgtgtgtatccatccgcatgtataattaattacttaattaacagatgaaagcagtgttcatcttaaaaataaatatagcttccaatgcttaaaaaaaataccaatccaaggattttaatttgtttaattgccatgtcacatggtggaacatgatcattgattgaacattacacataatagaagaggaaagacatagtgatcagatcactagtaattggaaacaacacacgtactttccacacatttattgattatctttttcgtgtcttaattcttaattaaagccttactttgcttaatgtgaaatataaagctaagaaagagctcaacttttattttatagaaactttaaatatttgattttgttctactctcaaaactcacatacattttttttttcttttaatattgaaaaaggagagacaagagacatatgcttttgaattctgtagtggggtaattttcctgtgaaattgtttaagccaattaattacatgcgtaggaattatattaacataaattaagcatttatgactttagttaaattataaatatatatacaattccttgattggcagccatgtgagataacactaatttgtactgcctgcaccaaactttgctttctgcttattctttttccaagttgactatactttttgctactgtgttatatcattttatagtaatcttgagcatgatgtcatattttattcacctttatagaaagcatatatgttgattcacttagtactctcacacacccaacttttttttt

SEQ ID NO: 300024 - DNA, 6227 bp, Cannabis indica
aaaaaaaaacagtaaagttgttgtacaaaatattcaactactttaagttagccaactatactgtttcaagattacaattcctaaaatttgtaatacaattatttatagacaacttttttctcgggtttcttgaactgcaccaactttgcttcacaaggagtaaactattttaaaaaatgaacaaatataagtgacaggaaatatttgcagtaactctaaagattacaattagggagacaaatcttattgtatttcttatagaatgtaagaaagaaagaaaaaaaaataaaaagtaagtaattaaggtagtgttcagtaacacttttgggtttgaattcaaagtcgagatccaggtcagagtttgtgtttggatctaagtctgaattccaaaatctaagttagaatcggagttcaaaattttaattaagaaaaaaaaaattttaaaaatttgtaagtcattttttttttccaaaattttaattctcaattaaaaaattgaaaaacaaaaacagttttataaatcatgactttagaaaatatttttccatttctaatttaaaaaacaaaaaactaattcaatataaaccaaaagcaccctaaattttttgtaagtgtttagatgaaaataaaactccacatgttatgacccctgtacaaacaacttcctataaaaaaatcaaataaaattaaatacaaccaaattcggtcagtctgattcatgaccaacattaacaaaacttaattccaatacaagtcgaagttcccactaactaagcgattttgtgacaactacaacatggaacaaaccacatgttataaagatctatgttagcattaaaacagcatcaacaacagcttacttatattatttttttttttgacaaaaaatagcttaacaatttaaaataagattaaaaagggaaaacaactttggttgatgaattcaatcatctaatctgtgattggaaaaataaattcaataatacaagccaaatcagctattgaatgagaatatatgaaataactccaacttttctctaccagattcagtagtggtaggtacaccatatttaattttacaccctccaagtaatattagatacaaattacagctaaatttacgaaaaaaaaagggaaacatatgaatataaaggaagaaggcgaaaagaaatcataacggtaactgaacaaaaagaaacaaattggatgattttgatagactaaacgctgaaaacagatcacatgagcaggtataggaacaattagttttgtacctttttttactttgactcaacgccctttggggttcatgatctgcgaaaacacagcacttggtgttaacccatccgagtcttcacttgctaagctccgcccaccaatgctcatgctcattccactgcttctagaatctgttacattaccatcaaaggcattggggtccttctttcctttcaagtccataaatggctcctcctcagcgtccattttgccaaaaccctcaccactttcctcagcactctcttgcagctgcaaagcaaactcaaggttccacaaaacatctcccatggatggcctctcaatgctttggtcagaaacacatttcatggctgtctcagcaaacttcttgaagcattctggtgtaattcttcccttgagataggggtctagtatctgatcaagaatgcctttcttgtggcaatgtgcagcccactctgctaagctcacttgctctttggcaagtgtggggtttaaggccggccgagcacacaagatttcaaagagaacaaccccaaatgagtaaacatcagatttttcagtaagttgttgccgcctgaagtactcaggatccaagtatccaaagctaccttttacaacagtgctgacatgcgtgtgatccaatgtaggacctgttttggacaatccaaaatcagagaccttagccacccatttctcgtccaataggatgttggttgtcttgacatctcggtggataatagtgtgcttggctccagtgtgaagatagtgcaatccacgggctgcaccaatgcatatctcaagcctttgcttccagggcagtgggggtttttgggtcttgtatagatgctcacgcagtgttccatgagccatgtagtcataaacaagaatcatttcacagttttcttcacaatagccaatcaatgaaacaagatggcgatggcgaagctttgagagcatttcaatctcagtttggaattcgtgaacaccttgatcagagagagggttacctcgcttgatagcaacctgagttgttcccccatcaatttcacctttgtaaaccttgccaaaacctcccacgccaaggagtagagcttcatcaaaatttttggtcgctgacttgatctcagcaaatgagaaatggcggcaaagattcgaaggcagagaagacgtataacttcctgttgtgtttgtcttggcagaacctgcagaatgtgaatttccatacagggaaagtggaagccatccagaaggcccatcacttgaacttgcatccttgccctgcctactgcggcgcaatacaaacatagcaagaaaaccaaggagaagagctagaacaattccaccagatacacagccagctataatagctgtttgactctttttaccatggccagatgatgctccaacccgtgatgggtcaatttgatcttgcttaggaagaggaactggattgaggcctgcaagactcccagtcgtatcattaatcttgaataactccaagccattaaggattgcgtcatagaattgtgactttgtagcagtgttaggatgcagcgcaatccacaaatcctgctgtgggctccccttaggagccaaaactacatagtccttatacaaaccaacaccatttctctggtcagcccaagcagcaacatcagcttcttctacagctgtttgattaccgatgaagattgtaaacactctttgattttgcttggttatatttgaagcaacctcacagaaatggagcctaaccaggtaagagaatcccgagtctatagacagaatccaagttaagttgtagttcaagttgacgctggcagtcggtcccattgatctggcagtgctatacacacttatgggagcaacataagtacgtgtactatcaatgtaagtaatcgtcatgttagaatcagcagtttccggaacaccaaaagatgccccatatagatatggagtgtcatcataccaggacctatacagacctgtatcccccgaaggcgaaatatcatttccaccagcattcaaccggtaaatattctcaagcgcagtgctgttatccatggtgtacatgttattctgaccgacaaccattgtaccttcagcaggactagcatacatgtcaggcatagacaaaacctcaatcccattcacgaaggcatacccatttggaatactagaagagggtttaaaggtaagactcaaagtatcaccttccacatggaccgagtactctttcacaatcgaaacaaagttcaaagcttgcgctgtttgggcagcactgaagttcttgacaagagtatatgactgagccgtgatgtcaaagacgccatcggaggcgtttaggcccgagtaagatgccgggtagaagtagaggcgaacgaatttccggcctggggcgacagagatgctgtaagtgaactctgattggaagactctggcggtcatgtaagggacagtggaaactgaaggatcttgaaaggaggcttcggatgtggttgatttcgcacctttggatagaaacaaagaccctttatctgaggtccatttcttcccatctatatcggtgtcggacggtcctccacagttaaggaagatttgatcggccggaacgtaatcagcagccaaaatcacatcaactgacaagcttagacacaacaaaagcaggagccatagagctccacaattcaccaggttcttcatgaactcacaaatttatttgacgattacgatatagaaaaataaaaagaatactagtttctaagaatccaagatcgagatctgagtttttctagacacttgaaaactgagaaattgcagtccacgggtacctcagttttcagaaaataataatcgaacttgaaaatcaagcaccacccattaatggaatgcagtggttagagaaagtaaacctatgaatatgagtacatttcaagaagtaagctaaagggaaaccatatgcggagaaactgtgatatttgtgtaggaagaaagtaggtcttacctcttctctttctttgaaccaccgtaccgaaacggaggaaggtcgaactcactgagtcggaatcggtagaaaacgaataccgaaataaatattgtacagagtcagagagaaagagttgaggttgtggaagaaataaacaaatgggtagactttgtagttgaagaaagtggaagaagcatttttacttcttttatttgatcagctatggtgttaggctgttaccaaagtgaaaatgacgattaagtcctccatatttggtcattgtgtcgtataattgtactatataatgacgaatatacccttcttttggtaggcagggaaagggatatgataggatgacagctcagtatagttagttaagtgatcacagaaagagaaggaaacgcgtcattaaaactttcaaaaaccaattcaattctttgagcaggttagacctatctccacgcgtttccctaagctgtagtgcgtttccttgtctgattttagcaaaaacattttatttaacataattagcaattttatctccaaaataataattcagtccttaaaatatacaatttattaatcattgacctgtcatagagtcggacataaccagaatttgcttggatatactcaataatcatgcagattactgagcgataaacaagaccctcctatgcctcattccgaaaaccaaaaatccccaccaagtggctgactaccgccccataagtctctgcaatgtcagctataaaattgttgcaaaatgtctagccaatagaatgaaagatagtttgaaggaagtaatttcggagaatcaaagcgctttcattagtggtcggctcatacaagataatgcgattatggggtttgaaagtctacattgtatgaaaaaaaggttgttttggaaatggaaaaaagatggcgcttaaactagacatgtccaaagcttatgatagagtcgggtggagattcttagaagcgatgatgctatgtttgggttatgacaagcgatgggtggataaagtcatgaactgtatcactacggtttctttctcggtccttgtgaatggagaaattagtggactcattcaacctcaccgtggcctttgtcaaggcgatcccctctctccatatatgtttctcctctgctcggaaggattctcttgcctcatacaagaggccgaaagagcggataaaatcctcggtattaagtttggaagagaaggtctaaaactatctcacctcttcttcgccgatgacagttttgtgttccttgaagcaaccccaaccgaatgtagatgtatgaaagctatattagaagaatactccttcctatctggacaacaaatcaatcttctgaaatcggagctatgcgttggaaggaagatcaatcaaaccgatggaattatgctcgcggctgaccttggggttaaattggtggactgccacaccaaatatctcggtctgccagcaacagttgggagaaggaagaaagaagtttttgagttcattcggtcgaagattcgggataaacttcaaggttggaaagctagcttattttcccaagcgggaagggaagttcttctcaaagcagtaattcaagcaattccaacttatgtaatgagttgtttccgtctcccaaaggaactaattaaagacatccatgcatgatggccagattttggtggggctcttcggagtcaaaaaataaaattcattggggaagatgggaaaaactttgcaagccaaaggataaaggaggaatggggttcaaaaacttagaaaaattcaaccaatcattattagcaaagcaagggtggaagattatcaacaatcctagttcgttattggcccgtgttctcaaggcttgctatttcaccaactctacattcttggaagctaaacttggaggctttagctcctttatgtggagaagtatattatgttggaaattattttaacaggatcttagatctactca

SEQ ID NO: 300025 - DNA, 2609 bp, Cannabis indica
tttggtagatatcaaaatctagggaacatgatttagtacataagaaatcactgaaatagtaaaattgaatgacattagacaaaagtccttcaatccaacaatctcaatagttcaggaatattttcaacaaccttaaaagttcagggggcatgattttgtacatgtcaaagtttaagagacaaaaatcataattagccataaattaatatatatataatatttgatattaaattacaacaaaatgatatgagagtgacacctactatactatagtactcaaatcactctctctgtataaacatagaaaattaataacataacacttgtaccactagtccttatagcgtgactaatataataaagtttcattttccgttaagattggccctttttcgttttttataatattatactctaaatataaatagagagagaaaaagagggacaaaatggatttagacacaccacacaaattagcataaatataacatgaattctatgagttaggctgatacaaaataaaaacagatcaaatacgatcacttattaatacaaatttagtgattcaatattatgtttttgtgtatataaaaaaattatatacacaaaaacataaatatataagttttttaatccaactttaaatttattattttctttataacttaagtttctagtagtaaaatgagttaaaatgagttaacatgaacacgaatgttttacaagtcagattaaagttaaaaaattatatacaaatcgatatacttaacacgaaacataaaaaggaatcaaataaaatagagtatttctattaggcactagtagtgcctagtaccttctcgacatgtcaccttgcaattaactagcgatatttcttaaaatctattatattaaactatgtgggacccgatatttagttagatcaatagcgatactaatacataggagaatgctaggcaccactggtgctctttaacatttatcaataaaatatgacacaaacacaacctaataatctttgttttgtgtgttgtgaaagaagtgttattaatttatacccctgttctgttactaacttactagtgtttaattttggattgaccttagtctgacacgtgttagagaaccggggacaaaacataattatttaaacacataattaaccaatatacatatagaactctcagtcaaatatatattaacattattattacatacatatacatatacatatatatataatctctctctctctctctctataatactctcactaccacaactatcttcacgttaaacctaaataaaaagaaaaaagaaataagagaaagaaagaaaggaagaaaaaagtgtccgtacagtacaaaccaccatactcaagcttcacctcacctctgctatatatcaggtactctctaattattcaccccagctaaaccctagtaaaaacacacactcatctttttcttttctttgattattatacatatgaatatgatcagtgttatactataaaagtcactgtactaatattattattctttagagttatcatcatcatcaagaggaagaatgatgaacatggagggtggagaatcatcgggatcatcatcatcagtgatgatgatgatgatgaaggagtttgatcagaatagcgacggtagtccgtacgagatggttaggcaaatggggtcgtgtaaagcggtggtggtgtttagcatgagcgagtgttgtatgagtactgtggtgaaacaactcctttttagtctcggtgtggggcctacggttttcgagcttgataaactcgtggctggaccccacatcgagaacgtcctcttcgacctccttaatgctgttggagaaggaggtagaagaggatcaggacggagacagccgcctgttccggctgtcttcgttggcggtaagttcttaggtggtgtggaaactctcatggcttgtcatattaatggaacccttgttcctctactcaaagatgctggagctctctggctttgactttcttcatatatttgacctcaattatttttattactttctatctataaattagtttattagtagtgtaattttctttttaattccaagaaaagatgtatgtatgtattaatttacatatgaagttattatataagggtataatttcattatatacttatgaaattaaaatcacatcttgcactataaatatttatatatatatattaatgggttgtaattttatttttcttggagaaaatcaaggaacaatttatggatcagaaaaagaaagaatcttttgtaaagataattaaaaagttatagggtaaaatatatataatttgtgtgtataattaaagaagctaatataaggtcatctcgtactggaaaaaaaacacagtgtggcagagccacagaggtgttatgcatgccgatccatatataatatatatatatatacagtagaacctctatttaagaatactctattcaagaataacctctaatttgttataaaaaaactaagtcccgatttgggccagttataaataagaataacctctaaattgtaattagttatgcattttctaagtcccgtattaacaaagtat

SEQ ID NO: 300026 - DNA, 1258 bp, Cannabis indica
acatacttgtgagtggatctaagatcctggtaaaataatttctaacatatgtttcaagaataatctattggccagggattttaccatgtaaagatgctgtaacttgagccaatgtccagctagtggcggacccaatgaaggacaaggtggggctcatgactatgatcatttttcttttcttttcttaatatatatatattaaaataaaaattaattatgtagaataaaataggtgtgggcctctcctaaataaatatatatagttacattttttatttaatattaatgtgcccttacttgaatgaaatcctaggtccgccagtgagtcgcgcagttgtctcttttgaaacttctcgaagaaccttatatcataggctaataatggtagtattgtgagccttgatcatgatatcgaatttcttcttttctatctttgagcaaagcttcttgtaaatcctgctatgctctcatctttaccctccaaagaccaaaatcattcttaccattgaatttttcccgatcaaatttggcatttcccatttcttttgattgatcactggaatcttgaattcaagaatcaccttcagacaattgattaccagaatctttgaatcaagactcgtctcagatcaatctcttagttctgataccagttgttgatccaaactactcgatcacagatacaacacaccaaacttttttaatctagaacaaaactagtttaactagtttgaaccttctcaccaaaattcaataacacttaggtaaattaaagagaaaatattaaatttattaatctgtgtatcctatacaaatatgataaatttgtcgttacaattggggattgaacctatttatacacataggctaagtaaaataaattatcgaactaaactaacactaacaaccacttaaccaatcaactaagtgaccttgtatacgaggacagaatattaacaaacatctaactaacaattattaatacactaaaaattacaataaaaataatagataaatattaaatgaatcctaatattaaaaaaaaaaattatatttattttccttttaaatggaaatccctactctagcaagtctttgcagagtcccatcatgaaattaaatattcactattattggttattctttctcacgtctacccagggctggtttgagcataggcgggctaggccatgcctaatgcctactcattttaggaacccaaataaaaaaaatatctttaaaaaatatacatattttt

SEQ ID NO: 300027 - DNA, 5543 bp, Cannabis indica
ggaaaacaattgctacaatggccaattgaagagattgaaaccttaagagatcaaaaggttgaagtaaacaatcttaaacttgaaaagggtgatttttctgagattaaaggaataacagctgctcaggtattatcacaaaaattatataataccattttaataatttccaaaaaaaaaaaataggaaattttcattttattttatttaattatatggttttattttttgttacaggctgatgtagatgttgtcttttcatttccaagtttggaaaaagctgaagaattcgattcaagttgggataatgcagaaaatctttgtgcacaaaaaccttcccatattgaaggtggtattggaccatttggattactcacattagcttctgaaaatctagaggaatatacaccagtattcttcagaatatttaaggcaccaaaaaagaatgtagttcttatgtgttctgatgcttcaaggtttgttttttcgaattcatatctatattaattatgggtaaatactgttttgaactttatgtgttgcaaaagttactgattagactcgtaaaaataagacattaagctcaatttttaacaaatgttttaatatacgaatagatacagaagatgtaatcagttttgtcagaatacctctaatcgaattattgttaagttttattttgacagaaaatcagttcccgatcttatttgtactattttagaaaatgtaacttttgtaaaacacaagactctaaaatagtatttaccctataattatatttatacatacataaatttttattaatatattttgctggttcataaattttggtgcagatcttctttgtcacctgacttgtataaaccatcatttgctggattcgtagatgcagacataactgataataagctttctcttagaagtttggtaagttttaactatacaaattattgataatgtgtgttttaattaattagcttatatattttgaaactttgtacagattgatcattctattattgaaaattttggagaagaaggcaaaacatgcattacatcaagagtttatccaagtttggcaattggaaataatgcacatttgtatgtgtttaataatggaagtgaaactgtgactgtacagaatcttcaagcttggagtatgaaatcacctacggttatgaactgaacttaccactcttttattacaatatttagttttagtttttttttagatttctgattttagtttcagatgtttataattttctggttttagatttttaactggtttataataataaataagctttttggagcttcaagtttagaaatatttgctgaatttataattgcagaattggagtctaatattttattttctcaaatacgattaggatataaattagaagctctaataaacgaatgaactactaaatctgctgacgattaaacaacaaaagaaatgaaaacaaatttcaaatccacaacttctggacgaacagcctcaccacagagcctagtgactccttccaataaaaaaccaatgctcatttctagatatctagcctgttgatgcccttgattttgttagtcctaggcacgcaccaccgctcagcaccatccccgacaagtagaccaatccgagatgactccaaatctgaagtttgaacagttttccattgctcgaggtagcttacagcaaatgcaaaaataaacgaggcattggtagatttgtttttccaaactttgtcattccttgctcccgaaatggcccagtaaagggtcgaaacaaggctgcgtctgtcattattgagtacccgaaaaagtatttacacaccagtctaaaagggtcataccggccgagatacttgtattgattccagccttttcccaacactgagatgccaacatgcaagaaaccagaatgtgaagcactgtttcttagtagcacaatttgctaataatatcccattcttggattataataatggtaagagtaattttctcagcttcttcacttttgtaactcactaacaacttgtactattataaatgtgaaggggaagaaaatccatgaatccaatatcaagttccactacaagaatcaatatcatacatcaattgaatgaatgattagtgtattttaatggaattaattaattcattgattttgtcatagacaagtgatttgtttaattaaactatcagtgtccatgaaactcaatcatcataaccattgggtaaaaaaacaaacttaaaaggatattattaaccaagaagaaaaaggtaacataagttagaacttgttcatcatcatcatatctataaacaaaactcaaccagtctgtctacatagttgaaataaaacacacaagatatttaccggtcttgattgaagatgatatcgaaaatggcttcattgattatgttggcatttggagcttcccattataacagaaaaagcttcattaatcctagttgcttctgcaattaacttactcacttgtgaagcttcataagcactttgagacataagcaaagattgcttcttttcaagtatcttcaactcctcatcaattttcgcctttttctcattatgcaatgtgatctgaattttcaattcttccaactcgactttcttcattctccactcattcagattattctttaccaccttcacatcaaatcccaattttcccatttcagtcaattccgctattaaataatcaatctcagccatactaccatcttctcttaaattgaaaaccttctcaatcaataaagcaaacttgaccatatgactcaaagctaatgcttcgaattcgatttcatcatcttcctcattcaacaatggatgaaaatgagggttctgtggtagtttttgacacacttccaatgattcaagtaatgcccaaagatttgatcttttcacaaaaggagtattctttctttcctcattagtgttacctgtcaaacccaattataaaattgtaataaaatgatgtaattcaagtataaaaagaagaaccatatgattgtaccttgagaatttggagcttgcaattcatattgttctttactcttctctcttttactattttgtttttgatcatcctcctaaaagaaaaattttatagcaaattttgagaacaaaaaaaaaaaccaaacatgttttatggagttttcattcttaatcatgcttagaaacatcaaccaaatactttttggtttttttaaaactatctgattttcgaaaacagaccaaaatgtcaaacaactctactattgagaaacatgttaagattctaccttaaaagacagcaaaccagaattgtcaaactcatcataatgaagcttcactaacatgttagagctaccatttactttcggcgaattggcttcttcatctgcaaaaccatatccatacaacttcaccatcatcatcatcataattatcattattaatataatgaaataacatgaagaaaaaaagaagcttgagaccattcatagaagtagctgaaaatagcagctctttattttgagtgtcatcttggttcgttgaacaaggtgtttcattttcatcattgttgaattccgaacccgaacaggatgattcaatgtcttttgcggctgtatcacatacttgttgagtttgaatttgttgagtgggtgtggatataacctcctaaaaggaaagaaaaacaccataaaatccttacaagacttggataaataattcagaacaaaacaacataataaagtatagaaataaatacccctgagttggtaatccactgttcatttacccaatccaagtgacttctcaattgagagtgatcaaatacaatctcatttctcttaggataagtaccaaaattaacagcatactttctttgtaccagagttgaagtgatttttccaactgaagtgattgttccaactaaccaataactagattcacagaaagcatcaaccttttccttcaacttaaaatcttcatcattgctcaattgaggaggcttaggcctaatcatatctagttgtacagtaattttcacagcttgattattcttactattatacctcaccacaacagaatttgtacccttttcaccaataacagtagctgggatccatgcaaattcaagcatatcatcttttagttctactgatgttcctggtttaaattttgagtattgtatttcctgcaagtactcatatcaaaataccagaatgaatttttaaccacataaagttgggatctttatactataattatacactttaaaacactttcaaattcaaataaaaatactaacaataaagattaaaagctagcatctttaaaacaaaatgatattatattatttacccaaatgccaagaacaagttgaaacaaatacctaaatacaaactatttaggatcattaaactacaatatgcataatgcatgtgtgcaaaacccattaatactaataattaatatagaaataaagctagaatctttaaaacaaaatgatatattatattattgtaaaaatgtatagctagcacacccttcaaattgagcttttttcagtccaattattcccaatattatttacccaaatgacactaaaaaagaaatgcaaaacccatttttgatcgatgaagaaaaaaaccaaaaaaaaaataaaaaaactgaaaactttgtgtttgggtacctgctttggggaaataagccattgttcccaatgaggtctgagcttagaacaatgaaaatccttaatatcaggagcttccttaaagaaaacagagcagtaatcattctgaacagagagtacaacaccagtagaccagacactctcctcttcattccaagcatcaacgacgtcgttaggttcaggtggtattgtgaaaggtcctatcaaagaccggtcttgttcttcttctttgttatggttgcattttctcttctttaatgggttgttagtacaaggagtaatgattgtggttggataccatgcgttggtgaagaagcctgtttcatcatgggttttcctcccaacttcgactgatctgtaatctttgttgctatctaccattttttgtttcttgctggtgtttttgaagcttgtaagtgctttaatttcagttgaagttgtggaagaaaaagaagaagaggaagaagaagaagaagtgaaatggagaagaacagttttgctatttattgattattgattgtttgactctgaaaggaaggaggagtctactcactaaaatatttagtgaattaattagtaatattctttaaaagataaatttttaaattatgtgagacttaatatttaattacatatcgagtagactccgaaaagaactaataggaatgtacatgggacgacaaattagcaggaaatactcgtcctgtctccattcttgttaagaattttaatctatgtcttcttttatttatcattgggaatgagatggagaatcccctaagaaggcaggaacagactcagaaatctcctaataaaaaaataaaatttataataaaattt

SEQ ID NO: 300028 - DNA, 14385 bp, Cannabis indica
ttttgcatatgtttatgtcctgttacttgatttaaatagtatgaatttttaatgttagtgtttgtttggtaggatattattgcccgttttggtaagcaagaggcaatgccaagagagttcttcacggattttgttaaggtggctcaggatgaaggtcgccactttactcttcttgcagcaagactcaaggagctggggtcttattatggagctttaccagctcatgatggcctttgggactctgccacttccacttccaaggacctgctggctcgtctagcagttgagcattgcgtccatgaggtctgcttcactggaaacattcattctttttgtattttataaaaatatatcaatattcccctgaactcgcttacttagcttgagttcaaaattggagaccagttaatcctagaatctctagagaacatgaaacttgtagtttgtcatgaagagttcaacaccccttatcattgagaacaaatcacaaaataatgtcttaaggtcgtatatcctttttttagtgtctcatgttatagtgtggagttacattgatttggatctaaaaagggttaataatgaaagttaaaattgtgacatatttgtagtacatgtcctatcctcgaggtcagctttattgaaataccaagaaaagctagaatgaatagtttctttaagtagaaaatgtggataataacccactatggtcgaggagtaggcatatgtttcttaataatttgttcagctagcgtatagttgattcaacgcaagatttttcaagcaatgatatctgtgagaagtaacttgcaatctgaatgtgggcttgaaaatgatggaaaagtacttctatttggatctctctctggaggtgattgagctagattcatttgtgcactttgtacatgccccacacacacacatatataagtttaagaatgatggactcatttcaaatcggatgtattcttacatcttttactgacaatgattttctcatgctataagccttttcgaacattgttttcaacgatgaattattttgctttttgatgctttaatttatgagggctgtttttaactagtacatgaaaatgctacagaacctttatgcgtgaagattcgttaacagatgtacttttgaatattacttactgggatttgaacacaggcaagaggactcgatgttttaccaacaactatcagccgatttcgcaatggaggtgacaatgaaacagctgatctacttgagagcgtagtttatcctgaagaggttacccactgtgcagctggagtcaaatggttcaagtatctctgcctgaggtctccaactctttcacttccagatagtttggcatctcgagaaggcgaagttggaagtgaagcaatagaggagaatgaagaaataataaaaaagttccattctatagtcagatcatacttcaggggaccattgaagcctcctttcaatgaagaagccagaaaagctgctggctttggcccccaatggtatgaaccactggctttcaaagagagtcccctccaatgacccttttgtccgaatggtgatctttttgtagtttaataggggagttaaaatatttagttcttttgcttcaggtttcaaattcataaggaaattttgtgagcatttatatctagaatgaaattgtaattataagatgacaatggcaagttccaccattttttgccttgtgaactttcatagattgcttggaacaaaatattagggactcaaattatataatatgttagagtggaggctgctaataaaaacctcctaacaatgaatctatttttattccttcacaataattccagtaaaaaattagtgagaaactcattccaatcttctttttaatgacaaaactataatgaaactcattatgataacagtgactcatatttatggaaactcatattataataacacggcaaaaattattgataatgggaaataaacttatttattgatcagttttcctgtgcattttgggtacatcctctcttcttttgtttaaaaggaaaccgtgaaaaaagaattatacaaaaccttgcatcaatcaatcaatcagctttgttattcacagtttgaatttgatgcaccaagtgagttttaggaaaactgtttggcacaacaaatgcaaacgttgaagcccaggaaatttcaggaaaaaaaaaatgtgactctgcaactgttgagttggtttttgaagtaaactccgctaccgttattgctctcttgcaaattcaaactaaattgatgtgcttctctatgttcttacaaaagaagccgtctaatgtcgctgaagtttgaacttaaggctgagaggaatgcacctgaaaaatagataggagattcgtagttagaaagtaggcaaagactactaacaaagattgaaccgaaattatatgatgagctgatctagtcttagcttatctcctttttaacatctagtatgttcccaaatccactaaggtagctcaattttaaaactagattctgccagcttgagcatcagctttcctagccctacaatctttaagggtgttgaactccccgcgctatactctaactatgtgaaaaacagaagcccgaaatggcaaaccacaagccgcttaaccaatccccaaggggttaagacttatttcactgtatagtctaatattttgactgccaagtgcaatctgaacaagggaacatagattcactgtcaacaaacctagggttaggggctatgttgaaaatatgtttcgggtcacacactaaagggacttgaactacccatgaagggtagctcaaaatagtcattcacgaggcttgctccaacaaaatatgaggttcaatttcttcctgagcacataaatagcaattactataattttctggttctcaactaggctatggggaaaataatcccttcacactgcacttttcaagactacaactgcaaggtcatggtccataacgcagcttagtttacgaccaaaattgaaggttataagtgaatctaataatgctaacaacaaattggaactaatgaatctagcattatgtacctccaactttgccatcaaaaacacgatgatcagctgacaatgtcatattcattttggttacagctgctgctttctcaattcctaggtgaaagagagaaaagttacattagcgaaatcctttatgcctcaaatatttgaatgaaaataatgttaagcaaccatcttaccgtcactgtcaatgactggttctacaactttgttgcctctgcctacagcaaggataccagactgcacaagaagatggaagtgtacaccaacagcaatatctcataagttgacttaaatgaagaaataacaagggccggaagcatattatatactacaaaataaatttgtggagcgaacctgtggagggttaataatagcacaaaattggtccactggaaacattcccaagtttgaaatgctgcagaaacaagattcagagatttgtaattgttgcccttgccatgaacaaaagagttacaatgatatagccaacacaaattcacctgaaagtccccccttggaattcgtgtggcttaagctttcccattcgagccttttcagctagttccttgacctgagtccaaatgatgtaagctatcttgaatactgagcatagaatagaagccagaaaaacttatggtttgctaaaccctataattgctctactatctttgaattcctaaagctttcatacgacacatgcaagatcatttaggtcaatatcaaaaactcattgttttataatcttagttcatgttagctgtcttcagctcacaccgcagaaaaagaaagacagcaaaaggaacatgaaaattaatctgtggcaataaattattaatattactgaagacatacctctcgggagatggccgatattgttttttggtcagcattcctcactattggagtcatcaaaccctgtagcaatgtactgattatagtgtgattgatgctggagaagctctcaagtattaactaataatgctgacaaattaccttctcagtggccactgcaattgatatatcaacagaatcgcatagaatgacttcttctttctcagcattccagtaagctgccatgtataacaaaaatatattagacttggagaaatagtaataataatttacatacagtgctgataagtaattaccatttgcttctggtacatttcttaatgcaacagctacagctttaatcacaatatcattcactgatactttgacatcatgtttctctgaagttaagaaaaccaagaaaataaatgatccctgagctcaaagcatatgtcaataaaactaagaaacaatgagagttatggcgcatacctttaagatcctttctaagtgaaagaagaggatccagaataacatctgataaacaagttttaaacaagaatgttataggtggaataaccaacatcaacaaaagtacaagaccaaagtgtatacgaacctgatgataaatacaagtgtggtgtattttgttttgattccaacaatcttctagcaatcacctgcaaaaaataaaaatatatcgatcttacagtagcataatagtgaactgctactagtacagcataatatgataaagctattttgaagtaccatcaaacataaggttgtatattccaacatatgtcaatacacaaaacactactaaattctaatctggaatcataataactcaaagcaagaagacattaatctgtgtatggttaatttctgtaattactgtgtaagctgtatttagatatttattaacatattgagatgtgtgttgcaatgacaaaagcttgtagaaaagatactagctccatcctgaacttgatctaaaatcttattaatcattattatactagttatcttgcttttcttttcccggaactttgcctgcataatctgagatcctattctggtgtcattatggtaaattatcattgttattttttaatttgggatagatggatggaacctccaatttgaaaagtaaaaaaattcttattagcatttaaataactctagtataaattttaactcatcccacgattaatccatcctgttgttttccatctccggtattttctttttataaagtagctgacaatagacccatactaatttgtaattaggttgaaatgtttacgctttccattgtctactttagaatgttgccaaaataataatggcagcaataacaaataaatacgagtatcataagagcctgcccaatgacatgaagcctaccttgcgaacttgactgttagggaaatcttcaaatgaatctggcttctcagaggaagatcttgactttggtggtggtgcctgagtagttcgatctttatgaatttgaggggacaatggtgtcttttcttttgacgaagaagctttataagatcctactcctgatttgattgccgccatcacatcgcctttcaataacgtaccatgagaacccgatgcctccaatactgaaatgtccaacccatgttccgtgattaacaactttgcagacggactaactcttttaacagaggtttttggtgcactagtttctttcctaacatcacgatgaattggcttatcctcttttacagatgaaccactgcttacagaattttttacagtttccaaatcggccagttcctcaacctgaccaaagaaccaatagtttagttttcatgtggcttgcattagacagttctaataaatgtctctgacaatgagtaaagttcaacagttccgccattttacaatttagtatgatatttagctgtaagttggcctaaacagacgattgatgtatcaacttaatgtgatttatgatattttctttttaacaatactctttctaaaaagtaaccagatcaaacatttatacaattgttatcaagtattaacttactgttactgcaattggttgccccacaagcacatcttttgaaccttcgggcgctagtattttagccaagtacctaaacgcacatttcatccaaagttttagatgatattcctctcaaaagtagacaattaaaaaaaaaattggctcacaaaacacacctaagaaattatattaatgcaattagactcttaagggtgaaaaaagaaggttgcattgcaatgccaggcaaccaacagggtgaaaaaagaatatatgaaaaaagatttgcatgttttaaaaagctcactgggggaataaaatattactagtaataagggaagcttgaaactacagttttaccatcaaagcaaatgattatttgttaattagaaactcccttcatagatatttttcacaatgaatgaaaaatcataatctagactatataaaagctgtggtgaatatactaacataattaatagaaacttaaatttatgtgctgctcaacaaagaaaactagcagaaggaaagaacattacccttcttcaagactttcaaattcaacggttgctttatcagtttctatctcacatagcacatcacccacttcaatctgtttgattatgtaatcaagaataagaaaattacataaatgtttaccggttgctttgtccagatgtaaaaattatttcaagagtaggctaacagaacacatcacattatgaccaactaaccttgtctccttctttctttctccatgtagtaatattcccttggttctgtaggaatagataattgcctttagtgccagaagaacaacaatttaaaatgaaacaaaacacaaactttaattaattgtcaccattgttggggatagagctggcatttcaagaagaatatgtggaggaagatcagaagtatttatcttcacagaacttgtttcttgcgccttgtcctcattcttgacatcctgattagatgatatctcccttttaatctcaggtcctcctgctacagatgcagggatgttttgtatatcatcttggtcttcaaccttggaaatgcacataaacgtttaccaaaatcaaattactgtagtaacagtaacgtttttgaccatacagaaagaattgattataaactaatcaaataagaagtgagtaaaaaataagagaatagaagagacaggagttgaccaaaaatacatagaaataaaagtgaagtataacaaaaatatgtaggaaagagaactactcacagttagcaagatatataaatataaattcagggtatgtttggtacaccataaagtgtgttgatatggtagatgttgtaaaacttatattccaaaaaaagagtgtatggcggagtaatagattccaaactaaactttttctctgttcaaatttttgattctccttatgaatttgacttggaactctcctaacaggaaacaatacccctctaataaattctctctattacaaactcaaagttaactcattcaaggatgcctgtcaagccataaccaaaaccagctaggttataaaatacaaacagttgattaacccaattcccaatgtcccttctcacaaacttggcacacattcttggccttttccattttccactctgcataagtaaggtatggtggaggcatatcaatcttattatcaccctctcctcattctttcactctttaatttctctcattcttgctctcttcaatttcatcttctttattctcttttgaattttcctctctttattttctactgaattttctcccgcatctataaatctccactttctctctcatcatttacttttcaaattgtctttctttcacttattccttattgttattctctattaaaacatgaggcagttagggtttgtaaatgattgttggcaaaactttacaataaataagaagctataccacttctaacattatttatccatgtcttgcaacacatttataaccaaacacagtaaaatacggtgaacaaaatacggccttggtgaaaaatcagaaaaaaggtctatcataatataaatacaaacatcaatgaggattatacactaccgttattgcaataggttgtcccacaggtacatcttttgaaccttctggtaccagtatcttagcaagaaacctgttgaatcatccagatacaaaagcaaaaatgattaaaggatcatacatttgtatcgccccatagttaaagtatcatgactgttattaattacattacccttcttcttgactttcaaactcaagagtagctttgtcagtttcgatttcacatagtacatcacccacttcaatctgttatatcaagaacaataataagggagacagataatactgataagataagcgtaacagagttgcatagatatttggcattggcattgcattttgtaactcaattttgtacctttctgttacacaaattcaccttctcttctctgaatatagagtcgggcagttttctgttgcttttcaggaaaatgcttgtttctccatactaataatactcgtagggttcttttgtttcaaaaaagataggtataaaatagttgttttattctagtcgcagaagctaatgtgttcttatatttatgtaaagttttgctaaaacgaaaaacaaaggcacatagctctactagtgtatagacttaaagggaataagtaactaaccttatctccttctttcttcctccactttgctatgttaccttgatcctacaaaatagcaacaagtaggcatctatgttcattggagacaaagaaggaaattgaaaagatgtcctatgaaatttctccaaccacatgcttaccattgtaggagacaaagcaggcatcccaagcacttgatgtgaaggatctgcatcagcaattaactttctaataaaaattggagcagaaaattatgtacaacaagcatgacctattacaatgatgatattcaataagtagttacattaaaaatcaagggtggcaatgatagataaagatgtaactttaagacacaaagccacgaatcacaaagataaagcttaactaaatatatacataatacacaaataaaatcatacctgtagttgagaagtgcttgacaccaatccattgctgaaatttaaaataggattagaggagaaactagtattccagtatgcttaaccaatataatgtgatgtactaaccttgtgaacaaaagatacaccctgaactctgccaagtgtgaacaatgatgtgggcctgatcaaatcttatatgagtaagcttgtggaaaaggtaagaaaaaaagagagaaagatacaaaaagaaatctatactagtctaaactaattcattaaaaaaactcaagcaaggcctaaaatggttagtatagagaagtttgtattgtaaacatgcacttacatgttaattaaaaagtagaggaaactaaaaaattgagatgaacaaataattgcttttgcttgtagttatagtgaaagatcaaccacaagcttaaaccaaacatgaataagagctgctatatctgtttgaaaaagttaagttggttataagaatgatttccccaagatgtagtttactagttcagttcaactttcaaaaaactttcaacaccattaatcatatcaaaataattatgtagggataaaacaatgcagaaaatatatatttttaaaaaaatagattacaaaacttattattagaaaaactaatttgtaaaaagtaaattgctagcaaaataatttttcaagaattccaaggacggtgaatgcacaggttatggaagcagccaaaaaagcataatctgattttttaacaatggacaaatagaatgatgataatgagaaaaataaataaataaataaaaacctctgtaaagtgttctgatcacccacaatagaatttagctcactgcaacttctgcaacagaaaacatgaaaagtgaaaagttaataatgtgtattcaacaatcattggtcaaacaaagtcaagtccagttatccagaaaaatattgtcagcctgagtaaataaattgaaatttgaaacaactatatatttattaaaatgttgaattttcaagttaaatctcagtgagatcaagatgacacatgtattccatgttaaaaacatggattgcggcagaaagatcattacgcattagggatacaataacaataaaacacaactgaagtttactataacagcataattacatgaactgtacttcaaggacacatattagtacttatgttttctcctgaaagctaatgtaccctaaattttattccaacattacaaaactgtgaaatttctagatttgtgaattggagaagtaggatatcaagaaaatataatatacagttaaaatggttgaattgaataagtctccaaaaaagttgaaaacaatacgattaccagcatcttgaatttaggccatttatcactagaaatgtacgtacaaggaaatttgtaagagactgcattctggaatttaatcaataaattcttgcccaaagggttctacattctcagtatctaaaggaaactactccactgaaacatttacaagggatcatatcattggaacaactaaattctctattttatgaaccgaaacacacatttcaatactaatgaatacacaatggccgcataagagaattacaattgcaatcataacaaaaactcctctagccacagctataaagctgataaaaattagccatttttgggactccccaaaaagacaaatctgaaaacactaaaccttccattaccaactcgatcaaatccaacaattgccttaaacaactataacaacaatcaacactgccagccaggactgatcatagattctaaaaaccaaatcaatttcttttcgagtcatttgttccaattaaaccaaatgatctgttcgaattcgcatttagcagcgtaaaaaagtatttatagagagaaagagaaagtaccgagcgaaggatctggaggatgaagatgagaggagacgagctcgtaacagagcaggagtccgcgagattacgggctgtcgaagccgcgaaagcaccattattatttgttgggggttcagatgaagaaaagagaagaaatgaaggtttattagtcagctatggtttattttttttttcttaaaataaaatcacagttcaaaattttcaatttttcactttcctttttttttaatttgtggaagatgattatgggttgccagctttgactttatgaagaatgtcttcgctttgccctaaaacggcaccgtattgaaccattggaagagtcacaagtcacaacaacaagtcacaccaaaacactcacttgacctgacctcatgggccagtggcccttccccacctacctactttcctttcgtcgccaaacctcgcatatgtgcacttttggtactttcataagccaaattccctcgagagacagattggagaaaagggcattctgtggcgttgcagaattctctggaatcatccattttccttctagaaatattttctatatataaattagagaaaaagaataaataaagcgcaggtattacgatggatcatcgaaccgaagccgaactgactcatatggagatggagacggagacggcggttcagccagatgaggtggtagccaacgcgaccaccagtagcagcaaccatggtaaccccgtttgggatttgcttacattagctcgacatcttatcaaccaggggaagccttctcaagctctccaagcagtggtaatggcaatgagatctgaaggtggggatgaggctgtatttcggtcgttgcatcgtgcgcgtgagttataccaaagtagattgagagataacgcggctgctgatcagctagcttcgttgttcgctgaatgtgcaatagccgaagcccagccattaaaggccgagctagttagacctaattattacgagggggaatcgttggttgtgggcgccgatgatggtggtggtggaacctctatactggccgaatcgggaaggatgcagattgtgttggatgcattctcggatgggagtagctttatctgtttacaatgcggaggccttgttagcaacaaccgcagagatgagcactatgcatattggtgctgccaaatttgaatcctttcttcttttatatctgactaaatcaagaaaatcctttcttgattttcagttcatttgatgttaaaattcatgggctattttaaccctcatatttagtcattactgaagggattaattatgattgaaagaggagccattggtggactggttgagttgagacagagagggaccgaggttggggttgggtttctagtattaatggtattggatgataatgtttgataactatttttgttttgaagataagaatatcttataaatttcagtctgagaattttccaatttcaacaatatatagtatctatcttatacgggtaggaggtaatatagtgttatgattgctaggcaatgtaattatatggctcataacattgtcaaatgggcaagagtgctgggcaaccaaggctctattcctttgctaaatgattatctggagtgacaataatcttgatgttggttaattcagactgacttcctttctatttctttgttctgtttttaatttagagtgtgttgtactctgtttctgtttgttttgtttgttagttgattcctttgtttttgttgaactttgtttcttgccagttttgctctctttgtaatcgtttgatacaaattaaatagcatgattcaggagtgtcaaattttattgaaatttttatataaaattacctaaaattacttttttatatatatttgatttagtactataaaaccaatacaatcatcaaaggtgatgcttgacggttatctttttctcgaacatcaagagaacatgtatgtaaattttgaaatgtagtcacctcaaacatgttagaaagtacattcttcttcgctcttaatctccactcacaatatggatccttacatgtaatataccaacaacagtagtacctaacttcctaataaataatcgaatcatttcttcattgcatacaagccaacaactatcttcaaatgctctttgtctctgaaaaactttcctagatgtaactcatcatctagtgtgtcactcataaatgtataatgacgattatccttgatgtcttctcttataaaaaaatttctccttgaatttatcataacttgtcgaagaagaaaatggatcactaaattcagtaccagttgtccctcttgcatcactagaacctctaccatcagtggtccctctagcatcactagggcctctagcatcagtggctcctctagtattactggttccatctggacgactactagtagtaccaggtgattggtgatcattccacggggtcctcttttatgtgttggttgcatgggtatttggtacgatattagagtcaggttcaaagttataacagcagagacatttgtatcctggtcgtctcttatgtcatcattgctttcaaaattccatttagagtttatatcatcactaaaatcatcatgaaaaggtatttgtgctacaatgtcagctgtcggcatcatagtatttaattcaagtaacacatcagtcgccaataccttcggattgtttctataacgaaagtctcaacctcactatgagtatcctgaaaagtacttggtgtgggactaggatcgatgcaagcatttttcttcaccaaagtcataaataagggagtaaattcatctgacttcttcgcaagcatagacaaaaataaccttagacgcttatcatttctaataactttagggcgatacattaatcctttcatgttcttgtaatttacttcccatttcaagtcatatttcattttgtcaacatcgagttcttcatacaacatatcaaccaaacttgagtaggttatgttcgtatcaatcttaaatgtcaaattttcagcttggttataaactcaatctctaccctcaagctcttaaacatcattatacataacgaacacaaaaatagttgaacttgtcatccatagacataaaaaacaaaacacaattaaaaatttaaaacaataatttaatagaaaagtgataaaaaaaaagttcttaaaaagtcataaatcggccagacatcgaaccccatcgaacttatataggaccccctcaaattgaattcagcaaaaaaccattatacctgttacgaaaattatgtttattacgcaagtgtacgtatcaagtagtatctcacgcaagtgaggtcgaaccacagggaattggattaagtactactaaactatacttatgattctatttggtaaaataataagtttgcaatttgaaagtaaataactcagaaaattaaagagaaaataaacgaaga

SEQ ID NO: 300029 - DNA, 5384 bp, Cannabis indica
tgttggtttatggtactaaatcaagtacgcaacagaagagtttcatattatcttattatcatcgtaccatgttctaatagatctctagatgtatgtacattaaaaaaaaattatataataagtttaaagtttacctcttgaaggctatcagggtatcctcaaaacttctcgtaagttatattccttaatccaaatgatgaagaaattgtaattagactcacacaaatatcttccaaattgatccaccacacataaagaatagtgtggcttattcgaataaagtgtataacattgttcttgttgagttctcaacaaacaactgacagaaaaatcaatttcctttttctctcttgaatttcaaaaattctagtgttcaagaagggagaagtgtcattttgattactcaaatcagactcttatttatagtagttaaatccctttaattaaattatatttaattatttaaataaataaatatctataaccaaatttaattactgatatttatgagggaatctctcaattgcttgagagaatatctcaacaacgttgaaatatctataaccacttttcaaattagatatttacctaattgaattaatttaataattaattagctagaaaagaaaaaatccatagggagagcataatgtatacgcgcctaccattgttttaggacaatgtaggtgtcttttgtcctaacaacttttatcttgataaattttttctgaacaatttttgtctgttccctatttaattattttgaaaaaaattatttatttattacaaaaataaataattactatttttccaattcataatagatttttctaaataactttatacaactctttatccctatccttaatagtgttttgaaggtggcgattcagggaccatggacttataattctaagatccaataaactagattatttattgagtctcatcaatcaaataatctcttatttattaattccatgattactccactataaatatgaaattgaactcttagtaattatagaattatatttactgagtttaactgcagtgtctattgataaaattaattctagtaattagccctccatgtgttggttcgtaattagttttgatcaaaatacaattttatccttctaattacttctttatcctttagtaacattaatttactagtggaagtataattcaagatcccatctgaatttgtgaacaacattctagttccagaattaacacttaaagggaaccaacattcgatccattaggaaagtttagatttcataattgtacatcatgtttccagctatccatattattagattcttaaaacaatagctgtaagaatcatcttttctaagaaactttaacgagtaaatctaagaaattaataacatgaacaagagttcatgataacttaagatttaggccgatctactattgatcatcgttatgatatgaattaggtctttttaataaatgacatgttaataaagataactttattcatatcagtccttgtgatatacaatctctattatatacaacaccttcacttagatgtctcactatcagtaattcgaaccaagattaattgcaccgtagaacaggcatcagtgaactgtactagtgacgattgattaaagatttaaagattccataaatttaatatattgctgactgttttattcatagcaaagtggtcttagttctctatacaactacaagccacattctcatatatgaataaggaattttctaatatttaatataaatgattcaataataaatattaataacttaaattcacacatatatcaaatgtttaactctttatttaataatcagtaaatgtctttgcaggcttttcagggcataaaccccaacagagatcttggtcgaggtcgagggttcgggtctggacttgggtcaaggtctagatccaggcaccagataaggaaagtctatcacccctctatttctctataaatgttgacagagcatccattgggcataactcgtacatgggaatctattccccaaaatttaggtgtggacatgatccaatccaatccatttgaatcaaattgatccaattacaaaagatttgatatctaattacaattagataattagatgttaaaagatggattctaattggattggatcagttattggatgtcaatctcaaaatctaattaaaaccgatccaatcaaattacatttaatatatttacaaaactaaaattatttatatttatttctatataataaaaaatatttaaatatatttttagagtttttttattgaatttgtaatacttagttgttttatgcattgatcatgagttccagacaataccattgatcatgagtgtatgtttgaagagcaataattatacaatcagggtgtccatgccaccaaacataatgataagacaatgtgagagataatttttctaaagagtgtgccatactattagcaatcgtaagacaatattgaaaagaaataccattaaaattattataatgagcaaggttatccctaataatacaatctaagtaggactgatcaatcttattattcttaagagcatgaataacaataaggcaattagattccaactccaactttggataaccaagacggatagcaagcaggaggccatgataaatactcaaagcttcagcaataataggagagaaacaaccattccaattccaagtaccgaaagcaagaacagaacctgagttatcagaataatcaccccagcaatagttttatccaagtcactacataaacttgcgtcacaattgattttaaccaccccaaaagatagtttgaatcatttaatagatgtcttgtcaaaaatatttatctcatgagattagaatgacaattagccaacttgaagcgctccaaataatccatgctccaatcgaacatatggttatcatttaagtaaactttttcattcacccatttgttttgtctataccatattctccaaagataaataataaacttttcaaataaaacaaatgacatattatccaaacaaaaatagaagaattcataaatatccccacaaggaaaaataggaacctgtaactgattggtaatagtgccacgaattaaagtaagattgatgcatccccaaatagcatgaagtatatttcaggccccaaagatcaaaaaggacaattaatggttgtcggaataccatagtgttttagattgtcataagtgggaagctagttgtgggcaactttctataagaagtgcttcactttaggtgggagattaaggtgccagactttatcccacaaactacgaatacctctagactagaagcttgtttaatacacgaacacgggtcatatatgccaatagccactcttaactgagtacaggcctgagctctcaaaattccaaaccaactgatgattggaatatgagctgaggggatagtaagaataacacatgcctcatttaaaacaaaatgttggtaatcaaacaactattccaataaccattgggaaggattaatgaatcaattgtggcatcattaggcaaacacctaatcgaacaatacatattaccatctagactaggaatttaccgatcattataaatagacacttgagagccatcactaataagccagtgactactagcctaaaaaatctctttccccaaaagattgatcgccaaataaaggaggactttttagaagcttcagcagacaagaaagatgaattaggataacagatgaccttcaagaatctagcaaccagagtatcagaagttgtatacaatctcgtagtttgtttagccaaaagggcctagttaaacaaggccatatccctaaatctcaaaccaccatcatatgccaacacaacttttcctatgtacactaatttcgtttctttttattcaagttcccaccccacaaaaagtaagcacaaagtttatggatttcttgaataaaagacataagaagcttaaagagattcatagagtaagtagggatagactgaataacatatttaattaggattccataattgtaaattatgtttccagccatccacaatatatatcagcttcccaaaacagaagttgtaagaatcatcttctctcaaaatctttaatgagtaaatcaaaaaagctaataacatgaacaggagttcatgattactcaagatttaggtcaatctactattgatcatcgttatgatataaattagatctttatagtaaaaaacatgttagataaagacaacttcattcatatcgatcattgtcatatataatctctataatatagaacaccttcactttgatgtcatactacatccgtaatctgaactgagattacttgcaccgaagaatgagcattagtgaaccatactagcaactattgattaaatattccataactttaatatgatactgattgatttattcatagctaagtggtcttagttctctgtacagctacaagcgacagactcatatatgaataaggtattttctaatatttatatataaattattcagtaataaatattaataatttaacattcaagtagatatcaaattgttcaactctttattaataatcagtattgtctttatagactttttacggcataaaccctaacaccaactcactatctttcaatattatgtaccatgaagacatgaaacatccaactccaatgcctggaagctgaaaatacatgagacatcaccacataaatcatcctaggtgcctagggtttccccagcacccaggttgacaacccaatttgggtttccatttaggggactgtcttagtgaaaatgggtcaaactttgtaaaggggcatgaactagacatttcacgaacatatgtgatgcatcagaatcaaattcggagaacttacgtttttgagcaccaggtgcctcaggcacccaacgttcaagttgacacattgtcaacctcgaacacttccaagcatcaaatagaaaaaccctctcgagcattttcttcatcttcataagaaatggggaaacaggtgctttcagggaagaaatagacccacttggaggccaaaatgagggcctaatgcccaagttgacatttttgtcaacttgggccaattctgatgagtttttccaaaaagtcttctggcatattctctatttttgtcaaggattaagatacaagtattttcgggaatcaaatggaaacatttgatagcctgaaattggacctagtgcccaggttgatattttgtcaacctgggttgtttccaatcatctttctaaaaaaatattccaggcatttttctgtcataaaaaataatgaagatacaagtaaactcggggagaa

SEQ ID NO: 300030 - DNA, 531 bp, Cannabis indica
gctaataccccgccgctaatagcttatataaccccatcagacccaactttcctatttcccttcttctcttcaaatcccaaaccctaataccccacattccccatattcaaccaccatccagacggcgccggacgtcctaaccgcgactaaagtgcgattttggtgaccacaatcctcacggcaccgtctctctacaccgattttggtgaccaacacaggtacggaacctaaactttcccatttttctatccgatttatggtttttatttgtgttttaatttttttttggtcttgtttgtgatttattttcctctcaaacatgtataatgtttgtggatgagattgccgaaaaaattgtgggaaaaatttctagattatatatgtatatatattttttattgtggtttgtatattttcgatttataatatctgtgtatatatttatatctagatccaattttttttttttgtttttgttttatatctgtatatatattgttcatttgggtatatatattaatatgtgtatat

SEQ ID NO: 300031 - DNA, 3176 bp, Cannabis indica
ggggtgggggcggtcaacagtggatggggtggggcggtcacggtgagagagaggaagagagatgggttttgacagagaaaggaagaagagagagatggttgagcataatgagaggggtattttagggtttagggaaaagtggtcatattttttgtagtgtaaaatgtattggtttaaaaaaaaaattaagttttttaagtatagaaaatcaaattttccatataaaacgttctggaaagaactgccatagatattctgctggggacgggtatcactaattggccgtaatgcacagaagtctcaaataagcacgacagaaaattaagcccaagtcagaggtaaggaaaacagttttaactagcaagttatgactctgggcctaatttcaaggaaatgatatgcctttcctagaatgatgtcccataatgagatcgagaagctccatgccacttgagtccagtttaagtgcttacatgtacattgaaaccccagctggggtatttaacaattgagcaactactatgcaaatatattataaaatagggaaatgaaaggaaattcaaaattcgagccctgctatttttgaaacaagaaaatttgatttcagttaaagcaattgtgactttgtttagttacaaaacgtacctttactgcagctataagtataacaagcagcatagccaccatctccagctcgaaaatcagcttcaaccgctctgccaacaacaccaacagctgcactcacgccagctcctactgatagatgcacattaccgctaaatgtctttactgcatcacttgttctcagaactataataaagtcagtcaactctcctccagcctgaaaacaaaaaatgtcacagttggactttgtttggatcttgaattttcccaagaaaacatttcttcagaaaggatagaggaaaaaaaatcttaattttcatacgagacttttgtgaatatattcataattatttaagtttaattttattatatatatatatatttttttaaaaaaaaaaagattgctcaattttttgttctaaattttcaatcctattatggaaattcaatttttcttcccctaaaatacgattccagtaaagggagtcaaccctggtgtggacaatatatgtattatgtagaatatcttttactaagttcttcacctgagctccccaaccaacaccacatgtggaaacagctgatgggggagaccatgagccatcttctcttcgagcaaccacaattcctgtacctatattataggtaaacatgactccaacttttacagcagtaattattgcaaggccttttgcttgccgtagaatggcatctggaattgacttatccggcatcaaggaagagacctgaaaacaatgtcttggcgaagttaataaataagcatgaaaaatgactaaaacatgtgttgataccagaattgaaacttatcatacgttaaaaaatcccaaaacgtttagcatgtactagtcaaaaagtgataaccactgcaattatttggaaaaggacaaaaaattcattcaccacagttatacggttgctgagagagaaaaaaacattattggagcagaaacttttaagaacagcattcttaaggtaacgttgaaaatactgccatttgacttccataaaattttagacacgaaaaatacacggaggaaattcaaaggtgagcccataccatgttatatgctcggattgtattagctgccttatatatctcatattccatagactgtccccaaggaatattgagccacgatctaagagtgctaaggtctgtgagatcatttgttggaagctgagcagcatgacttacttggtccattaagtaaggctggacagactgaagccgcacaaaacacacatcacaaacgcgctgaggatctgcagtgcgaaatttggcaggcatcaagctccttcccttagagcactcaccacaaaatattcctccacaaaaccggcaatgatgtctagaacacatgattggatgaaaccgcacaccacataacatacaagcagatgcagcactatcaaccaaccatattggtgggtctgcctcaatgatctccctcacattggcaacatcatctgtgagagtttgagccatttcttgccaagcctgctcaagtacatgatttgatatccatgaaaacttagatgtactaatatcaccagaagctaaagagttaacttttccacgagcagcaagtaacatttccaccatgacatcccacatagtcatctctttatcttcttcagtgaagtggctccaccctatctcaccatcagggaaataacccccatgaaagtggaaacctctatcccactcttcacgctctgtttccaacataggaggaacagaaacaggtatccaaactccagtatcttcagaaagcggagcatcatagtaaaagcacttcctctgctctccacataaagtttcagactcacgcccagcatcattctcctctgtgaagcctcggtataaatctgaaccatattcccttgaccttgattcgttcattggtctgttatgaaatccattagctgctgcatggtcattacaattttcacgctcctcgtgattctgtcaatttaaagagctagtattaacactatctaagaaacgatctttaatcctaaaatattaattataagcatatattggtactacacctctcctctcctctcctccctccttaaaaaaaaaaaaatcaaaaaaataacacacacatcatatgtttcaagaattttacttcccaaccagacttttctttcgaaccgaaggaaagaagaataaaataactatttctttctacaaatactgaatactcagttcttcctagaaaatcaaataaccaataatatcaggaaccccacccccacatatattgcccgataaagtaagaatcacagaaacaataagaataaagaggaaagattaccggcagataaccatgatcctggtcgaggatttcctcgctcaccgagagatgggaaaccctagaagccaaggcctgagtttcattgacgtcaaccgtagaattcagataactatccctgtccattgactaaaatctgaaagaattttgctacagaaagctaccaaaatctatatagcaaaagccctttctcggcatggaaatcaaact

SEQ ID NO: 300032 - DNA, 2889 bp, Cannabis indica
tttttttaagaccgcgcaacgcgcggtttttgttttctagtttacatataaataataactatcgcgaagacattagtatcttatattttcttttttaattttaaataaaattgaatgctaattatgatattttctatttattttcaatattttaattattaaatgttttactaaagtttaatcttaacctggataagtaaaaaaaatattgtatcactaaaagagaagaagaattattatgacaccttaaacattggcacacaaggacccaaatacatgacatacaaaaagaagataaacaatgtttcaaattaatgaaaatgaaaaatatgtttcaaaggggatattactaagcatgtgtgggctttggctactaagaacaactcttggatcaaatagattctttaaacatgaagattggtggaactataagtctactcaaaacaatagctgatattaaatatcgatcatgcaagtgcgtaatttggtggaaaacttttacacaaagaatcaatttgcagcgcttcatttttccattaatcaggtttgcaaaactcttttcccttcttcgtctatttagtatgcttctcagatttggcctcgatttagcattccaaagatcgatttattacatggctgaaaacgaaaaatagaattaaggtctttggtttagagatagatgagatttgccccttgtgtatggagttgagttgaaaactcatgggcacccatgattacaatttacaactatcaatgtctcttgaattatattaggagcaaggtgagtaaagtgaaaagggaaacccacattcttgtctttaacttttgtgtctatctcattttggctgaaaaggaatagagccctttggtctcatgagatgaaaactattaaattgcttggtttgtttgctaagcatcttattgtaaatagattaaaagagacttttttcttatcgaaaagaaactttattgatcactgaaccttaacaaatacacaacaaattaacaataaacagagaaaagccaggccaccaacagccagcttaactcagctcttaactatcatatatacatcttttgtaaaaacgttgatctttaagacgaagcctcttttctaacacgcacaatgcctttaatctcagtaacaatatacaaagctgatcgagaaaattcttcatgcacacatctattccaatttttccacaggttatacactgcagcagctaaaatcaagttaaccatagcagctagattaaaagagacttaccacaagaaaataggagtgaaaaattagctttggctttcaattttgtagagatttgatgtaattgaggggttagttagctgctagtgcagctggttgtaattgctctttgatgcaatacaatgagcttatttacccaaaaaaaaaaaaaccttcactattaattaagaacatattttacaattgtcagtgacaaattgacaatagcatatatgtaatttaagacattaacaccctttgtagctaatagtgatggctcataagcattttaagcatcctattaacaaatgaatcttcgaacacttttagagaagaaaacccaaatcatattgaaagtgacagcttttcttgtttggcccaaagatatgccaaaaaaaccatttcatcgggtaaatcgggagccccatttcaattgggacacatagcattgttcaagatatatgcatcctatctaactaatttcaaaaacatgtaatgctaaaattctaactggttctataaggacataatagtgcacaatattttttaccttagccaaggcataatggaggtcctccagttactcaatcagtcaatccaatttcttgagcattagatttaggacggaccaagtgatgcgagctttgctatgaaactaaccgataactttcagcattcaatatctaattacaagttctcatggccatcaaacaagctggagaatagggtgaaagctaaatccaagagtcaagtcatatatagcctccaaaccaaaacatgaaaggttgtttcttggaaggttctccaagagcttataagttcaaattcaattgattcttaatcaagaattttgtttgagcacaggcaagctggaaagagatatcaacttccataataatacagaaacaataactccaagatttcaaaatttgagaaacaaaagaagtttttgtcttctaaaaagagtatggattctaaggaagagtaagcactcacttaacagaaactctaaatttattgtctatgaactataagctgaatatagcaagacttctcttaagagaaactcagaaagtaaacatgataagggaatccttcctccaaattaaagggttaaaaactgttgaaatcagctgactccttgaagggaattttatgatatttcctcattgaaatcatatcctccaaagctattctcacactctaattccaaagccattggtacaaactcaaccaccactacatgtttttgagccaaagataaggcaagcacaaagatcaccagtcctgatttgatcaataacagctcactttccactcctattttaattacccaaaacttagaaggccctctaggacagtgaaatgaggttttagattaggcttggcaaaggaaaagcttagtgaaatctagcttttcctattcaatttatgtactctgtcgtttatgttaactcaaaaatcccaacaaaatgttaaagggcatgataatgataatcacagatattcataaacagaaaaaaattccataaagaagtatatcaattatttcatttttcccttaactacttcccaaaagcatccaaacccagatatcagatacttctttctaccccaaaagaaagaaagaaagaaagaaagaaaca

SEQ ID NO: 300033 - DNA, 1386 bp, Cannabis indica
gttctactggtgttttttagttgttctactgttattttgagttgttctattttgtgttctactagtgttttataaaaatacagtataagatttccgtgtgacagtattttttgtaaaagttaactcaaatttcagtatttttgtaagtttccctattaatacgagggtttgggccattgaaaaggatcgcaatttgttgtgtcttttgatacgtttttgtctcttttcatatggagtggttttgtcgatcggctgaattataacgacttgccacattcaaagtagccactctcccatgcatccaagattctctcagtgttctccactcacatgagcactcacataagaccaaccattgtaaatacgatagtttgggccattgaaaatgatcacaatttttcatttctattatgttttcgtctctgttcatagggagtggtttctaattttgtctgtttagggttctacttattgcgttcattattcttgttgttcttgggtctgtggcttttggtctttgttaggttcatcattctttgggtttggttattgggtatactacgatcaacacccttgagtttttacgatcgctgggtctagagtatactgcgattgttggccttgggtatttatgattgttggtcttggttcttgggtatattacaatcgtggtgtgtggtcttgggtatgttgtgatcgtctattttgggtttggttcttgggtcttgggcctaggtgttgtctagatttttcgtaagcttgacacatggactctaatccaagtaggctagatgatagttggccggttagtgcctttgaccacagtttctggaaggggggaagccctagctcttggaaagggcctctgcaaaggatacatccatgcaaggcgaaggcacggagagcattcgcgatccgtgatctttcccagtcctaggaacaaaagccaaatgcctcgcgagggctaggggcttccagtgacacgggagagctccacatgtacatgttagattgcagactggacaaccatgcttttttgagtacgacactaggttttgtcccccatattatgtcatagtacaaagcatgcacacccaattgtacctgcccgagtgatccaacgaccatcgataagggcaattctaaaaagaggaccctgaggcgacacgtatgaggtgatcgtacagtacaaattaacatctttaaactccatgtgatgaatcgaccacctaccaaatcaatggtcaaattttccctagcaagatctgcccagcaagtacgtgaaaggaagaatggcctataaatatgttgcaaattattttaccaggatcttctttcttcacgatcttcctcactatgattgaggtatcacttgttgtgtgtggg

SEQ ID NO: 300034 - DNA, 2406 bp, Cannabis indica
ttttattattattgataacacatttggttatttatttcatacaaaatataaggtcttggttgtttgctagtttatttgttctgttcaatctcttttcctctgttttttcttttttttttgtaagtctctaatcatggatgacagtatgagaaggaactatggtaacatatcattggcagaagatgaggaggaagaaggtttattatttgataatgttggtattgataccctagaatttgactcccaatggtgtcttgtagggaggtttttaactgatagatctcttgactatatggcgatgcaacataaaatggcttcgttgtggagacctggaagaggcatgactgtgaaagagttagatcctaatctatacctatttcagttctatcatgaaatagacatagagagagtgatagagggcagcccgtggacttttgatagagttccattgatctttgctcggttaaaagaacgtgacgatcccagatcagtggtactaaataaaattgacttctgggtacaactacatggactgaagacaggtttcatgtctgaaatagtggtgaagcaattggggaattacattggcacttttgttgaatctgataagaataatttcatgggactttggagagattatctcagggttagagtcacaattcaagttgatcaaccgctgaaacgcaagaagaaattgcagttgatgaatggactggtttgttatgcccattttaagtatgaagatctctccacattctgcttcatttgtggtattttgggacattcagaaaggttttgtgaggttatctttactactccaccacatatgatcaagaagtattatagtttggagttgaaggcagaaccccaacgacgtcgacaacattccattggagcaaaatggctccgagaagggccagaagtgggaagcagcagctccggcagccagtgtgaacgggacaaatcaggggtgagtaattacaatggggagcaattaatggaggatttgatgtgtgatgaaaatcagctgagaagtgagaggatacgatctccactaatcaaggaaggtagtaatgccaatatgcataaagtggggaatgaaatggatttttctataaatggtaatcacctgggtcaaactgaaagtaatgaggagaatgagttggtggtgctagagaataaaagagggaaaatgctgtcaaaagatttggttgatgactcacatgaccaagatgcaacacaaaatgtaaatgtgggccaaaaaaacttatctggtgcgggtactggttcccaggcccgcactccattatgaatgttttgagttggaattttggggcttgggaaccaacggcttgttcaattcctaaaagagttgatttctcaaaagaaacccaattttgtgttcttatgcgaaactaaatgtggcaaaaatagagctaattttgtgggccggctattgggctttgaaggaacatttgtggtggaggcccaaggaaatagtggagggcttgttatgttttggaaaaaggctgaggagggtcgggtagtgggctactcaagaaaccatatcgatttctctgtcgaagtggaagaagggaagcactggagacttaccggaatctatggagagccgaatgataaaccttaggcgtaatacctgggatctgttgcagtcacttgtggatgcttatcctacaccatggtgtgttataggagatttgaataatatcatgcatcaaagtgaccagagaggaggtcgtggttaccctcgttggctgctggacgggttcaggaatacagtggagaggtgtgggttgactgatatggagctgttgggccatcgatatacatgggagaggggacgaggtactcggagatgggtggagatacagttggacagagctctagtttcaacaaactggtatactatttttcctcagtctcgtttaattaatttagagtcttctccttcggaccacaatccaatttttctggaattggaatgtcctcctgcttttgttcaaaattacaatttcaagtttgagaatgcctggttgaaagatgctttgtgctatgaaattgttaaaagctgttggaatgatgataacaacagtgacatttttgcaaagattaattcttgtgcaattgctctggcgccttgggggaaagaaatcacaggtaatttcaataaaaggatcaaaaagtgtcgtgcagaattgaagttgttgaagaacaagagagatgagttgtcagtttcaagtacagtgaggtgaagaagaagttgtttacaattcttgatcagaaagaggccttttggaagcagagatttaaacaattttggcttaaaggaggcgatcaaaatagtaaatattttcatagagcagcgagtaatagaagaagtcataa

SEQ ID NO: 300035 - DNA, 2553 bp, Cannabis indica
tttaaaatgaacaataaaatctcaaaattcatccatacattaaattagggaatatattttacatttatatgcttacatttgcctaatttcagagagcccaaacaggtgttacaaatacaatcaaattatgttttaaccaatatgatcaaactgttcatattagtacagatatttctttcttctcatgctccttaccaattacagtagttatagaagtgatagcaaaatcttaacacatcaagacacaagaaatgataataaagtatagtcttacctctgaaggtaagcaatgccaaggttcccaaggcaatcatagttgtcaggagtaatagtcaacaaagatgacaaaactgaaatagcactctacaaaatacaaaagctttatattaaacaaataggaaagaaagcaacactgtgaagaaaaatgatagaaaagttgtacctgcagacgaccagttctaagaagaatcaagccaagggtattccatacagctgcctgtcttatatcggattgtattgattcctttagctttgaaagaatttcctcaagctcatcaggatctagctctttatcccggctgttatcccccgaactttctaataaaaggcactgaaacaattacagaacatatcaattttgtattatcaacaagaatgtttcattcaccattcgatttttcacttttaaggtatcaaaaatttaaacgaagataatatgccaaatatagataaaatattaaagcacctgcgcatggtggatctgtactaatgaaagtaagtcaggcctgtcaatctctatctcagggcgaagtaagatctctgctgccttttcatatgccaaaactgcctaaaaggttccataacttaatgaagatagcacatggcaagaaagtgaagtgaacaagtctcgaaatatacctttgctggttggcccaacctttggtacattagaccaagaataaaatgagcatgagcatttttcggtgtcttccgtgcaacatgaactaaagcctataataagcatgtaccgaggaggtcagatgtaaaacaggcatatgcagagaagcccccaagtatcataataaaaacaggagttggatataagaatttgacactactacaggaaagctatatcaagcagtggggacagggcatctacttttcaatgttattactgtggttggattgtgagttacaatttacaaactaaggaaaatacaaacacagaatattgaacaaaatccaataatccagaatgaaacatcaaactcacagttttaaggctgctaactctctcctcacgggatgagggagccccttgaactggcaaatcaccatcagcatcagctccgcaatcatgtggggattctaccttattgcttctcgaacgggatctcccaagtttgtttgaccgttttccttcaccttccactgcatcgttgtctctacaagtaattgtactcttatcttgactagcttcatcaattaacaacctacattcaatatgcaaccaaaactaattaattctcatttcctcaatgtactacaatacaataaacaatacagtgcaaatcttctatcgctctatagcagacattcattatcctatgagtgagaaaaaaattctcttaatcgttaaagcttttaacaattcaagttttttaatttacaccactatcaaaataattttccaaacacaaaagaaattattgttcctcctactaaattaaattgttctttagctaactagaatcaggctcctaatacctgaaaatcaacaagtttcacatgacaaaccaacaaacgaattcaaagaaaaattagtcgtaatcatttttaatttcgcagaaactcggctatcaaacagagcttgaaaataatttcgaaaattaaattacaaaactaaaataaataaggttattttcatagaagaaagaaagaacgaacctggcgatgtccggagttgaaacttggagagtatcgccgccatcagtttcagagggatcgatgttaaggtcggctaaaatagcaagtttgggaggctgaagaggcttggaggtgttgttaatggaggcctccataggccccgagtcaccaagttcctgtgaaacggacatttttgtgctttgagtttgtttaaaaagtagcaaggaagggaagaagaagaagaagaagaagaagaaaaacacttgtttgtttctgagagtgttttaactttatttagttctgggtcaacgtgtatcagttagttagatgggcttcaatttcagtcgggttagttggaaaagaggggaccactcatcagcccattttaatggtttgggccattcggcccaatattgataaactatggtatgtttggcattggagaaacataataaggaaataaaattgggattatttcataaatatacaaagataatttttttttacattttaacagatattattttttttatatatttttagggaatttttttctcttacaaaaatacaatcgttgttttcatgttgctgctataaaaaagcaacgtgaaagtaatatttttctct

SEQ ID NO: 300036 - DNA, 9222 bp, Cannabis indica
gtatatgaaataattttttaaaacattaattaatttttaaaatagtcgcacttaaatatttttaggagccaacccacaatcttggcgcgtgagtgcaatgccactagtagtaagaataaattgcatggaatggaatcccataaagctgataagagggggtaggtcatcagtgatggagaatctgaccagaaagagaaaaataatattaattaattaaacaaaatccaaaatccgaaatgctttaatcacaagctaaagctaccaatcatttttctttgcgtatcaagttgagagtcataataagcaagaaagaagaaaatcccaggagctctgcccgctatttcttcaaaatttcaagccttcccaagatcagtaattggggaaggcgggcagatttgctccaagttattttgattctttgagatcaaccacagagactattcttgtgattctttggaaaatcttgttgggaattttctttttgtgtgatgggtgtttcagatgattgtgatggtggttcattatcatcttcacggggttcacggggttggggaggtggcattaagagcttgaccaggaggaaacaggtggattctgctaatgataagaaaggacctcaattggccaaagagttatctgttccctatcttgttgcaattggtaacatttggtttttctttctttaaactaactccaataattggtcgatcttcccatttattaatatggattttattattttgaagctgtttgttttagattaatgtatgcccagtagttgtatgatgatattaacacatttctatcacccaagtctactgtcaaattttaatgttcaacagttcaaaactgattgattgggacgctactttattttctctagtttgaggcagaagttgtttgattacataagagagccatttatagtaggggttggcaattcgtgtcatggaacaaaattctttatatcaaataattatcaaatgtgaataagctataatgtatttttgtgagtaattttctttaatttcaacaatatactgaatataaacagattaattcatgttagtttcgagcgtgtttaacctaatcaacgcaaaaaattgtttttgtcattcgggttcgatccacacctatttttcatgacacttactcgtaataattcatgtcgagtttgtgttgtcgtgtcgggttgtgacatgaattaccatccctagttatattgtcaccattggaaaagtaaagatgatcaacaaagtgctgatcacgaaaagcaaaggtgataaacaaagttttgatctaatactattcttcttaaattaaaacagatatcccttgactctcctagtttgacatgtaacatttgtatcttttgtagttttgttttcctgaactcatcagttaattcgtctatatactttgatcaggagttggctcaacaattggagctggagtttatatcctagttggaacagttgctagagagcatactggaccagccttgaccatttcatttttaatagctggaatagctgctgctctatcagctttttgctatgcagagctctcaagtcgttgcccttctgcaggaagtgcctatcattattcatatatatgtgctggagaagggtattccgttttttctttaattatttgtttcatcaattgggtacttttgaaagaattaaaattataaacaccatttgaattatgccattaaatgcctattgcgaaatatacgtcaaaggtgacaaaacttccattatacatataggtaaggaaatagggtgcaatctcaaatttttcctttccttggaggggaggaatgactaatctcaagtttctgttttgatgtatatgatgaatgttctctggaatggggtgggtgttcaatatgtggtttattttttcagattgtaatttttttacttttatgtttgctagacttgcttggttggttggttgggctttattactggaatatacacttagtggggcagctgttgctagaggaatatctccaaatttggtatataaattccttaaactctaaactttttttttctttcctgaatttcaatttgaataagatttattgtcaatgctgctattaaattttgtttcgtcgtttttgcgcagtccaaaatttttgatattagcaattggtttcttacattttgtatgaagttcctatggcagctgtcttagtctctgtcgcttgatgttgatatgaaagttaaatttgtctttgggttatgaaagttactgtttttctgcaataatttcactatttttacccgcattctttttcctcttcttctttctcttatagggatttctttttggaggacagaacaacctgccagcttttcttagccgtcaatatatccctgggcttgacattacggttgatccctttgctgcagttttggtatttgttgtcactgggctcctgtctgtgggaattaaggaagtaagctatatgtttgtgctctagtcttgtttaatttgaggccaacatttgattgttttccattacctcaaatttgttaggctcatcttatatcacttaaatattgcagagtactctagcacaagctatagtgacaacagcaaatgtttgcgtactgctatttgtcataatagcgggtacttacttgggtttcaagtctggatgggttggatatgagcttcctactgggtatttagacaaccatcttttttgcctttctgttttcttttataggatacaatagagttaggcaatctatttctctttctatgtatataatatatatagatgaataataatgttttaaaaaatatatcttccttttctaaaggtattttccctttggggttgatggaatgcttgctggatctgctacagttttcttttcgtacattggctttgatacagttgcaagcaccgctgaagaggtactagtatttttttttttattgtctttaccaaaatttatttttgggtagggtggggtatggggtgcgattaataaaggggagcttacatttttgaagtgcctatttttcttattttcgtaggtgaaaaaccctcgacgagatttacctctgggtattggagcatcactttctatctgctgtgctttgtacatgttggtctctgttgtcatcgtcggtttggtaccctataatgcaatggatcctgacactcccatctctactgcatttgctagccatgggatggattgggcttcgtaagtttacagatatgctatgataatttttgaaaatttgttgaaagctgtgactaaatttaacagactttttatgcttgtcattaaaggtatgtgataactgttggagctgttactgcactctgctcgacgttgatgggttctctccttcctcaggtacaaattggttgttaatgtgttttcctctgtcacaatttcacaatttattggtttttgcttttgagctagctattgttcatgctgtattatgcttttgagctagatatgggtgtacaccatttataggatttttcgcgtaactaagatatctttatctttgtcttttgataccaattccctttccctgctcaatccttgcaattaagatagtatgtaatagagatggtcgtaattatgtggggttggaatgaatgatgattgtacatttgataactaataatagaaatgcatgtttacagtggaaatagaatatgattttgttatataccttaatattagtctcattagtataattgattagaattttagaggctgagttgtcaaaatattagtagctttaagtgagctatcctatattactaagtgagtaaaagattactcagggagataccaaactgcccgaaaggtttggaactttgtaatatctctttttggtatcaataaatacctattttctaattctttcaagtattgggtgtggcttgtcttgaaaatgtgggataaagttagatattgggtagcaatgtgaacgagttcaaaaggcccccccgctttttttttttttcacttagctagctaaatattagagtgtcttgttgtaaatgtcttcagtataatttctcaaactagtatttttttcattattaatataagttcagctggggccactgcctagacttataaacttggggcctatgggagttttattgcttaaactgccagggccaaaaattaaaaatatatgtatatttatagttaagtttatttgtttatttaaaattggtaataggaatgcaaaggtaggcagtagtctgtcctgatacagaatgtacccgttaactgtaagacagaaggaagaatgaaaaacaatgctttacaagcacgagcattttttagtttatcatacaataattgatcatttttgttttatatggaaccatatttagtattagagaaaggatagagttgcaacttgcaaaagatgatgctgggaatacagaaggtcataagggatcactttaaataaccaccaaacgtgtcttatctttatgtttgccaaaaaaaaagaaaaagaaaaagaaaataaggaactttacacattcctgtttttcttattatcacgtgacagtgatagaacaaggaagaccgatttttctcaattttataaacatttttcttgaatatctaaaaaattcaacatttttttagcaagagtgccggcatatagccgatgatgtcacattccagagcttctttcttctacttgatttagatcttgatacagtaattgattataaaataactaatcttaaaataattactgaattaatgttctaattaggcttaggtatagtactattcaattacaggctgtattttagtttgtgatatttatcatgaatccagaaatgaaagtatagtagttattgctcagtaggttgccctcctaaatttatattatttcttaaatgtgaagattcatttgctcctttctgctggtttattaccatgaatcttctattgttgtcatttatgtatctttcctttttgttaattctattttaaatttttcctggataacactgttatttcttgatttcttagccaagaattctgatggcaatggctagggatgggttgctgccatcattcttttcagatgttaacgagcgcacacaagttcctataaagagcacactggtaactggaattggtgctgcaatcttggcattctttatggatgtttcagaattggcgggaatggtaagttacatattttctgggtaattattgcaatgtttgttttttttttctgcaatgtagtgtatttttttttcattttgttatgaagatgcacacagtggcggtactagagaagatcatggtgcattgagatttattgggagcaatttttttatcacaaagcaactcaacaaaactgatatgatgtaaaaattgagtgatgccgaaaacattagctgtgatctttcctatcatttttgtttttgcaagtgtcttctaaatctgaaaacttggataatgttgggagaatcaagtattgggtagttttgcggttatttgatgtaaaacatgtcaggaatctattcttttcaggcttcttaagggagctggcatctatcttgtaattattggacttctctcctttctttgtacttctttctgcttcacattcttttttcctattattttattattagctggtcatctagttaaggtgtcaagcttcagagtattgaagattttaaaaattatcacggattatgtcgtcaaccatttattgggcagttatctaggtatgtcctttcaattgaatataggcattttttttcctccaatgtactgctgatgaatagggatgaggagtcaatagggagtggaaatgcaagcctattatgcagattactatgctggaaaaatgttggtaagtaaaaaaaaaagaatgctcattgtttgttaagtatcatagtcatagagcatctgttgtttcataggtagtttctacaaatgtaaattttgagtatagctataatggttatgtgctgggcatcctggttagagttgaacataagaatttttgaagattttgaggttaatcctgaaagcctatgagataaggttagatattgggtagctatttggttgtacaatgtgaaagagttcaaatgaaggttattgttgatttagccagagattggagtttcttgctgtaatttctagtctgatgtattttcccatttttgaatgttttcagttccttttataaaaacgtacaaatttaaactttgaattccagtttgtgttttttgtactgatgcctttgccattggcaggtcagcgtgggtacacttgttgcgtttactatggtagcaatatctgtattaatactcaggtatgtcccaccagatgaggtgccactgccaccatctcttcatgagtccattgattcattcgcattgcagtatggtgagagtagtaagaaaagcaacggaaaagatcccaaggttattgttatctcctccaaggatagtgctcaacctttacttgatgaagtagatgtctccgtggaaattcctttgattgccaaacatctacatattggcaactgtaagtcctgtaatgctttcttattcctatgaaattaggtacaaacacttattgtgatgccaattacatctactttataactataatgctaaataaattcaagcatttgatgtgcgctcaatagctttctgttttggtactgtgaccattacatttgttgctgctataatattttccccgcttgttaaaactatgttagaggtgactgaactatgtctgaagctttgtttgctttttcttttttttatttaattgtatttttccttcagtagcatcatttttttctatgttcagtttggcatatgggctgttacatggatatgttagagcatggatttctgttacgacctttgtttgttctgagatttaggaatctaattatgcattctattctttttcatgctatgtgattttcctatcctatgtctctggtttcttctgaaaaatgtttaagtaccatcttattgattgttgcagatgttatgaatgaaagtaaaaggcgaaaaattgctggctggacgattatgctaacatgcattggggagtttctccttgcgtattcagcttcaagtttgggctttccaaggtatgttaattccttggttcgttttaattttggctcatagtatttcctgtttcccaattacatggggtatgtgatgtgagtcatggatgccatttggctcttttgtccacaaattttttgattctcagagatttgatgtaaacactggcctctcatttttgtggaaggtacttgtggttttagttgttctggttgaccccaaaattaagtaaaaatggttgcacattatttgtggggtttccattttcatatattttcaattttttttggcatttcccacttttaagattttgtccgttaattgttcttccagctttcttcggtactcattgtgtggagttggtggtgctcttattttatctggtcttgttgtgctgacctgtatagatcaagatgatgcacgccacagcttcggacacgcaggaggtatgctcactacttatatttaatacttggggggtggggtatacttggtatttctttgaattaatggatgcaagtacactactaagcagtggagatattggtgaaaataggtacagttatttatggttagatgttcttgagaagtcggctatggctatgtctatacttgttaagcatgtctcataaatttatgccatgcccaagtgtacctatatatgagttgggctattccttgggccacatcacaaattgtgtgtttgataagaggaagtggaatgaggaagaagagcggttggaggattagtttgtgtatggaaatggtattatggatttcgtattatcaggcttagcctataattatctcatcataattggatccttccattcatatgagatataatacaacaggagaagagtcttcctctcctcaatatttttcctccctaagtcatgcaaccctctacgtagccatgcccaagtgcactatatatccatatcatttgtactagagtgccataatattttgaaatgcattcatccaagttatttattaacagagatcatctatttcttttttcaggtttcatttgcccgtttgtcccattgctgcctattgcttgtatcctcatcaatgtgtaccttctggttaatctcgggtaattatttaattattacttttatatgttcttttattttattttatgttacattatacttttctttttccaagaaccatgggatagattcgtatgctttagctgagaaaaagaaaacaactcaataatattggcaagaaaggacaatgcaatctcaaagcaaccaactaaatcttttgattcttcagagatattgaaaatgttgtttgtgtaggagatttactagtttgataaattcagaaggcaagacttctaaaaattgaacataactaggcagtcatatagacgagcaaataaacaatcctaattgataagtattgaaatcagataatatcaaatccttagttaatatctcttattcatcatagctgtcctttggaattggaacttgggcttctgagactgttcccagtttttgaattgcatattttctttctctagcagctaatagaaaatttactttcatttcacgtgcagagctgcaacttgggcgcgggtttctgtgtggctggttataggggtcgtggtctatttgttttatggtcgtgcacacagctcactgcgagatgcagtttatgttccgactgcacacgcagatgaaattcgtcatggttcagcaaactatgtggcttagttcccattgtcaaggaatttcatgtgatccaaccaagtatggtttgtaacaaaggtgttgtcttgttaatatttacttgcattatttattgccggaaggactacaaaagtagtccactccttgtacgatagaccttacagatatcatgtttgttcttacttgtaattgtaaatagaatttgcaacaaaagtctcaccacttttactgatttcattatacaagtattttagagctctctctctctctctctctcagaggtgttatgtcctttccagggcattgtcatcagatatgtagagtatacattggattggactgatattgaacttggataagata

SEQ ID NO: 300037 - DNA, 3389 bp, Cannabis indica
atattatccatttgaaaagtcaataattttaggcaaatggacccacattttctgacagccacaagtatagcaactcccattggagttgcactaatgaaaactagaaaaatggtttcttccatttcggatgcactagggcgctaattggattttcttcatagcattgcagtacctaaaactagcattacagcttgggctataggcttgacttcgagtcgtcttttcacaaagcgttgaggtgcctctaatagcgttaaagcgctatctcctgcttactttgctcaatttttgttcgttaatcattctaaaacgtacccaactcatctttccacaattcaactaacccgaacaatctaattggcattagactagctaattatcatctctttttgcatatttttctcacttatttcactcaaacttaaatttgttgccaaattaatctgaaacatcaaagaaacaagcataaaaccgccaaaacaataaaaattgactcaactacagcctaaaacactctaaaaataacacaataggcttttttgggtttgcggtggtggctggccctttggttctcggatccagattgggatagtgattaggagaaatgttttagttggcgtttttagatttgtatttggtttgtatccactttttctttgtctgttttcgtctttagcaatttctattttcatgtttttttatgcttgttttatcttcttaataataataatggtatttcttcaccgccttactagattagtaatggttgttattggtctgaagattggagaggggtttgatctcttttggatttttgatgttttgtccaatggctttagttgcttatgcaggggattcataattctttatatcacttcgatctgtctatcggtccagtgttatgcgctatcatcttttatgttagggtgccaaaatatggttggttgtgttattttctttatgtatgatctaaataatagggttattagttctaatttttattgaaaaatcattggcttatagtaatgggtaggtgcagtgtgttagacgttcatttgatttggaaatttagtatacttcacacttcgttgatgtttaatcgctagtgacttattggattcttagttgagattgttgttagggttttcttcttttatcttgtaaagggtttagtaagcttattattgttaattttgctttatgagctatattttcatgtaatagactctatttaatttatttattaatgaattggtcattttttctttaaaaaagaaaatcatatttaagaaaaaaaaatccacaatagatctctaatcaactttatgtctaaattaaattgattagcaaaatttgaaattagtccttatctttaatgaaatatggttaattaactctataaattatttattaaacaaataaaaaataataaaattggggaaccattgaccaaaatatgcaaaataaggtccaaattgaatttatttctttttgttataatgcttttaacatatttttaaatatgggtgtaaagaagctcaattgcactagggtagaactcagttacactagcggtagagaatcccaacaaaatttatagttaaagctaagacaaattggcttctctaggaaagccattaagtattttttaagaaggtgatcaagataaaaaatttggtctcgaagcagccaaactcggcttcttcctatctcgactacttcataactgggggcaattgttcggaaaatttttcaacttttttactcacacttaaattgtaaaattataaatgtcccacattcactaatgagagcaaattctcctacccctttctataaatagcgcataacatctctcattttggctaaactcactcaaaagcgtattatcttgctgaatttttgcaagatagatattttcttttgtaatcaaatttgctgttgagacaactttatgcttcaacaattgaatactttaggaaaggattcaatgaggtaatacctctattgattatttacactcaatttacattgtacaaaacaaaaaattgcatatgcattacttaacaataaccacaatacaacctgatagtgatatatatcacttaacaaaacattaaacaattgaggactaggtagcaacaccgacaaattgaaaaatcaatctcgacatacttggtttgagtatgaagaattagattcaagataagttctcaagaacaaactgaagaattgcacaacatgaatcttaaaaatttacattaagcaaagacgacgcaaatatataattttataagtatgaaattgaaaacttaataataatagaaatggaagatagcttcataattaaaagtttgaaattcattgtcaaaacaatacaacatactaataatggttgttttatatatttgatgtatctttttttctttataattgtttttaagagcatactaatttgttttgataatttcttctttacataattacataattttttaaataataaaaaacattaatacaagtaaattcacaacttgattttttttttccctcacattatcaactgcatagataagtattaagttctatcaaaatggtttaccacatcctcttttaggcataacacttgattctcagctcatacttgtttatgtctgaaagagacaatattttattgcataatggctaattctccattttcaatcaattaggtcagattttatcttcaaccttttctttttattaaaggaaagacagctatatattataatagctattatgaaataactaatatataataaaataataatatcattttattaatcaacttagaaacagggtgaaatgtatccctggtttttcttcaaaccatttgctctgtctctctttcacactcccccatcactaaattttgggtccacagatcagaatatatacaacaataaatttcattgaaaagccaaaaatgactttaactctaccaaccattttgttcttgatggaagatatttattgtagcctggttatctcagcagctcattgtagaggccacccatattcagtctaaatgccttcaatttttctagacaagtagaaatgagaatattctgaaactagatccaaaccaaatgtaatctaacttgtggaatggataattaagactactgagtttcccaaacataatttagaagagaactatggttgaacaaaactagctaatcaagtagataatggcttatgggcacttactcattggtttgactcatttaaagaaggaaagtacaaattattcatgtatgttcaagatatgttccctatgctcacggggttcatgaattatggccaacaaacagtacgagctgtaaagtacattggtcacagtttcattg

SEQ ID NO: 300038 - DNA, 4947 bp, Cannabis indica
tctctctctctctctctttttggatttatcatcaatttgccgtttcattcacgaaagcgttggtttttgtatatgggcaaagctttaaattaaaccccatcaactcattttggagcaacaccaaaaaaaaataatatgaagaggcaaagaaatgcggctatggcggttttggctaatagtagggacccaattagtaaagattcgacctttggtaagagaaagaagacaagagctactactactactgctcctcctgttgaaatagctgcgaaaaaagatgatgttgttgctgttgttgctgttgtcacgccggcgccggcaccggaggtagtggtggcgccggagccggaggagagtgaagggttgttgggttgggaggagaattggtggtggccttggttgagtggtgttgtggtggatgagcaaatgtcttggggggtctttttggttgccattttgggatgtggaaaatggtgaagattttagtcattctttgtttagtgatgtgttttgggatgatgatatttggggtttaaggggtttttaattattaacacataattatagaaaaactaaccatataaatatatatataaatgtattatatgtaatgtgacatataggataaagctagtttttgattgttgttgttatgttttattcagcttttaattattatgtgttcttcttaaactcacaatcatataatgaaggtttggttttggttcttttgttacttgtaattgtttgtggttttggtaaattgagataagtataaatgaaattaaatctaattatggaagttgacacttaatactacttaatatgagaaactgccaaagttaaaaatgagagttttctttttcttttttccttaattgtccaacttcttatcagcactctaattttaactcatgttgagattgaatataataataagtgataactcatgttgtttaacgttaatgttgaaattaaggataatagaggctagaaaaaaaagatatatatatatatatatatgtacaaattgctttgcaaaagttgatgccgacataaaaaaaattgtggtatatgtaagagtttctctgtccattttggcaaaaaaccaaaaggaaagaaaaggtcttccccactaaacattgttgggtttagtactttaatttattgagttgactaagtgttatataaaaatcttaagtctaaattaaaattaaaaacttgtagtgtagttcaatcaaattagacatgtgtttccaaagttttaagtcccctcatgaaaaaaccaaaaactattgcattcatttttatgaacttttttttaaactaaaaaaaaaattgacaaagcatttattttttaggctaattaggatttttgcctctgaatattgatatgtatcaaatcatgcattctgaacttttgaggtcgttaaaaatgctctatagaattgttggatttatggatttttttttttctaatttaagtaaaaaggtctaacatggatgaaagtttaggagacatgatttagtacatgtcaaagttcgaggggcatgatttatcaaactctggggagcatggtttagtacataaacaatcactaaaatagtaaaattgaatgaaattagacaaaagtccttatatctaacaatctcaatagtttaggtagtatttttaacgaccttaaaagtttaaagagcattatttagtacatgtcaaagttcaaagggcaaaaatgttagacttatttttatgttagaataatatttactataaacaactaaaaaattcaaatggtgttagtgttactgttacattagggctgcataacgagcccaaaacatgaagagtctgatgggctggcccactcgtcgtgtgttggcccaagaatgtttgagattcctcgtaaggcattctcccaattagggaaagttctaaacttgcaatttgttattaaagctgtcaagaaattaaattccaagtgggaatttaataactatatagctcattgcaaaagttatgaaattttgtgtgggatgaaatttttctaaggtgcctagaactttaattatattgctcacaatttagttaagtgagcttttaatcaaaatataacctttatatatttgaggcatcctcttacatctattaaattgcatttttttttaaaaaaattaattatgtttgttgatttatgatatatttattttgttggcgaaacgaaccaactatattgaatattgacactcttaactataagtatgcaaattttcatattatttgatacacatacgttcatatcatttacactctttttttttttgacgaaattaacttaaactttgcgtttatagagttgttttaaagtttataatttaattttttttgttggagtatctcttcttctcattttagttttaacattaacattatggtttataaattgagcactagtagtgttcaacactttctataagtgacactttatgattgattggttagcgatattttttgaaaatcattttcttaacttatatggtacacattacttaattagaatactaaacactaatagtattttttaagaattttcattaattaagcttcttattcagatagacaattagcttttctaaatgagagttctctcccatattagtgttgtttgcaatgtgaatcaattataatatttttgacaaaaactactatttctttatgccaaactaacacaaattttatattttgattggaacatcattttatcattttaccactgattcattagcaatatatttattaattattgaacaacaaaatttgaattcagtattattctcattcattattatatataatagttcattcacattgataatacaaaaaaggaaaatgaaaggaaagtaattataaagttcatgaagaatttaattaacacaaacatgcattaatacaagtcttttgaaaacaaaaacaaaaacaaaccgaaacaaaccaaaacaaaaggaattgaaatgaaagtaaggggatgtggatgatagatatatggttacataattaattaagaattaactcaattaattaagttaattaatcattgtgggggcttgtaagcaatgaaactgatgcactgaacttggcgaacattgtcgaatccaatgatacgaacgtgtgcatctgggtactccttactggcttcctcaacctctttaagcacttgtgttgcgtctgtgcaaccatacataggcaacttccacattgtccagtaacgtccatcgtagtaccctggggacctgttgtgctcacggtacacgaaagcctcctatatatatacatacatacaataaaatcaattattattaattaacataacattattgattgattgattaattcacataataattaatatgattaattacttacaccaacttcaaattccaaacagggaatccagttgttcttgagaaggtattcaatttcctttaacaattgctcagtggtcaaaggtggaaggtaagaaagggtctcgaatttcttcaagtttcttggtggccacacctgtatttatagtaccaaatttagagacagatccacaatcgggtcgggtccgacccgacccgacccgatataacatacaattatttgttctagtgatgagattatatgtgtgataaattttttactttatttttcaaaatacataactaaaaaatttaattttttttcctatttttaaatgtgattaataaattaaggtaaagtagtaccttcatgcattgaactcttccaccattgctggccaaagttgtgatgtcattgttggatttttgagtgactgggaatgaagcacttgacttgagcccagagaaaggagccaccatgctggcttgtaccggagtggagcggccgacggaggcgacggtggcggcggaagacacaattgaggaagccatttatattgtaccctttgcttaagtattttactatgtatataagagaatatagacttgctatgctctaataagctttgttcttcctttatttatagaccaactgctactgttcttcccttctttttaatccaacggctttgattttgttttctaaaaggatgggtgtgttttgatcgttggatcatgtttagtcccatattcgaatcatattgaccacacacatatgtactggaaaagaatagccttatcgtcttatgcttcattggtaatgacacgtggcactctctagtgtaatcttatctcagcctattgagaatatgtagttgaatttgcatcgagggttttgagtgaatatccaatccaagcaattgaatttttctgatatgattataattgtgacttgtgaattaacctatatcattgataatttccacgtcattttctaatttatcaccttaatttctaacttacatatatgtctacttgctatatgtaaattatatatatatattttttttattgcttaatattaatgcatacaaaaatttgaattctttcacagacagttaaatctgtctttgtcaattacagactatggaatttcatgagttattaccaccataggttttgtacatgcgccaaaaaaagtagtaaaatatcatattaattttatcatgacattattacttatttttattttatatatagtatttatattacatttaatttaggaaaatatacatctacacatcttatataaaaaataattaacgatttgtttgagaaatattaattaccgaaaaaaataacttaaataactaccattgtcaaattattttgtaattagttatacaaagtatattttacattgaatgtaattattattattatttttttttgcttaataagatttttgttgatgaagagaactagtcaattacattgtgaccgaaaactttgagtaatgactgataaaatagtgaaatgatcttaatg

SEQ ID NO: 300039 - DNA, 4962 bp, Cannabis indica
tctctctctctctctctaaataacactagctcactatttgataggccacctttaaatcttctccgccaagaattagctggaacttgtatatatctagacattttacagaaatcaacttctgggtttaatgacaagaaggatgatgatgtttctaccaacaatgatgatcaacatgaagaagataaacttgaaggactagcagaagagaaactagtgtctttttgtgaacaggtactccgggaagcttctgatttgcagtccactgctggcgagaccactaacatggatattcaccgagttctggagttgcggtctcccgttattgttaaggtattaagtcaacaatgtaatgtttagttgttctgttctgaacatttagattttagtttgtaatgtgtatcgttctattatagttatgattttactaggtattaaggtatgagtgatggagatcacatgcctagcttactttattctcatatatgtacacttaaaaagattaaaactagaataaatatttatatgatttattttgtcgataactagaagtgtagtttgatgtggattattagaattaactgcctagtgactggatttttgttttttagcttcttagtttctgatatacttttcataaacaggccttgttgtggttcattatttcttaaacttctctcgaatttatcaaccacagtttatctctaagaatcttctcctttctcttctctcttggttttgcatatttgtttctagaacaaacttatccatgcagaagactttaagattccacttttatatgtgttctgcgtcatttacgttccaaaatggtttgatcccttgtatgaattggtcacacatctttctatatttattatttggttgggcatccataacgtgtattatatgatgtactactcagtagtcagtacttctgcgtcacatggcatcaataattttttgactagattacaggtttgacaatctgggtatttctaatgagaacagtcagtagtgctgacattttttttattgcattctttcaggtgcttaatggcatgtcctatatgaacaaaaagattttcagaagacacttgagagacttttatcctctgcttacgaagcttgtatgctgtgaccaggtaatcttatttactttaatgagcacaattaatagaatttgttgcctgtataatgtatttctgagcaccctgtaacaccaatatattgttctagagggggatgaatacttcaatttcgggattttttctgtactatgcctgtgcgataactttgataggtgctactgagtctagttcagtggtgagagagaaagggataaagtggaagtttcatattcgtacttgtaacctccatgtttctgacttgtgtattaagtgtgctagttctattgataggagaatacaggatctctcactttttatcattactttggacaaattaggtgttctaatatagggagttctagtttacaatacaaatatgtataaatatatactcagggagttcgagtatgatcaccatactttttttgcatccctgcatgagcttgacttttggtttgaactaaataagttataaggagtccgagcctgaccattgttccttctgtgctttactacatgcgcttgactttttgtactcttagggatgtggcttacttatcagttactagaatggttgatatattgattgttcttgatttgtttagatggatgttcgcggagctcttgctgatcttttcagggctcaactaaaagctcttctgccatagttttgtcaattctgtgagaaaggaatggatttcaacatcactgctgagctgctactgctcagcctatagctaacaacaccgattgtttcttagtgtaattttgtgcccacaatttgatttgttcagaaactggcattattttatttctcattttctccggctttatggttagtgaaattagaaagagaggtaggagaaaaggaagtattattttgaattttattatgtgtattaataccccgattttgttactttatagttaaaaaagtatcccaagatggttgttcttgttcctggggtcccatagtgattagcaactattttgattaattaatttccattaaaatgttgtagagtgtattgttgtattttatgccgtggatcatcttaatatcgtaaaatggttcgacattttaaatagcaaagaattcgaaggtgttgattggtggaattatttatattcactttccacttgtaattgcaattaatacgggaatcatagggtaggacgcgtgtacctttcagaaactgaaacttttggtgttgaaagaggctctaaaaggttctttcttgaaatgggttttctcttgggaagatataccaacaccaaatgctcaccaacaagtataccacaaccaaattccctccatgtagtaggattcttcactgttcaatatataatatgatcaatcattcaaatgggttttccttagaatcgagttctttgttgtattttaatgtgattccttacctttccttccactaaagtttctaggaacctttttaaagtagtgctgaattcaaagtctctcttcacatgtctctttgagttagtacagagagaaaatcatcacgagacatgggttcacgttactgttggattttcatgctcttttgcatgatcagtgaatgttttacagtaggcgttcttggctttgctgcaaactggggaactcgttcaactcatccactgccaccaaacatagttgtgaagctcctcaaagacaatggatttaacaaggtgaagctatttgaagctgaccctggtgctcttaaggctcttgcaaaatctggtattgaagttatgatcggcatacctaatgaattcttggcacctcttgctggcagtgttggttttgctgagaattgggtgtctcgtaacgtctcagcctatgtcacaataggagttaatataaggtaataaataatcatgctttgcttgccctattagtatgggaaataaaaattctaatcacaaaagtcgatatctacaattattagttccaaataaacttttagattagttacactttttttctttagacaaatgcataaagacaactaacttaacagaaatttaaaaaatacggctaaagggcctctttctgaaattttctaatgttgtctttttcccacattcttgttgtactaactaatgtttaacaccatttgtatgtacttttatacacaatcgagttgtaaaccaaatatacatgtgtaaatgcaggcacgtggcagttgggaatgaaccatttttgaaaacatacaaagatactttcctccaaacaacactcccagctcttcaaaatgtacaagcagctctaataaaagctggtttaggcaaacaagttaaagtaacagtcccattaaacgccgacgtttaccaaaccgatagtggtcttccttcagggggagatttcagagccgatatccacaccctcatgatcaacatcatcaaattcctaagcgacaatggcggacctctcaccatcaacatctacccattcttgagtctccaagctgaccctcacttccccaaagagtacgctttcttcggcagcacttccaacccaatcgtcgacggttccatcacttacaacaacgtaatggaagctaatttcgacaccctcgtcacagctctagagaaaaatgggttcccctccatgccaatcataatcggcgaaatgggctggcccactgacggtgacccaaacgcgaattacgaaaacgctaaacgattcaaccaaggtctcattaagcgaattgttcaaggacaggggaccccaaaacggtctactctgcctgatgtctatatcttcgctctaatcgatgaagatgccaagagtatcgacccagggaactttgagagacactggggtattttcaattttgatgggacagtaaaatacaatctcgatatgggtaatggaaagaatttggttccggccaaaggggtcaggtatttggctcggcaatggtgtataatggcgccacaagccaatctaatggaccccaatttggctgagagtgttaagtatgcttgtacttatgcggattgtacaagtttgggatatgggtcgtcgtgtgggatgcttgaccctaaaggtaacgcctcttatgctttcaacgtgtattaccagaccatgaaccagaggaaagacgcttgtgcctttaataacctttcaaccatcaccaccgtcgatccctcgccggcgggtcccggcggtggtaacaatacttgtcggtttcagatcatgatcgacttgggaaagcacgaactgggtcggtctccgccgcggtcggcggcttctccttcgattcttgggcttggaaacgacggttcccgctttgtcgtaatgatgagcctcggtgtcgttttattagtctctgtgtttataagctgagtttttttttttcctctggctacttttactaatttttaatattttatttatttattttggagtctattttttatttggtccaatttgtgttacataagttgtcaaattgtaaaaaaataccagttcggttcatataggaaacaaataacaagagtcaatctcttttacagattttttattttatatcaaaagtaccaattcataaatgtaattaagtttaatttgcggtcaaattctctaaaattttgagtttgatacgataaacttacattactaaaattttagggtataattctccaaattttaattatgttttgttctccacttttttatccattttgatatgttaaataccaaataaacttgctaagaaagagttgtgtttggaagtaactgtataattattaagtaggataattactaaggtggtaattacacactttagtaattacactatattttaaaatgcaaagtgtgtttggatat

SEQ ID NO: 300040 - DNA, 4154 bp, Cannabis indica
aaactttttaagaatatatgctgactaatttatatcaactcaatatatttttgaagacaattaataaatctagttaaaatagtactaacagacttataagtaatttaagcttggactactattgttaatttttaaattagaaattatctgcatcaaagttaaacttttagaatttttaccacaattattagacccgtaaaataataataataataataataataataataataataataataataataataataataataataaagactattgatgattgtccccggtttagctaggttcctaaatggtaaaatgtattgttttggctcttaatttttaaatctaattttattccattcgttttcgtcaataagtatataatgctacttttttgtttttcatataattactatacatccatcctaatttcttaaattgatatggaaagtcaattgacaagaacaattttaattgctaaacgatttagacttccaaaaacgcctataattcaaaggattaaaaatttccacagcggtagataaactacagccgcccaagtgggccaaagatcaaaataaagcaaaagtgtatagtttaagattattttgatattaattattcaatttagtaacttttatggtgcatacccttaattaactaatgtccactgaacgttttagtggacttaatcatcttaacagctcaatcagttaattaatttccaggtgacatgcataattaaattatttaatttatgtattatttgccagataactgatcaaaacaaagtgaatgggcaaagccataatatcgggtctgaactaatcaatagtgattggattaaaaattgtgtgttgattttgactgccgattatgtaacgtaatttaattagtgtggtttttggataaacattatacatgggctgcaactagttaaaagagacaatattattatatagtataaaatataaatatcatcatgcgatgagatgtgatgagttcaggcaacaagtcctgttgttggtaatttaatgaaactgagggacccacatgtaaatatgttacagacgtacattaagattttttttaggttgtcaatcatacaggttgcgagttgggatgatagccgtccacgtggcctttacatatgttccgatctaccaaccggtacgtaatactcactattcaagaacaaataattttgtccaagagaaaggtgcgtaacatgagtacttcaaaatcaaatggccatacaaagtataatgggatcgaattaatttaaataatatatttataaagagcctcctttaaaaaataaaaatacttcaaatctcgtattattttcactatcttttagttcctttttttgttgatacaatttcttttttctttctaatatttttagttttggatattaatctatctgggttcatagttttgtgataatttttacggatcatctactgtgtgcaatgcacacacacacacatatatttctatttctattgagtttaacaataccttaattaattttataaattcattatttttaattttttttgtcttttcatttttaaattttataatagcatttttttttatttctaaaaaattcatatagcaatctacataataattaatggagcaacttaaattataagttaaatctacatagtaacggcctacacatatagcaaccacagaataatagcaaaaatataaaaaaaaaaaaataataataatatataaagtaattcactttcaatttataatcaaatacctttaataattataaaaactatattttttacataccttgtgctcctcttctttctcatccttataattaatgtatctctctcaataagtggaagaagaaatagttgaatttagatttaggactggcaaagatgaacttttgaagggtgggatatgatcgattttatttttcacaacgacagctacacgattcttcacaaaatcaagattttttcctccgaaatattgttaatgataattttatgcattaattaatttaaatatgttaataagtaagacattagaaatattaaatatagtaattttatataatagttaatttgaaatattattacaataatgaatattatatatttattttggtattaaattaaaatatttataatttgtttaattttatttaatttttatatagttttattttttaaaatttaaggaataattttttatttttttaaatacttaatatattagcggcgggtattaattattattagcgacaaaattaaaatttgtcgctaatcatcattaatagcggccagttattagcaaagaattattagcagcggactcctgccactaataacttttagccgtggaaaatgagtttattagcagtagtccccgctaattaatacccttttatatattgtagtgtggactgaacttaactacaatgcggttattaggaaaggagaaatgatgtcggcagtagtggctcgagatcatcacgaagggaaggtgtattgggttggtatcaagcgactctttttgttaatgctctttgtaaggaaataacctcttatctattgtcgttggaatttattatggagaaaggcttataatttattattgtaaaaagtaattctaacataattattaaagtggtgaaagattaaattaaagatgatagattaaaaattttgtaacttatttatcaactcatttctgagatgtaatttttttcaaagttatattgtagctcacaatttgaaatatttgtcaatttatattagattgaagattaggtatgattgatgagttatgaaaaacgtggaggaaatatctctacatatgaagtacatgaagataatatacataaataaagtatatatggggtggctccaccacgtgctcggggaacttggtaataatacgtacagttacactttcagacattgtttgtaattaaatgagctactactttatttatggtgtaactaaagggaccacaatacaatatcaaacatgatgagttacttttacattatattttcttttttttttataacttggtaattaactagctgataaggccaataaaggccgatggaagaattcaaagaactatgtcttttttgtactagctaagtcccctttttcttttattaagttacattcttttattagttgtaactttatgaatgttaaatattgtaactttgttgtccataatgtgttaaagtgggcgtttatccaccaaatatatggctgtattccgatctcctatgtgccggaaaacttactttgtaatgaccgcgaagtttagttatcttatgttttaatgcatcgataggcttattttcaaaaaaaagaagagaaatcaaagaactgcatgtgcaatatgttacggtaaaaacacagttactgcatcttcatgagtgtgtaccaatttagatgaatatgctgtatgtacttgtgtttggaatctcgcgacgataatgacactacactgtcaccttgtgattctccatctgtgaatgatgtaaggaaaaagaaataaaatatatatgaaaggattttttttaaggtggaaaatttaaaaaatattttatttatagattatttaatagtttattctaattgaacaattgtatagtaatattgtgatctgacatatttaaattaggatggattaaaaaatttctcttattcaaaaaaaaatttaatattaataattattaaatgtaaccaactaaagattatcttattcaaaaaaataatgcaatactagcaattattaagcatatatatttactaataagtaataagaattaatggtaagataattatttttgaaaaatgtaagtaaatgatcctatttttaattttacttgtaacatccccgcttcaagcttccattgtgtccttacacccacggactaatggctcttatacacgagtacgtcactctggctgcttcatggactgacgactgaccctacagactaacacgagtgtttccagcgtgctttgtcctcactcgcacgcatcttgggaaaacttcccgggaggtcacccatcctgaaattgccccatgggtcaagcacacttaattgtggagttctttcgtaatgggctaccgaaaaacaaga

SEQ ID NO: 300041 - DNA, 4522 bp, Cannabis indica
aaaactaaaaaaaaaatagatttttttttctttagaaaaaatacaaaatatgaaatcctaattccctttcatcctcatgctctctctctcaaattctccaccctgacggccctaataactccactccatcatggtggtcaaaaactctaaccgtaactgatctctaattcccatgatgaagaacttttctttcattaatatgcccatctatccctaaattattcagagagtgaactgggctctataattacaagtttttagagttttgaactttcgaatatcgattcacatcctccccatctttgaactctgatcgtctaatgtcgtcacaccttcatcaagttcaaaagaaacacaatcggatctaacctttttggtagcaactgagcctttttttttatttcttcaggttccggcttgaactttagtaagtattattgctccctcggtgcacactcgaaggttctcccaaaaaataacaaaaatagcattgggaaaaggttcctctttaggtcctgaacctacttctgtggcttcccacctagctaattcgacaaccgaatcatggtcttcatacacagctccacttcgtttgcaagtgaattcagatcatcctttatgtttggagatagcatgtcctctatccatgtaatctctgcaataaggttaagaagaatctgttggcgatgagtagcttgtgcataatgaccttgttgatccagctcacattggttattcccaatacgatgttagagtatattatatcaaatcgaatgtccgtctgggtttagcctgggtgccattggactttggctgtctcaccgcctatgtttcgtctaggtaggcaaaagtaaggcaaagagaaagcaatgttaaggatcgacagaggtgatcgagaaagagagaaatttgccaagaaagaagagttaggattttagggttctattcttatttttaattgttattgttttatttatttagtaagaaaaagtaaataaatattttttgtaattcaaaataatttttataatgtttaaataatttcattatacgtgaagaaaaaaattatgccatatgtatatggtgtccatgtgtagagtacactatatacacatacaatttgacatgaaacataactagggatgcacatttttcccatagagatggggccccacgaggaccccccctcctaatgggggaggggatttcccgtcttaatggagaacagggtggggacgggaattattttttgtccccaatgttaaacggggcgaggacagggatcacactcctcgctccgatggggaccagtttggtattttattttatatttttcataataatttataatttataatgtatgtttgtatttttttaatatattagtattctttttgtgaattttaagttgtgtttaagataataaataatttattgaataataattaatgtgcaatattttaattttaatgtagtttaataattttatatatttaaattttattataaattttaattttttattaggggatttctcgccccgactccgatcccattaggggattctctaccccgtgatgggaaataagctgtaatgaagattaaaattcttaacggagatggggacggggagagtactccctgctaatttcctgccttgtgtgcatcgctacacttaacaccaaaaattgaatggaaaaatgggcaatttctcaaagaataagaatttaggagattcttccatcaaaaaatttggtgttgaggttatttgcacataaagtaaaactttagaaagttttgcagaaatttaatctatatgttatatatatataatagatttaccatattttttaaaacaataaattttttttctttattagtattattcaataatatgcattactattcttttttatttatttaatttcatttgatatcatcattagttgcatgctctctctcttatgttgttatatattttaggggtgattggtttaataatatccggatttaattttatgattttgaaagtttggtggatccatagaaatagctaattggcaggtcagttactataataaaattcaaatcaatatttggattttatattgtaaaattgaagatgataaattcacatattcacccttaaaaataaaatcattatcttctctcctcttttagatggtagcacaccatcttcctttctgatagcacgtaaccatagtgtctctctcctttcatgactgtctctcgcatctagcttgaatgtgaacacctcgtattttttaggtaattctccttattaatttatactcttagatttgtgatattctctaattttggtatgaattgatcttcttctttgtgttcataatgatcatttcatacatgcgttaatattggaaagctgaagaaggtcatcgttttttctctcttcaataagattatttttttttatcaatattataatatgtagatacttaagagaaactttagtaaacttatttcagaaacaaatcaaaacccacaagaagtttatcttcaggatctcatggatgcctatgggtcaaattaagatagttatgtgagctttaggcatacatatatgaatatatattatgtcttatgtctttattcatatacttaataggatttagaatttatgtggttttgtttaaataaaaaaactttttttaagtttaattattggtgcctggtcgaaatttattgttattgttattgtccaaatcttgattggttatattttttttcattattaattattcaattgtcgatccgtgtaaacgctgatagccctgaactatttttatatgcatataatatgtatcctatatatattcatgttgtatattttaagttatttattattattcataatagtttggttttgatttttggcttgttttgtcattttttattttttaatatacgattattttgagtttttgttcaattactcaattgcattgcatactaaatgtgttttttcttacttactatacaaatttcccttcatcaaatctataacgaaaggtttgtcaaattaataatcctatagaagtttacattgtatactctagtttgattgagatgttttttttctcccaaattgtaaggtttttcttcttctcaaatagtactcatatatgtatgtaattgtaatgtggctatatatgaatatatgtgttagaagggagtattatatagtttgtttgttttagattcatgtcatttgttaattaagatttaatgatctaagaaactaacacaagtaaagaacctatatggaaatgcattattgatagctgatgagaataagttactgatcaaattcaacataatatgatatatgaaacactgttataatatttgacaattgatttagattttgaattaacagtatatatatttcctatacacaaaaatattttgagggtcatagaactattatatcgtactgatctataccatatatttatgtgattaaaaaatcaaagtaaattgaactttccgctttagaaatcttcccagtgtttgttacattaaatttgaattatataataaatatttaattactttttttttttcttgagaactagaatccattaaacaaattaccgattacaaggaaatggcaagtcacgctcaatagcatgacgagcacaagagagtgaaaccccaatctacattgcactaattttgtttttcaaaacgtaattgactaatacatgagccaccatattggcttccctaaagacaaacctcacaccactaatagaaggacataccaacagcctttgaatctcaactatgataccatccacctccctacaaactcgctcttctccattaatgagttttaccgcctgcaaacaatccgattgtacatcaaaccttgccagccccctttgcattccagctttaaggccatcccgaattgcacaaagttcagcctccaacggagacttggcccggtgcaaaacagtggcagtagcaaacaaaccccccctcgccatttctaatcaccatacccgtagaagcaccaagaattgtagaagaaaatccagtatcaacattaatagtatagcttccccccgttggctgctcccaccttacctcatctctttttggaaccccttcccgccctcctacattacgttggagttccttcaaatatttgccacaccactccaatatattcccggcccttggataacaacccccatgaacataagagtttctaatagaccataaatgccaagaaaccacgagaaagaactcaaaagaagacgacgaacaaaccttactaagcctttggaatgcctccataatgttgcttgaacgagcttgttgaatcaaatcccacataccacaccttttccacacctctttactcaaccgacagccccacaacacatgcggcccatcctctatgtaacgtccccgctccaagcctccattgggtccctacacccacaaattgaatggctcttatacacga

SEQ ID NO: 300042 - DNA, 1941 bp, Cannabis indica
tttttagcattttttttttttttttgaaaaaaaagggtaaaatgggaagttcatgtaatcaatggactaaatttgtacaaattaagggagggtataaattttgatatgacttgtattattaaggccaaaaagtgaaatttcccttgttaaattgcattataaaaaaatacaacttcaacccaagtaaattttttgaattttcttacttcttttgagtgagacttctcatataattagttagaagtacatgcctgaaacttcttataaactcagttgaaaaaagcttatatattttaacttcaataaagaaaaagtatctcattttacttgagttcaattagggatttcgattcatattcgggggtcatattcatatcgtgttaagacctatatatagtaggtatatatttgacttgaatacaacacgtttaataatcgtgtcagaaaataaaacctgaatacaatctgtttataagcgggttggcataacacgatacgtgtaactcatttataaacatattttatttaaacaggtcaaccataacacgtttatgactcatttatagcctgttaaagtactaaaataacattaaataaatcattaataaactagtttcgtgttaatcttatcaacccaaacttgaaccgtttattaaacgagttagactagtcaacccgaacacaatccgaatccatttaaagcaaacccaaacctactaattctcatataaatttcgagtcgtattatcataactgacccgtgttgtcgcccctaagttcaaccaccacttttcttttcttacttattaaacaactgccatgcatttcacaaagaatttaccaactttatatgattatttgttaattggaatttttgaatatttttttagaaaaataataagtataataaattgaattagcaaaacaacattgttatatttcttttcaaagcaatgaataaattcattaaaaatataatattgtcatacagactagctataaatactatatatctagtgagcatatcatgtttctcaaaataattttatacatcccacaaaatatagatagtcatctaactaaataagttgttaatctatttgaaaagcatgtacaattaatctatgagtaacacatattagacatactcctaaaaatctagataaagaacttgcaaaaacttttaacaatgattataaaatcatattaaaatggagaactctgatagtaaaagtaatcacagttgttaaatcttggtatggtaacatttataattcaatattatatcatcaatgtcacacaatttgctttaataatttgttataaaagaaaaaaagtttaactatacataaataaatgatacattagtgggattagagaataaaataattttaaataaatgatatgttacaaattttatattttagtttcactacaaataaacaatataagcatgaatagataaaaattatagaaaatagtagcaatagaaaaaatatacaatgacttattttatcaaatgtaatagtgtttgtagtaggtttataagttcgataactttaaaagttgtataactttataactctaataaccatcaattattttcactatttcctttaaccgttgcaaccacaaaaaatttattattattattattattatatataataattattcacgagtgggtaagagaaatataacttatgatcataaataattgaataaaaaaaacataatgaatacacaataaaatacttcacaagtcttaaatagacacaaaaatattaaactctatattaatgtttttcatatttaaaaaaatattaaagaaataatataataactgttgcccctgatttcgcccaatatatgtggaccaaccagacagggacacgtggatcaaaacatcttaatactcgaattatttgctaagtctttatg

SEQ ID NO: 300043 - DNA, 1281 bp, Cannabis indica
aaaaataatcaaatttaacattagtgggacacatttcaaacaaaaatttgacagatacaacatcatttcatttcctttcaggttaacaacatcatgagcccttaacttgaaattgaatcccaccacctactacaacaagtaacaacccaaacaatgggccaaaaaccaaaaaacacaacaaaacaatgctatacattgctactgctatggctgaaccgggtacccatacccgtaaattctatacatattataaagcaatcatccatcctcagccaacacaatactttcaatccacaagcacaaaaaacacaccgactgaaatctccgaaacatctaagcaaagcaaactcggactctgcctattaacattcagaggttggtaccgtgcacataaatgccatcttcgtcttcctccatcaacttgtatacactgaagtgactcacccgaaacttccactctccttttataggatcgtacgaaagaaactcagcgccttgatcctccgccttcctcttcagcatctctttgtatttctcaatccttgggccttcagtatattgacgcccggtctttttgtcaaagcacttgatgttaaggagcgtaacctcagcaggcttattaagaccttgacccacaggaggtttcttgctctcgtccatataaacaatcacttctcgattgttaaactgaactaaggactcgagatcaagccgcctcacatctgtttcgcccaaaaatttgatgctaccgaaaccgtgtcgtccaacaacaaagtccttgacacggcagcagaatcctggttcggccctttccttggcagcaagttcttggattcgtggctcggtgtagtaatcagagcgcctgagctttggcatttgagcctcaatatctgcaccgtgctcgtacacaatagcagcctcaccagctctgtgcccgctaagggtcttataagaatcccccttgtgagtagaatgctcatcgtgcactccattctgtttcaggctcttcactttggctttctccggagcagaaggaccattttccacgggatcttctgtaacgatgaaaataaattaacaaacaattggtttccatttcaatatttcagaaattaagtttatcaggagaatatatacatttaattataaatcaatgccaactacactagaaatgtagctactaaaccaatacgatattttttcgagtacaaagccaaaacacatactattattgttctcaaagttggagttgggtgcatgataagcttcctcagataattt

SEQ ID NO: 300044 - DNA, 1190 bp, Cannabis indica
aaaaaaaaaaaaaatagaacataactaaaatttccataaaacaactttaacttaaatttaatcaataacataacatcactacaaccaaaaaaaaaaaaaactacttcagtgacaacttttttagtcacaatataatttttttgtaattaaatgtgactttttagtcacaacaaaaaattatttgtgattaaaacaatacaagttatcactaatttagttttagtcataataagtattttgactaaaaatatatatttagccacaataaattgtaatttttgtgactaattttaaaaatttgtagtggatacttctacaaacaatgtctaatattaataaaaaacattctaacaacaaaagaacaagacaatattaatatataggttattaatgaatattacttaattagcaaatttttattttgtgtatgtttataaaagggggtagttggatccaaacaatgataaagatatattatatattaagaaaatgaagttaagaaaagtgtgatgctataattattaatatttgataggtttaattacactaaagagagttgtttaattaaggagagaattagtaagtgagttgaagaggcgaaggagggagttgtgacgaagattgttgagctcataccaagaattgagtgtattaagattgttgtctgtaccagagaatgtcaactgtatgcttaagtggcactccaaactccctccttgctttatacacttggatctttgtactgcacagtcttggttattcaggcacacaaatgattggtcccctccgcactctttgcacccgaactttttccagtgtaagttcaccagagtacccctatcaaattctagtacctaatcatcatcatcatcaataaaaatcaatgatgactgatcttttccacatatttacatgttaataatgattcaaacaatctatatataagtattaccaaagcaaaacttgttacaatgtgtgtatcgtctgcaacaaatatgggttgcgatcttgctgcatacttttttccagcgaatgccaccatatatccacccatcgcagcctgagattatatatatatatatatttatattagctatttgatgaatgcttagagagttttattagagttgttattatttaattattaatttaaatattaataataataataataataataaattacattt

SEQ ID NO: 300045 - DNA, 3244 bp, Cannabis indica
gttttatcaagaaggctctagaaaacgaaaccctaattccgaaaatccaatggaactttctccagcttctgatgctcagcccgtatgtgctcaggaagctcttgatcttctcaattgcgttactcaatctccttacgatcaacacaaatgcatccgtcttttgaattctttgcgcgactgcgttctcaccaaggtaatgtcttttttttttaatatatttgaattctccgatttgattttgggattttgagttaatggaccaaagaatcgatttttagtttgttagggttagtgggttagattgtgaatttgtgttaattgtttgcccttaattgtttttttataagatttgattaaatacctaaatggggttctccacaatgtttttgaattgagaattatgatgaaaaactctgttgaacaattgaaattgtggcctttgaatttgtattaaaagctcagcttattagttatctttgattacatttaactttaatctgatgatgttgagatcttagttttgactcaaagatgttcatttcataacactattccgtatagttataatattattttttgtaaatttttgaaaaatttctaataatttactagtagaattcctaatattccaatttattaagtttcacttaaaaccaaaaaaattagaccaagagatttataggttggtggtagcactcctcccacagaaatccatctaattgacatgaatccccattgtttggtcaattttttgttgtgttttatcactatgcaatgagtttctctcatttggggttttttcttctcttatttttgtgtgttatgcagaaagtgaagaagttttcaatagctgatcaggaagcaaagccaagtgacaagaaaacttgattgaattatgtattgttttggtagaaaatacttggatgaattgtgttgattgctacattttatgagagtcttcttcttcactctatacacttttgtaatttgtatatcaaattcagaccctaacctatcttcattattgatttgttaaaaaagatgttactttactatgattgcatttgctaccactgttaaggttcaataaagataacatttcttcttaatttcatttactatcattgtttttccttcctttcttttttgatggagtgtgattgttttgccaatgaaaataattccatgaatttgcaaggaaaatgagcttattgttacaattagttatcacattgctaatgttaaaagattgaaagaagccattgaaaattaaagttggtattgtcaaaattcaaacttgattttgttccaatggaaggtttgatagaagcaaatggaaacgacccattgaaaacagattgagatgaaaaatgacagtaaaccaaacagaatagaatcctcaacaacacaatcaataaattgtcaaaatcagaacactaattagtatataaatccataaattttgccccaatttcatgactaaatcacacaacatataatccaaccccaattcaaataatctctcttcagtgaattaggtaagtcaataccaaagccaccaacatcaacaggcatgcaatcccttgatctatagttgcccctgaaaaatcacccaaaaaaaaaaaaaaatcaaatctttattacaaacagtacccaatttgatcaaccaatgaaccctaggaagattcaatgagagagaaatcaacaatgcaatgcatcatcacatttttcaagacccatttttcttcaaccctaattcgacattaaccatggctgcattgacgtatataatcaaaattcagaattcagatctgttaaaaaacaagctgagagaactcaccgtcgctggtgggagccggagccggagcagacgattgagccgtaatagtcaaaaacagagaagcaacccccaaaacgaagaacaaaaccctggaaatctccattttcagtgaaagacacacacaacacaaactctctctgcgacgaatcaaaaaagggtggaaatccttcttaacctccgtacaatgggctccggagagcccccgcgcagagagagagagagttttgttttctgaaactacggctatggaggttgaagaagagagagaggggtgtttgttatatgggccgggcttttgaagagagagaaaaccggtaaagccggtaaaatgggttggggagaggtgtgggcccattaggcccatgacatgtgacagaatgaggtggactgaggcatggtttgacccagctttttttttctaattttaacagtgtgtccactctctcttatatccactcaaatttttatcccaaacttccttatttggcgccatattctacggctcccattctgccacgtgtacctcatctcttttttccttttttgaaatagaaaaaaaaaagagaaaccaagtggggtagttcatctttataatttttaaaaaattctgaaaaatttatagtgtcgaaaataagtttaaagttttttaaacatgcgtggtaaactaaaatattaagaattttgtttttgatactataaactattcaaaaactttcaggagataggagatgatattgtaactataataaacattgttatagaaaaaaaaaaaattcgatatgtgatttcaaatgtgaaaattgactaagaggtcgtaatataaaattgtaattagtatataatcaaataaatgaggtaatgtataatatattttaggcagataaacgaaattctcaaatgacctctacaactacatttaagaatttaactaatttaatattatagacataccatgttacaatttcatgtcaatgtacttcaaatagtgtttgcatggtggtatttaagccacatttacatgcacactgaaatttgtcaaactcaaatattaaaatttacaaaacatcaactcttaatttaatccatgcatcatggtcgcccatagatgtatttatctgatccaatccgtaatattttgctcatagtacatctgatccgcactaagtgcagattttatattttgaatcaaatccaattcgtttattaattcaaattcaatctaattcaatccgcaaatatatatataaattaaatcgattattttggattaattatcttttaatattaaattatttaatatttattaaaaaaaatatatattatcacataaataataataaagtaaagaaaattattattatgtatcctacaataaattaaaataaataaaacaaaaataaaaaa

SEQ ID NO: 300046 - DNA, 3121 bp, Cannabis indica
acacctttttagagtacttaacaacaaatgatataataagactaataaaaaatcaatggtgcaacagaaaatatgaataataacaaaataacaaccatgacgattgaaaataaagcattaaactgagtgtctaaaaactgaccagttagtacaaagtgaactgctcactcatgagtctattttatgatttcccatacctaaagataaactttacctgtgttgaacgatatagagtaaaaaagctcagattccagagtccataagccacactttctcgcatagttatgaaagctattttatccagccaatggttgaacctaacatcatataggatgactcacataatcattatcatcacagcttgagcatgtatatatatgccttggatgtcaaagtttacgacgcatacaaaaattaaaagggatgaacatcccgagaggagattaacataagatcaccttccttcttctttttcttccgtctcatgaatccggactgttcttatcaaagaaagagtttctcgtgcaacctacatggaaacatgagaaataaatcacatgacaatgttttcatatgaccgaaactacaaattaatttggattatactattttcaattcacgaataatttaaaccagcttggtttataatttaattttttcaaatgaagttaagaccaatttggattacatttcagcatacctcgttagcaccagcagtgaaatcttgcgtcaactttgcagctctcttttgataccttgaaggaaagcatgaattgtttaaactttatttgcttgcataactataatgtgcttagattattctgaattatatttataaagaaaatataacaaacataattatatccaaagtataacttttttctctaaagagtttaatagtactcttttgtttcagaaataagaaggaaatttaaaagaataatccaaatgcaaaactcaagtgcagatagtgtagttgagatgcataccaactatagtgatgaaaaattgtagataacacagagcatatcataattgcagataatgcaagaggccaagataacatcaacaaattaaccaatgcccctgtcccctaaatatataagtttatcttaggctctcgtcattgaaaagcaatgagacgtaatttaaccgagaaaaaaatactaataacaataacctgaagtagattccgtaaaattaagttaatatcattcccaatgacactagaaagccgttggcaatctgccccaagcctgcttgtcaaatccccaatagcttctctatcaaaaaacgatatatcctacatcaagaaagcagacagaacagtgtattccttcaattattttacctacaataacatgtccagaaacacaatagctcaaatgcttgctaaaagttttacaactgctataggaggcacaaaacctggaagatgatcacagaatatagagtttctcttagtcgcctgatctgccatatgcaaatgaagcacttgatgattacatattcaggttgcataccaaagagcacatgtaaaatcaatagatgttggtcatgagataatgcttattgcatgtaaaacaaagaatcttagttcaagaatcactttgaatgctatcccctatgaataattagaatacaaaatgtgttaaaagtgccccattcatcacatagtaagattaattaagatcataaattatactgaatgccaagcctaaagatttctttgagttgctcattctaaccagacctgtgagaaatgagaataccaccaatgtttgcaaaagggcaacggaagaatctcaaactgtttttcatgcttttcttcctaaagttgttacacacctctataacacattaaaagatgaattatccaaagaaagtccactaaagtcttaaaattacacattcataatgacaaatcactatgcagagcaatatttcatgtccataaaaacttcttcagaagagaggaaaggagacttaccaaaattgtattaacaactgcgaaacagccacttcggataccgctgaaatttccaatgaacataacattatttaaatagtcttaaacaatattaattctataaacataatcaactcgtgggaaccctttctcattttggtatgaatgatcaaatctttacttaacaatgtaaacatggtgagcagtgtttctctaaagctgcaaagaacaaaatccaacctgcagactcccgagatgagacacaatagaaccagtaactgcgagttcctataaaacaccatggaatcacctcgttgagctgaaaaaatagctgctgtcagtataccaggcattgaaatctcagaaacctgcatgaagaaaactacaatatgtgagaaaatggacatattcaattaaagtataaatcatttctaatattgcttatcccatagcaactcaaactcacagcggctccaatcaaagcaccgcagcccacaaagacaatccatctatcgtccccaatcaacttccacattctccgaatagcgaacgacaccgtaacaggttcttctgcagaaggaattgtggtttctcttcttcttcttcttcctgatcatcatgtaatctccaccaactttcgagtggcgtaaccgaaccgaaaaatcgagcccaattccgccggactattgtttcggcgccgtgtttttttgaagaacggaaagggcgaagatgcggcgaagtgtggattgggaaacggaaagaactgagattggagtgtatggtttgaaatgggcattggtgttttttggtgagagaaagagttgttgtggttgtaagtgagaaggaaatgttagagtgatggaggatggccatggaaatgtaaattagacgactgtccagggttgttttcgcatcttggtctgcgtagcttatagctagcactgtgcagggatgagaagcttcttcacaagtaactgatcttcagttcagacatgagacttcattgcccttaagtccaatgaactgtttttttagagcagcgaaacccccttatgttttgatttttatacacttaacccccttatctttatttttgagggcaaaactcctttatgttttaatttttatacacttaacccccttatctttttt

SEQ ID NO: 300047 - DNA, 1204 bp, Cannabis indica
agtttaataaaatctccagaattgagaaattataactctaatatttatttctaaatattggggtccacaaataaattaattcacaaataataataaaataataaaaattagtgctaattgcctttactaatccataaactagagcggtcattacaaaggtacctacaattattacaatagtggttttgcctttacaagggctgaatatattagtgaaaacagagtaaagagaaaagtttctactgctgaagaaaatgtattgaatcgaatcaaatgattacaagtggtgaagctggtatatataccattagagtacaaactgaaataatggaaataactaactttcttatagccaactttaactaactttaataggccccttcaaggtggagtgtaaagatttttaacacccatcttggatataattgtgctgaattgagagaggagaagtggtatggtgaaaatgccttctaggttagtctttgatgtaacatggttcagtttgagtaacctagttgtaattttgtccctaacgatatgacagtagatttcgacatattttgtgcgctcatggaagactagattttcagatatgtgaatggctaatttgttgtcacaaaaaatggttgctggttttgttacatggatgttgaagtccttgattattgttgtgagccattgtatttcacaagtgacattggcaagtgctttgtattcagcttcaacaaatgaacgagatacagtttgttgcttttttgatttctaggatatgagtgagttgccaagaaaaatacaataatctaaaatggagcgtctagtgtcaggacatgaaccccagtttgcatcagtaaaggcaaaacgttgtagagctgtgggagttgtggcatataagaaaagtcctaaggctggtgatccttttaagtattggaaaattctatatgcaacattaagatgtggttgttgtggacattataggtattggctcagtttgtttactgcaaggttgatgtcgggtctagaaattgtgagatatgtgagtttacctataagacttcgataggtggtggggtcagggagaggatctccatggtctttgctaactctggtatttggttctattggtgtggaaacaggcttggcattgaggtatcctgtttcttctgagagttgtattatgaatggtttgttgttggaaattatttta

SEQ ID NO: 300048 - DNA, 2369 bp, Cannabis indica
tatggttttatgtaataaattttcaaaatgtataagtttttcaaataaattttttttacacattttttgtaattattttgtttttgttgtacatttattgaaaaaagccctaatttttatgataacaatgtgtaataaaatggtgatagatatattaataaattgataaattaactaatttagcatgatacttaatataaatggattgcataaattgggtgaggtcaactcattgagttttggttttagttttgaagacagttaatcagtagtttaaatttgaatttaacaatgcttaaatttgtgaatgatccatgaatataaattgccacttctaacaaaaaacggatatttaatagccaccacatattatagagggtacaatagtaatttcagggagttgtacgtattataaagttacttctatctcctccactcactcctcagtctctctctctctctctctctcacattctctctcctccgccacttcgccgccgagaaaaaatggctctccgaacctgcactctctctcctcactcgattcgaccgtcgtcttcctttccctgcgccgcgaggcagcagatcgcgctcccgtcttcttgcttcggttccaagaagaatgtgggtgtgagcttcagctccactagtagtactggaaagagagattacagagtccgctcaagcttggagacagtcgaacccaccgtcggaaaggttaccgaggttaataaagataccttctggccgatcgttaacgccgccggagataagaccgtcgttcttgacatgtacacccaatggtataaatatttatgtatgcattttctgtctgtttggttactttgaaaattcgaaagattgcttcttctttttcctcgaaaattagtttctttagtgaacagagtatcgaattgtgctatttgttaggtaattatactactttaatttgtttttgtgaatgaaattcactggagtggtgatgatatgtctgacttgattttgtattaagccaatgtcaaatactgaaaaatgggtgcaagtatgtatgtgacattaattacttaaaatcaaagtgtaatgctagaaagtttgaatctttgttgtaagggtttaatttagagggatgctatagtaggatacatccaaagttaattaaagtggaaagaaagaaaagaatggatcatataattgggctataatgatatcagtttgtgctatattcaaaaggttcataatcttgaatttttactatagtgagtgactaatcaagtaatttgggcatgcttggatgctcgaacttcatagacactatttagcaaaatccaactttgtttttgtggagaaggtttcaattcagttgaaggtttttgtgcccattaatttatccatttttttctaggacgactttatcttgatatatgaggctccataaccatgcaggtgtggtccttgcaaagtgatagctccaaagtatcaagcactgtcagagaagtacctagatgttgtctttctaaagcttgattgtaatcaagagaacaaggtatgctatacatatgagtatgactccccacttcttataactcactcaatctcttagaactttaagataacaaggtatggttgtatatatgtatcggtatatgcttttgtttttttttgtttgattgtttattattggtaggcattggcaaaagaacttgggataaaggtggttccaactttcaagattttaaaggacagcaaggttgtaaaagaagtaaccggagccaaactagaggatttagttcttgccatagatactgtcaagtcaagctgaatattaggtcctctttcatcatttctctgtataatgttaaggatgtagtgaaaacgttcatttcaaacttattgatgatcgtacttgtatgtattcatgggatgtgtttttttctgttaaaatagttgaaaagtgttgaggaatggaaaggaaccatatcatatgcttctatagaaaagagaataatagtctgtgacagtggttccttgttttatctgcattttttttcttcttacacaataatatagcttagttgggtttcacttttttcttcagcaccctatggaacgattttgtgtaagggtgtttgtctaattgaattcgcaatatattttctattttacgaagcggattttatataaatatatttatatatatactagatagatgttacgtatatttatatatactagaagaaagttacgtgcaatgcacatatatttaggtgtcgtttggtaatacgtttgttttctaattttttaatcctaaaatgaaagtaaaatttttgtttttaaaaattttgcttttgaaaaacaaaaatgcgttctgt

SEQ ID NO: 300049 - DNA, 1076 bp, Cannabis indica
gtgtcactgtgggtgactgtgtggtgtgactgtacatatatacaaatatatataattttttttttcattggaagtataagtaaagattacgtatgttgcattgggttggttgattaattaattttgttcctttacagctggtgtgtcttcttagattttggtaagtttttagtcataaatttgtagcttggtagggtcgaaaatccaagaatcatttatattatttaaaagtgattacgacacctttcagtttcaagcagacaagatcatattttgtgtataaattctattaataaaaaatatatatattgtcattgcttttcctcaactaataattaattaaataattaatttccaaaacaggagaaacaaaacagggatactagagcatcaactggtttagtttgaacagcttatacccacttatggaaaatcctcacttctaattaaatcaattaaaatataataataataataataattaagtacctatatatatataacttaattatatgcattccaggagctgattgattaattaaatgtaaattaaaatttgaactttctacttcaaatctcttcacgggtaacgtaatcctttgatgtcagacatttttagagtagaaaattataaatttctaaagatatatataaatatatatagtcaaattttcagacatgcatcttatagaatgtatttatattaattgattaaataatacaagttcatgaatacttacatactaataatacgcatatttgtgtttatattaaatcaacatgcatgtctatcaaattataattaagataggaaaatgaaatagcacatattataactactgtataatatattctatcaagtcttaactttataataaaatcttgataatttttttttgaataaataaaatcttgataattaattagctaaataatgtgtaagatgtaattaattaattctattaaaaaataaaaaagatattgatttaattatatgggatatcaactactgttacgaattttatgtttattacgcaagtgtacgcaatcaagtagtatctcacgcaagtgaggtc

SEQ ID NO: 300050 - DNA, 3012 bp, Cannabis indica
caaagtcaaaagaggaccttggtctcctgaagaagacgccgccctcaagcactatatgcacaacaatggaactgggggtaactggattgctctccctcacaaagcaggtaatcttttatgcccctttttcttcttttttcaaaaaggtggtaagaaattaaagtcgacttatttttgttttgtttttctttgttttatgtaataggtcttaaccggtgtggcaaaagttgtcgtttgagatggctgaattatctcagaccagatattaagcatggaggttttactgaggaggaagacaatgtcatttggaccctttatagtaacattggaagtaggtaagttcaattcatccttctcctctttgtttttatgtatgtattcatagctttttatgtatgtatataactatggtaatttttgacttaaatttattaggtggtctgttatagcatcacaacttccaggaagaacagataatgatgtgaaaaactactggaacaccaagttgaagaaaaaactattggcaagaagcaccaatagcaatgagactactgataacagtactactgatcatctcaacttgactcgtttcagttcacctttgattaatcccaaagctgaaaactctgatcaggggaactctgcttacggtgatcatagtactaattcagatacattaccatatctgatgaatgtgaactgtgtgcaaagctttgatctcaaacacccaactagtcaactttcttactcatcaaacccagtggaagtttctgattttggaacaaatgggaacacaggctccagcatttcatcaacttcatcatcatctactttggctatggacaattgtactagttttgcttcatgggctggcacaggcaatgtcaatattgaggatgggattcttttggacttgggatttgactcttctaatgatactttcctcagtggctttggattttaggtaaacaaataattcatattgagtaaatttgttcactctcttttgcttaactctgactaatattaacagtgcactagctctaaactgaaggcttcattcagtaaaagtggaataataataatgattgaaacagaagctattattataaagtattaattaattttagttattcaatagtaattaattaactttactaggtttttctagttgtggttcttttattgggtccaatgtatgtgaagaattaaagttataattacatgttgatcataaatatatgaaacatggaagatataagtaattaattaatggacaagtcatgaggaagaactgtttcccattatgtttgtgggggaacctttccagagctttggcccttgccttgtacgttctattaaagtttttatttatttaattattttatttttttatggaattaaaaatggttatgaatgattgtaatgtagtcagaaaaaaataaaaaaaaaataatcttttatttatttatttatatttagataaagaataattattctgtattgtcagtggctagtcacgaaaatttgcaccgggccatgtagccaattcaatggtgaagaaaaacgtcttaatctaacaataacatatgataaataatatacatattgagtttttccatttgtgatcctaaagttctaaatattttcttttgtttaggctcaatttctagtttgttttcaaccagcatatatataatgaagacaaagtcatggtgtttaattatataaaccataggctattaattagttgaatatccgagtataaatagtacactataattccaattaatatttcactttacaatacattaatgtaaatattacagtatagaaatacaaatacaatatttccttatttcagtgagattaattactttatggtacaaaactctactcgagagaacttggtcaaaagcaagctctggtattaatcgattatttatcgtacaccaaaagaaagtatatcagcttttttttattttgtcttgcgtccaaatctacaggctgttatatatcattatcatatcattagctaatggaatagcttttgcaattgcagctatgtttttcagcaaatcagacactaatttatacaaatttataatacacacacactcaatgtgagtgactcctcctgatatatatatatatattcttgatcattcaaacttatccacacaacacaagtaattactatatactatacgatggtttaatcattatatatatgtactaactttcgccaacaatctaagttaagggaagaaaaaagtagactcatttagtaagtagaaggagatgtatgcatatatactatatatacgtataattaaacaatatagaatataaatacacaaaaacatatgtataataagaaattaagaatgtcataatcatagtttgtaaaaacgacaagacatatatattttttaatgatccactaaatttcaagcatgtacctttagacaattcgttgggcggcggcgtggtttaccctctcattgttagtatattctgttccaaaaacaatgcgacaaaattaatgaatatatatatttatagtatatacaaattcaaagaaggaataaaaaagaagacattaataagctattttgttgatgcatgtaacgctagctaccttagctatggcttccaatatatatacatatatatatatgtggtgatcataaagtaaattagtagatcgattattgttgtatgatacatttttagataacaatataaataaaggatgtttaaagatacaggaaatgaaaagatataatcataacatacaaattgatgtataaaatatgttatcttcattatacttttggctaaatcaataattaaaaaaatgtcatttctcattagtattaaaataaatagaaatttttttaaaaaaaatccaaaatgggcatcagaccatcgggccctacatcgggccatgcatcggaccatcgggccatgcatcgggccttcatcttcaagctcatatcaaaccagaaa

SEQ ID NO: 300051 - DNA, 2262 bp, Cannabis indica
ccgaaaaaacagaataaaaagcagtaacatttcagttccaaaaaagcaaatgatcacctacataacatgcccgtttgacattcaagtttataggtatattcatgttagaataagaagcaaaaattaagaatacctatcaagcaaaatttatcataaaaatctttcttcagtgtggaacctaattctatgttatctattccataatgaaatagttttgaaacttacttaggacgtcaaatgctgatagccgttctttaggatcagaacaaagcattttcttcacaagatctttagcactactagagatggaaggccacggatcagatgagaaatccatatgtcctcgaagaacagcatcaaagatactttgttcattctctgcatccacaataaaaggtgaaaataacaaatgttatgaatatgactacagcaaacaccaacacatatcctaacagtaataacctcaaaccagactaatctcagttcttaacacagcttaaaacatgtaactcgaaatttcgatccttacacttctgaatcagactaattatatactagaacaagaacatgttgaaaaaaaaaacaaactccagttctgaaacaaaaacaaaaatacctccccagaatggtggaacaccactaagaagaatgtacaatataacaccagcactccaaatatctgcctcagcaccataattccggcgcaaaacttcaggggcaacatagtatgcacttccaacaagatccttaaacacatctcctgcaatcatagcacaaaattcaacaacattgttacagccaaaaaaagaaactttcaatctataaatgcatgaaatcctaaaattaaaaatctaatctttaatagaataagaactaaacaaagctaaaaaagccaaattagaatataacccacattcccaaaaaacactcaccaggcttgaaaaacacagaaagcccaaaatcagtagccttaagaggcgagtcctcatctttactaagaagcaaaaaattctcaggcttcaaatccctatgcataacccccatcgtatgacaattatgaaccacagtcacgatctgacggcagagattagcagcagctcgttcagagtaatgacccttagcaatgatccgatcaaagagctcacctccagcacaaagctccataaccaaattaacagagtgtcgatcctcataagcacctttaagctcaacaatattccgatgaccagtcatatgatgcataatctgaacctcacgccgtacatcttcgatatcatcgcgattgattagcttccttgctgcaatggatttacaagcgaattgttgcttagtctccttatgggtcacaagataagtaatcccaaactgaccccgacctagttcgcggccaaacacgtaggttgaccggacatcctccatcggccggcccaacacgcggccgactccggtaccagctggaccagaagaagaagaagtagatgagactggttttgggtttggtaaatgaggtctttgtctcggaggtgaaggtctagcatcgggtgggaggatctgaacgccgccgccattggcgccggaagggcgttggttgtgacctgggttagctgatccgccggaggattgacctgaactgcatgagttgcccatgggtgtggtcaacggaggtcaaaggagagaggtttgataagagttggggctgtttgggtttgtcaacggtggtcggagatgggaatataaaagcgggttttgtctgaaaaggattgaccttgactttatttgaaattactaaaatgggcctgtgtaatatggatcccggatttggttcttttattttattttcatctgtatctaatctaattaataattaaatttagaaaataataattagtatttttatcttcttaatttttggcactatttaatttcatttcctaaaatatacgatttattaaaaatttcccctaaaatataatagttatataatgagtaaatactattttggaccctgtgttttacaaaagttaccaattagacctgctattttgttaaatgataaaatggacactgtattttctaaaatggtataaataggacccttaatttaattttgacaacatttttttttaatataaccaacttgaaaatacaaacagatttagaatatgtaaacagttttgtcataacacttttagatagaattgttattaaattctattttgacaaaaagtgagttcagggtcctaattttaccattttggaaaa

SEQ ID NO: 300052 - DNA, 4731 bp, Cannabis indica
ttgccaaatagaatcataagtataatttagttttaattaatccaattccctgtggttcgacctcacttgcgtgagtttactacttgattgcgtgcacttgcgtattgttttacaattttcgtaacatatgcctccacagcttataatttcaatgtcacagtattttacaggtcgtgtcaaatttaggggaaatggaatattttataagataaaagagaggtttgaagatacgaattgattgagagggtgaaggataaccattttggccaattttagaaagttggttatttgtccttctcttcggtgttagtacaccaattaatgttgtacaaaatgaatgttacagttgagaagggaaaagaaatgtgattttacatcggaaggaacgaggctagaattgggatggttaagtttgctcttataacatgcctaaactttaaccaagggccaacagatgatgagaagaatgctcacttgagcttaaaccaagggccagcaggtttgatagcataagtttggataaacttatagatgctttcttaacttgcaatgttcttgacgacatatacaagatagggttgtgctttcttgtggagggagttatgttgagtcgtgagccttttgtggatatttggagttttatactcaaatttgttgaagatgttgatttcttttttgagtttccttagggaggctttcttttgccaaacttatgacctccctccgaagacattataaaacagaaggctaactttgaaaagaagctaacgcagaatgttcagcataagtcgaagtacacattctatggatatgcacaagcattacactattgggcctttgaatccattttagaggttgggaaaaaatttgttgtgaagcacgggattcagttcttgaggatgcttagttggagcaacaagaaaaattacaagaagtgtgacattccgaagaaacaacttgcatcactattttcaaaacggctataatattatttctgttatatttgttttgttataattttgttatattactattagaagaaaaaccttaagtttgcaaatattttattattaggtgaaaactttagtttgatgttgttttcgataggcatcccccagttttgcggtactttcaatagattttgccaatattgttaggtgaaaagcttagtctaatattatatttgatagaaattcaacattttgcaatagccttttgataggttttgccattattgaaattgttaggcgaaaaatttagtctgatgttatatttcgatatgaattccatagttttgcgacaacctttctataagtttcaacgatattgaattattaggtgaaacttttagtctgatgttattttttataggaattcaacattttgcaaatattgttaggtgaaaagcttagtctaatgttatattcgatagaaattcaacattttgtgatagccttttgataggttttgccattattgaaattattaggtgaaaaatttagtctgatgttatatttcgataggaattccacaattttgcaatagcatttcaataagtttcggcaatattgaactattaagtgaaatctttagtctgatgttattttttataggaattcaacagttttgtgatagcctttctcaataagttttgccaattttaaattgttggatgaaaattttagtttgatgttcttttttataggaattcaacagttttgcgatagattttcgatagggttagccaatattgactttaagtttaaaaatttagtttgatgctgtctttttttgtgatagcctttcgatagtttagcactaagttattaaatttccatttttaaacttgtgtttattgttattaacattccgttcgttttttgtcctaaactgattgtcatgaagtgtatatttgctcgtccaaatgtggaggagtatgtcaggacattcactaataatgatactcagattattattaagatgggtatcaacaaggcgcaagctaaactctaaatcctaaactataaactctaaaccttgttgccttctaaagccaaccattgaaaataaacacatacataatgttctcttggttttcttgagagctttataaagaagaataaataaacaaacaaaatataaaatgaattgatgatgatgatgatacgtgtatcaaccgttgaaagagagctgacacttaaaatagatgatttctaaaaaaggacgttaaaattcataacttaatttttactatataattttttttgaatgcaaatatcaacttttattaaatgcaaacttcagctactaagcaaggtagcaaatcaataggaacagactccatactgaagagacgttcaggatataatataacaactttagcgaaattatgagccaccacattatcagatcatttaacaaaagaaaccaacacatttctcaaacttacaagcaagtttttacagtcatttattacttccccaaacaaagaaaccatggatagtggactctgtaatgcttgtacaacacataagcaatcagtttccactttacacatttgtggtcttgaattctttatccaactgagggcttcccgaacacctatggcttcggtaagggaagggtctacttgggcgtgggcaaaagtggtacggccttcaattagcatgtcgttaatgtctctaataaccatccccaaaccatagctacaacccccatcaaatattgctacatcgacattgatcctcacactattaacatcattggaaacccactacccattaccaactgtaagctgaaaaccagcttgtgttgtatcatttttccgagcatctagccattggtgaagataagttttagcgaaagcaactatattatcaggtcgtacctctttccgattctaaacaaattcgttccttgtcccccaaatcgtccaacaagtgactgccaataggcacttcaggttattgcaggccacctgaaacaccttgctgcaccagtcgaaaaaatagtctccagggatagtctgggtacctattcccacacagtcccagcattgtttaatgatgttggaagtaactaaacaatggagaatggtctcctcatgctcaccacaaattagacaaatactggaaacatctaccctcttaacccgaagctgagtaagagttggaaggcagtttgcaccagctctccaaaccagatttaagacttttggggggagtttcagactccaaagtttacgccagaactgggacgcttcatcctcaaaccatctgccctttaatttttgaagtgtcgagtatgcactcttaactgaataaatgcccgagttttctttacaccagaataattgatcattattttgagtgatcgtcaaatggatgttaatgattagttgtttgtccctatcattgacgagatcagagattaactcttcatcctaagataaaccatatgtggtcattaaactggacacaaacgcaccagtaagtgcgggatgatctgattccaccatgggattattgtcatcatttaaccacggctcacctaggtctgggatagaacaaccactccctacacaccatctaattccacttttcaacagatcttgagcttcaatgatgcttcgccacacaaagctcggttggcgccaatttgggcagataaaaacgaaccatgcggaaagtatcgcgccttgaaaccttcaaaacaagtgagtttggctttgtcaaaattctccaaccttgcttccctagtaatgcaagattaaaatcgtgcaaatcaggaaagcccataccaccaccacttttgtgtttacaaagcttatcccatgacatccaatgaattccttttcgatcccccttagattgccaccagaatctattcgtaagcttctcaatatcccgagtgatgtcaagaggtaggaggaacacactcatgacataacttggtaacgattgaaccacagccttcacaagcacttctttcccagaacgtgatagaaatctgccttcccaactctgaaggcgcttcttcacttttgtttttaagtagcccaatacagctgttttgttgcgactcatagtgctagggaatcccaagtaaaagttatcctcagttgctgcattcattcccaatagagagcacaattgattgcgaacattaggctccatattggtgctaaagaagatcgaggacttggcaaaatttacttgttgacctgaagctctttcaaacttttgaagaagctcatgaattctccttgcctcatccaccgtagccttgcaataaagataattgtcgtcagcgaacagcatatgtgaaacctgagatgcaccatttgtaactttgcaatcgtggatccatccattattctcatacttacgcaggattacagaaagaccctacgcacaaagaataaacaagtatggggataaaggttcgccttgtcttatcactctggttgggacgataggacctaggggtgttcataaaatagctgatccaatccaatccgcacgatccaatccaatccaatccgcaaagtgcagatatccgcacttgtgcggattggattattattggaaaattcaaaatccgcacttgtgcagattggatgttgattgacatgtaaaagtaaccgatccaatccaatccacacataattataacaaaattaacaaattatttatacaataacattttaatgtaaagaaatagtaatttaaa

SEQ ID NO: 300053 - DNA, 3135 bp, Cannabis indica
ggtagaaaccggcgtgacctaagaatgatctaatttctttcatagttttaggtggtggaagttttgaaataagatcaactttagctttgtcaacttctattccttcaaatgaaatcacatgtcctaagacaattccacgttttaccataaaatgatatttttcccaatttagcactaaattcttttctttacaacgaatcaagacaagagacagatggtgtaaatattcatcaaaagaagatccataaattatagaaaaatcattcataaagattttcaaaaaatgttcaaccatatcagaaaaaattgcaatcatacaagcttccaggatcacggaccaaaggcacatgctggagaggcttccggataggatagagcctactggagtcgactatctggaactactatttcaggagagacaactagccaactagaattccattccaaagcaaggctagctttcttgaggacacttctcagaaggacaaggaagccttcctggactagcttctgtgaaagaataactttccaggaatgacacatttttcatttggaggaactataacactgttttccactccttttaatcattttaactctagtatatgtgtttgttgttaatgttgtccatagattagctaagttttttaatacgactgaacatatctgcctcctccgcggtactaaacaatttttttaatcaatgagttgttttgtcaaaaaagaaaaaaagagtaatgtctaattaacttgtaacattcggttatcaactaataattctattttcttaagaaaaaataacttgtattcaaaatgctaatgtattagatgggcgaataacgaaaattaatattatatatatagaatgttcaatttaagcaaacaaagaaagaaaaaagaaatatattctataatttacatagccaaaaaggccacaagaaggaagaagagatgaacaataacatacatatatatatatatatatatatatatatataatcagcaggtcacagctacaaaaatttcaacgcgatttggaagcattttcatgttgaatgccggcagtttccagcaaagaaggcagaggagaaagcaatggaattggatcattactaggatacaatattgaactcaatgaagaagaagaagaagaagatgatgaagacgtagcatttgaacagttcccttgtgaattattattattattggcctcaccagaagagacctttattatttggagtggacaaggagcacttctttgtagcctactcatcaaagtcaaactcctctttagtataatattgtcatgatctttgtgaccatatctttggaaccctggaaattgatcaccaccacaacactcttccatttttttctttcttttctttttattactaaggcaagtgatcttataaatcttgaatatgaaaagggaaataatagaataaatatatttttgaatccgatttttataaaatttattgataggattttttgtttgataaatgacaaattcgatcctgcgttttttataatagtactaaataatagaaaaatataaagtgttcttagtgggatttgaacttttatcctataacatatttgtcatctactttaattattataccaagcttactattatgtctataaatatcatcttttaatacaaatatatgttataactaattttttaaaaaattacaatcaagattataataggcttctaattgaaattcattaatttccatattattgtgtaatggggactgatcagctaatgtacctagctatatggaccccatgatgggactatttggggacaaatagcacatcatatggatagtattgttctaaaattgctttcaacatggattcaatttaatattccacttaattagttgataatgatagtgatccaatattcatgtgatagctcagtctttttccgtatgatattttgttggtataatatgaaacttgcatagcccattttcctccatgtgtagggggaatcaaggcacgttttttttttttgtcaaaaataaaggcaaagggtcaaagttttcagtgacaaaaacttcagagaagcacatgggttctttaattactaccagttaaatacttttaaatccccattaaaaatatcatatggggtgacgtgaatcattatatatatatatagtattatatatatatagtattgttatgagacactagtggtgcctagtaccttctcaatatattgcgttgtgattagttagcgatactttctaaaaactattatattaaattatataggacccgatacttaattgaaccaatagcgatattgatatgtaagagggtgctaggtaccactggtgctctttaacatctctatatatatatatgagcatttttcttaggtactagcggtgactagtaccttctcgacatgtcacgttgctattggctagcgatattttctaaaaattattatattaaattatgtgggatctaatacttagttaaaccaataataatactaatacataagagataagagagtgctagagtagtacccttttaacatttctctatatgtactacatttgtagaatagacatataaatttgaattttcaaggcaaaaattaaattctattatgataggacatgatgcttaaatgattgtcttgccaactatagccgctgctatgatataaatatatatataaaggcacacacgacgttccacatggtggatggtagagaatattgagttttcacccgtctaagctagcgttccacttgcactaataaactattttttttactagtgaacttctgtttcttgctacagtgttcttgaatttaggtaagaaataaaaaatatgaatgagctcataaaaaaaaggggacagaatagtaggaaataattaagaaaattataaagggtaaatactattttggaccttttgcaaaagttaccaattggaccctgtgttttgttaaatgacaaaatggaccctgtattttttaaaatagtacaaataggactctgaattgatttttgtcaatataaagtttaattataatccgatctaagagtgttatgacaaaactgtttacattttttgtatctgttcgtattaag

SEQ ID NO: 300054 - DNA, 4140 bp, Cannabis indica
cctacagcataatgattgcaaggacagccgttgctcaagatgatatagtggagatggcaccacttcaccgtgatcttcattggggagcttatgaaacaatcagagcgttatatagatgaaggttagtgaaactattttcacctgaaacataatggctggtgttagttaccatttggttggttatgcgcataaagaaacgagatacggagagttgaagctttattgcttattgtaataatcaccagtaccaccaccgctctaccccccaaaaagggaaaaagagatacccctactactggctttgcttctcgctatcaattttgtggcgaaagacttttatattatatattcttgtgttatttaaggttgtcattttactctagtggtttgagatagatttttcttatccttctaacagggatgcatccccgagttcttgttgatggttttgagattgccaaaaaaagcaactctgcaattcctagagaaatttaagactcctgtggtgatgggtgatgaccctgatagagagattctgaaaatggtggccagaactactctaagaactaaggtagagttgtaatttgttttcggtgttcaatcaatgggttgatgaagatcattttagaaaatatatttatattttgtgttgtacatgttcagatataaatgggtagatgaagatcattttagaaaatataattataatctgtgttgtacatattcagatatataccttcatttgattcttattttattggggttcatttctacagctgtatgagaaattagcagatcagctgactgagatagttgttgattcggtaagtctaaattcaaatttgacacattcaaaattatgcattgtcaaaagcttctgctttgtggttgatcctttaccacttgaggactaatattcatacactaaatttgcagcttctttgcattcgcaagcctgaggaaccaatcgatttgtttatggtagagatcatgcatatgcgccacaaatttgatgtggacacacgtttggtatgtaaaacctgctctttccttgaacagatataattcctttctggtcttgtatgaacttttttgtgagtatttcaagcaatacaactgtttgtattgtacagttttacatcatagtatctctaatatctgacctatttgtttctcaggttgaaggtcttgtccttgatcacggttccaggcatcctgatatgaaaagacgggcagagaattgttacattttgacatgcaatgtttctttggagtatgaaaagaggtagatattttaaactatgacacgttgattgaaactgtataaacttatttggatataacaaaagaatttcttctattcagttttgccatttctgtctatgcacacacatcacaaacacttagtgtgtactatgtgaaaagatatgatgtcttaattcaatttccaattgcaagggattgaaaataaactgctaaatgcatatttgtgaagtttacttgttatgctaatctacacaataaagtgttattttggttggtcaataattggtctgtttgtttgtttccttgggcctttattttccaaacattgctgaggtaatggttttttctgtagtgaaataaacgcaggcttcttttactccaattctgatcagagagaagcaatggttactgctgaaaggcgatcagttgatgaaagagttaaaagaataattgagttgaaaaataaggttatgatagtttaactactggttataattcacactgcatggctgattttgttgtaccactaacatgttatggtcttcattacaggtttgctctgacagtgactgtaactttgtcatcatcaatcaaaagggtattgatccaccatcattggaccttctcgcaaaagaaggggtaagttgtatttgttagctttttatcagcttagttagcatttgtgctttattttcttcacttgccacatcaatgatgagtcctacctatagaatttatttttttaaaatcaatttctgtgactattgatgagaaatcaaaagcgagataattgtattgttcagcaacaattaaaaaatcaattttctgattaattaattaaaaaactaagaacaaactacaaaattttgttaagctaaactagaaaaaaacaaaaaacaataaagttgccgatcaggccttaagtttataaaatgttgaaattcaaaattacatatcataacttgctagtgcatggattttttagattgttgccctgcgaagagcgaagaggagaaatatggaacgattggttttggcttgtgggggagaggctgtaaattctgtggatgatcttactcctgagtgtcttggttgggctggtctggtctatgagcatgtccttggggaagataagtatacatttgtggaaaatgtaaagaaccctcattcttgtacaattttaatcaaaggtactgcaactgttgcttttatttttggtgaatgactttttttatttgctgattttgatgatcgtgataggactgcgaacatggtttttcctcttatagacaactgggagttccatattgcttattgggtattgtgatttcctttgtgcagggcctaatgaccatacaattgcccagatcaaggatgctgtccgcgatggattgagggctgttaaaaatactattgaagatgaatctgttgtattagtacgtattcttcagtttaaaagttctttgatatgcttgcatgcaagactgcattgcaattatgttcgttatattgaagcaattgaaattgtatgatattttcactgcagacatagtagtttttattattgattaattaatttctgtttgcaaatttaagattagctttaggtttaagatttttagtcttacttgcaactgactataattttagttgttaaaaatcctacataacaccaggaaatatatcttgtctccacaattggatttttacttttccatcttagatttaaaccttgagttgattttacttcagggggctggagcatttgaagttgcagctagacaatatctcgttaatgaagtgaagaaaactgttcaaggggtaattagcactacactttcttgattaaagaagaccataaacattatttatttatcttcacatttattgatttattattgatttatgcacttggaacagcgagctcaactcggtgttgaagcttttgctgatgccctccttgtgatacccaagatacttgctgaaaactctggccttgacacacaagatacaatcatatcacttaaggtatgcatttaaaactttcttgaaattaaaaagaaaaaaaaaatgcagtcttggccgaactttgcaatgtggttttttcagggagagcatgatagaggaaatgttgtgggattgaaccagcacacaggagaacctattgacccacagatggagggtatcttcgataactactcagtgaagcgccaaattataaactcagcgtacgtgttaacttcttttcttagaaattacaatttgtagcaccttttctcaattttcttccggagaaaactacatttttatgtttttatggacattatgtagaagataataacccatccaccctatatatatttgtatttcttacatataatctgaaacttcttcgtttgcaggcctgtaattgcatctcaattgctgttggtggatgaagttattcgtgctgggcgcaacatgagaaagccaacttagttttggcaaaaatgctttcctgtgtggagattttattatttgtttttctagtttgctatgaatagacttgagctaccttgtttactaaagctaaggccggtttacctgagttttttgttaaagagaaattgaaattttgcatatggtttgcaagttttattgctgatcaacagtgttgcatgcaatcttgtttaatttctcgcattagtgtcaccaaattttgtattttaatgtgttatcattcaatatggtaccatcaaatcgttcattaaaatgcctttggtgctattagaagtttttcttcgtagaactagaatactaaattcacaatttttctggtgtgagggcactgttgcataatgtatccgatgtaagaagttcttttttttttttttt

SEQ ID NO: 300055 - DNA, 815 bp, Cannabis indica
aattttttgttgattttttttgtataaatcaagttctggtgagatttgaatttttttgaattttttgttatttcttcatgaacgctcgatatgtgctcaataaaaatagtgtcttaaggttaaggatgaagtttcaatgctactcgatacatacttggtatatgctcgatagttttacattactttaatcgagcaatatcaataaaacaatacaatatttgttccttgcaaacaattgagcaactatggaaccatatcgagcataatataaaataacggaaaaaaacataaccatcgaactcttatcaaactatcatcttcaaccttaggcaagtttctaaccaatgaactatcgagcaactatcaaacctatatcgtgtactaaaaaaaaaaatctaaaattccatgtttaatgatgataaccaatattcactaaattggattttgaataattttttccctaaaactaatataaacctacattccacaatagaaaacaattcttaactaagattatgcaaatgtgtgggtttcgtttgagtcttgtcgtgggtttcgtatggtggcgaggggaaacagcaacaacagtgtggtggtgagtgaggtaggagggcgtggaactgtgatggaaagtcaatcaatgggtcttcagcgattgggtttctctcggtgactactactcgagaaaacaagaagagagagagataagaggagagactatttaaatgacaaaagtattatgagtacctagcgaaagataaaagataaacattaatttgataggataaccaactttgaattattttttaattttg

SEQ ID NO: 300056 - DNA, 2669 bp, Cannabis indica
ttcgaccaaatgatgagggtatatactgcgtatttaatttatcacagtcgacatgttcagttaaatcagtgatcactgttttattgtttgttatttattgttttaatgaactgctgtgctctgctcatatattcttttaaattctaaaaatttctgtcacataattatatattcgaagattatcgattatgagattgcaaaacaaacctctttgcagcaaaaagagattgcaaaacctctaaagcacaagcgaattaaatccatctatttttattaaataaaaaaagtggtgttttgttaaatttggaaagaaaagtcttatatttatatcaggtgtgatagattttaattatttagtactttaaaaatatcataaattattaacacgtgcttgttgacttgtgataatatagtagcaaaacaagtcttacttttcttcttcttcaacctgtgtttccttctcattactctcctcatattctaatgctctgtttcgttagtaactaaaaaccctctccacttagcaaatctcttgccccttcgattgtttaacttactttcttgtttggttgaagaagaagaaaatttctgcagcttctacaagtaaggtaaggatgaacctggttttcactttttattgtttcatttttctgcctttgaaaatttttttagtccttttaaatctcttgatacaccttaagctcttgaaaatttcaatgtttagtattagctatcaaagcatataaaatgatgacttttatgttcttttctggttacagtccaatccactttgggttgtcttccaacttatggcaagaaaaagagctaaaacggcaatatcaatggctgaggaagatgatggattttcgaaactacctgatgcaatcatccaacacatcttgtcatttctacccactgtggatgtcgttcgtacatgcctcctaacaaagcgttggaagctcatgtggtactcagtccccacactcactttctctgatgctacaactgattttcaatcgtcacaggccgtagaaaatttctacaagtatgtcgataattgtttgatatgccgcaagagaggtatgaattttatggtggatacagccatagctagtttcaagcttcagatgaagaattcctatcatacaagcaaagccacttacctagataaatggttagaatttttagtcaaaaacaaagtcaaggaaataaatcttcaattgggttttgcctttgatcgtgctttgagttgttacagcttacctatatcagtactcaacactagagatttgactgttttagagttggataggttagatttgaacactgcttattcaattagacttcctgcattgaaaactttgtcattgaaaaatgtttactttgaagataatttgaaggatgatgcaatatttaagttattgctgggttgcccttcccttgagacattgttgttaagtttgtgtgataacttagttcctcttggttatccgctctgcttgcaaagttttagcctgaagtggctgaaaattaaatatcttgcctttgtaccatctcttcaactcgaagccataaatcttgaatctttggtagtaaatggattcatctttaaagatacaaatctctttgcatgcaagagaattagaaatctctcactaacttttgatcattgtagtgaagaagacccatctaaatcattagagtgtctcatttcaacccttccactccttgagaatttgactttgaaggactgctacaaagtgaagttagagcacattaaaatttcgaatcagcagttgaaaagtttcaatttgaagagtatgtgtactaaatatgattatgggatgaacattataattgaatttgctccaaaattagaatccttcagttttgaaggccataccaactttggcatatcaatggagtcttctaatttgttgaatggaaaatttgtgattcataatctgcatgagaactatgacgcaaatggatttatcagtatgatgaatttccttttgaatctcaattgctcttggaatattgtgactttgcatgttccttcatttaaggtttgttcattattgtttttattttattatttttaaaaaaattatttcattatttctcttgtttgattttgttgtggctttatttcaagttcatattacaaatgtatatttcaaatattgatatgttcatttgttttcttaggttctcataatgcctgaatatttgaagaggatatgtcactcttctttacttaattggaagcatctcaaaattaactctgattgtaagttggtcagagaatcagacttaaaagataacttgttgcgaatattatcatctttagaaacattatatattaatgaaaaagacatattttagttgtaactgctgattatgagtaatgattatttatatttttcattactaattgtgtctttagaccttttgagtacctatttagcagcataaaatataataaattcaaatgcttttcttgtattaatgtagaattatattattatataatttaatatgtgaaattatactgataaattgtattttaaggccccattggtgtatcaaggatatttttataattttgacccgagatggaaaaaatcgtaattttatgatatattgtgcttatggactatattatt

SEQ ID NO: 300057 - DNA, 1135 bp, Cannabis indica
aaatcatttccttaattagaaaataatttccataaataaaatattctaatacattatacataacgaatgcaaaaattgttgaatctgtcacagttaaaaaaaacatactattaacaattccgaataaaaatctaacaaaaaagtgatacaaaatcctcaaaatgccttaaatctgtaatgtatcggatgcaacatcggaacacaaatcggtctccattaggcccttcacaaaattagagtgccaatacccatatcggaccacaacatcgggcccctatcgggctttcatccttgacttgataccaagtaaagtatcaaacacaacatcggaacacaatcgggccccgtcggggccatcacaaaattgaagtgtcaatacccatatcgggcccctatcaggctttcatccctgtcttgataccaagtaaagtatcggactatcatcggggccgtatcggaccccatcagactagaggaaaaaaattgcagaatccaaaaaaatgtagtatttacagacatcaaccatttgatcaaacaaaatagcaaaataatagtaacaacccataaatcaagcatcaaaataacattgtaaatataacaactaccaagattaaacaaagaaaaataattaccgattgaattcgtgtatgatgctttgtccaagaatgagtgaaaagaatgtagtatagcttgtagtgtagtgaatagaagtgaagagaatgagtgaagagaagggaatgtagtattttttgtggtggaggagtgctcggatgaaaaatgagagggggttgtttgtttcagtggtgagacaaaaagagggaaagagagaagaaagagtgggtgatgtaaatagggtgggcattttggggttaacacatttgttggcctatcctaccattattgggtatcataagtttaaggtattaattttaacttaatgtaagcatataaaatcaattttcccttccctaatttattatcaaaatattctgacaattaattgtggtagagattttgatgaaatgtctcacctatataaatttagggtatggaagtccgattacccacactgatcagtttcattttcatttgcaaatttaaaacttgtgtgagattgaaactcaaagaattaatg

SEQ ID NO: 300058 - DNA, 1172 bp, Cannabis indica
aacattataacaatataaaatatgtttatatcaactgactagtgaccatagttcagttgtcttcctatcagaaacttttctcttcaggtcggttggagctttgaaaacattcatcccttgctaaaaattactttgataataagtttgtttatgattatcacaaactcaatgataggaaaaatttacatccttacattacatttatttatacatggacattctatgcaaccaaaatggttccatagctggagtttgatggagttttataaatcaaagaaattctcatattgataatttgttttgtttaacaagtttaaaggtatttataaaatagttcagtctaaaggtttgttctgagtctcactcaaaagagtcaagaatcagtagcaatagcagtctcctggaacctatgtacagtttactcaaaagtcatgttttcagcctcatgccttatggaatcaaaaagagtagttgataggtaacgttctccgaagcttgggaacaaaacctgcaaagagagtgtagaagaagcaaaaagataatcagtatgcaagttttaaccgatcttggctacttatttaattctatagtatatcactcgagggaaaaatagaacttaccacgatgagtttttcagcattttcgggcctttttgccaacttaatggccgctgcagctgcagcaccagatgagattcctacctgcaaaagaaaatgttaccacaatcagtactagaaagtcaagtctcataaattcatacaataatttgaagtcatcatatatgccataccagcaaaccctcttttaaagcaagctgtttagcggtttcaatagcttcggcagctgatacctgaaatgttgtgatatcagtaaagagctcctaaaccattaaaatactttgtaacaaccaatgcttaaaaagctaatgagttactcaaatggcttcataacttactggaataacctcatcaagtagcttaacatcaagaacatctgggacaaaaccaactccaattccttggatggaatgtttccctatgacatgtccgtgggatacatgtctagttagagaatcaataatttaaacaagtacaacttataggccaaagaataggacaacatgcatgagagaaagaaacatcaaaatttctcaagtctctctctctctctct

SEQ ID NO: 300059 - DNA, 2439 bp, Cannabis indica
tgaagatacttaaaaggaacaataaagccaccacacagtatatctgtggcttcataattcatgtagtattgtaatcacaacactcttcttcccctaaaacacaattgtaatcaaccaaactgtcatgggaaaattaaaaaaaataaaaataaaatgaaatagttaactgaaacacttcatttcaaagtccagtaaaaaagttgtgtacaataatttagttaaatatatgaaaagaaactcctagctcaactaaattttaaacaagatagatacaaccttaaaccaactcactcattttcactaataataataattaaaacacactgctaggcattgttagaaatcttaacatttttttcacattggtatcgatattaagtaaaaatgggaatgagaatgagaatagaaatggaatataatctaattgaaaatgcataaaagaaaaaataataaaataaattataaaaaaatttctcatcttgtattggaatggttattcctactgaatagtgattctatcaaaatgataaaatagtcattccaatactttaaaatgcaaccaaataaaagaatagaataaaaattgttttctttcaattccattttattacctccaaccaaacaccacctaatagtaataattatcaattgtagttgaacacaatgaagaagacactcacaatcatcatattatcacatgaattcttacatcaaaactcttctaacaaattcgtttacatgttatgtagtgcatagtcatataccataatatgaattatgtgctataagaaaagtagagatgatctgtttagaacactataaaccatttttttgacataataatcaatattatctcaatttaaagtcttagaaaaataaataaaatataataactaaaagtaaaagcatataattcttttccactaaagagaaagaaaaaaaaaatgaaagctttaaagcatataaaacaaaatgctgagagaatccctttttacagctatattaacatatacatttcacttttatggcattaaatagaatcaattacttgttcattttcatatccaagtcaatattttgaagcactgtttagaacttcaattacttatggagaatgataaattgataaacatatatttctcccatttaaattattttctttgaccaaaacaattaagataataattatttaatttgctgaaataattaattagtgaaaactcatcttatcccaaaacaagaaaataaaaaaaaaaaaaagaagaataattagaagtgggactgagataccataactttttaaaagtaataaactttgacttatatcatgagtacttttcatcaaatctcaccaattacatcttaattaattaattatttaatgataaatctgtagacaacactaaaaaaacatgtaaaaatgtagatgaacaattttgaattggacaattgtctaattttttaagtagatttttcatggatcaagtgaacaaacaaagtgaaagtagcagcaatttaagtatgcttagcttgttcttacacaattatatttttaagcaatttgtaataaaatcccataaaagaaaaactgtaataattagagagtgagagagaagaatacctgaatggaaatggtgtgaattgtgatgttgaacccaaccttaagaagagagtagagaaaagaaagaatgagaacccattatatataggagagagaaagagagatctttaacggaaaaacttgaggaatacgcagtgaggggattttccaaagtgatgaaaagaaaagaaagaataagagagaaaaggatggtcttcttcagtatttattgtaaaagcaaaagattcaagtttcaaccgttagaatggagaactgaaagcttcctcaaacaattcaaacccttcttttgcaagcaaaaccccctcactcactcactccctctcattctgctcagatctcaatgtctcctctctctctctctctcacacacacacacaaacactgcttagtaccttactaactcagtaccatttgagaaaggattatcattcattccaccatttgagcagttgagaaaacggatgcaaggaaatgctcctctcttagtggcaaattcccatataactattgcaatttaatattggtctatttattttaatttaggctaattaatattttttttttttcagaactttgacatgtataaaatgatgtctctgagattgttagatttaaagatttttgtctaattttattcaattttactatttcagtgattgtttatgtactaaaccatactccctagactttgatatctaccaaatcatgtccctcgaactttgacatgtactatatcatgctctctgaactttcatccatgttagaattgttttactaaaattggacaaaagtccttaatttcaacaatctcaatagtt

SEQ ID NO: 300060 - DNA, 3558 bp, Cannabis indica
ataaagattggatgaatttataagtcaaataagtaaataaatgatcacatgaaccaaataacacattaaacaagtaatgaaattaaatctatttctttattgataattgaatagaaaaaaattaaatttaatttttatttaaggcacaaacctcaacaattaattacatttattattacaattttagtttaaatcttatttattaagatttcgctttggttggttaaaaatccagttaacactttttaaacaaaaaattataaaattacaccaaaacttgttgaattgtatcattttgaaaataaatgaagtattttctgacatgttttaatttcacactgcaaactgcaaagtttgatttgaaagatactaaagagggtttatgaaattattttttttatcatcaaacaatattgttgaagctcaaaagcctacaaatatgagttgtcccatagctatatacatgtaaatcttaacaataatttacggaccttatactaaaatgatttaattgtacatatatataagagtgaatggtcttgatctaaaataaatgcccatatcaataatatcgacattataacttgttgaataatgtattgactgtgtcactttcaaagttccaatctttcatctttctttgctagggtttaatatgtccatgtaaaccaacaatttgatatgttactgaaaaataaaacataaaaaatcgataaaaatggatgttaaatattaaaaaaagtattaattaccttttttttagaagatgtaacttctacaatagaaataaaataaaatgtaactccttgtaacttgaaaattcggttattatttttattattaattatctttgcgtagaatcataattagttattatgtgacaaattatgtttgacaattgaaactgataataataattaaaagatatataataataataactaagtttgaccttattctatttactatattacttatatataaatgaaaaataattaataattatttataaggttacgattcaacttaaggcatgaatcttaccaattaagtaaagaagacacccctcatttctgtgtttgaaaagtcttgcatcaagttttttcagtgtaaagtttataattaaaacttaaaactactatgtaatttaaaatgaatagtaataataattgttcaggtaactcatctatttttattttaactaataatttgttggagatatagatgaatatggtccacagataatatgtaaagacatatgtacttgagaaaaatatacttaattttgtatgtagctatagctataatatgatatgatagataaagtatacctatatatgtatagccttccgtgttatagtgtaaatttttattttaattattatttactaaaagatgtcttaggttattttttttttttattttttaaaaagatgtcttattggtgtgtaccattatatataaattctagactttgtcttactatactacgaatatctctctcattagagagagaaaatatcttaatgaagaccccattgccaaccctaatcttgggtgtcatgaaccattcaacttttcacccaaaaagaactaaagaataccaagatttggaagatttatatatcactaagtttttctttttatataaataatatatataatcatgttcatgtgtgggtaagaagtaggcttatatatgtgatatatataatatatttaatatttttgttgcataatcttgaaatagtatctaatgtgtaacaccttgccaaccctataataagcttgataatctcaggtgccattactaaagcattcccttatttggcaaagacacccacaacaacattaaacaaaaccacccttttcctaataattattataaactaagcaatcatcaaccaaatcatatgataatttattgtaatgtaccaaaaccaaagcgtttccattatatctaaagtattattattagttgtttaaaacaattttattggtagtttaatttcattatgtagtattataaactatttttacaattcttttaaattgcatcctaactatgttacacatgtttgcaaaaatttgtagtagtttataattaggaatggaaaggaatggaaaaaaatctctattttattcttttgtttggttgcatattaaagtattggaatgttattctaatagaatgacctttccaccattttgatagaatgagtattccactttaaaatggaaggaaagatcattccaatgtatgatcggaaaaaatttaataattttcttattaatttttttatgcattttaaattttatttcattccattcccatttctattcctatttctattctcattcctataatttcattcctcccaaccaaacgccacctaaggaatatttcaatcggtagatttcttatatgtttcatatatatttcagagagctttataatatttttttatgatctttatagttatttaggatctctagtaaattatttttataaaattttgaatagtttgcagagccgaaaataaaattcaaacacctataataaaaaaaatgcgtgtaaaaaatatttaaatattatttttaatattataaattatttaaaatttcttaaaaatttacaaatatgcttaaatatttataacttacatgactatatatatgaaaaagattcaaaattatcttaaatttaaaagcgaactagatagtagtcttagtctattaaactatatccctataaataggaatgtaatatagactttttcccaataatattttttaagaatttttggcggctaaatcctttcaattgtcgtttcatttgcatttaactttctaaacttaaattttgacggtaaaatcctccaaactactgaacggttagcaaatttaaagtgtcattcggttatctgtcactataaactgcttatgtgtgcactcttgtacacatgccacgtttatattgctacacctaatgttattatttaaaaattattttcaaaatttattttaaaaatttaaaaattcaaaattttaaaaaatatatattataaagtgaaatattttttatatttctcaaataataattttaggtgtactaatatatataaatttgttaaaggtataaaaatgtacacataagtaatctatgtaggtaattagttgtgaaaaataaataacactttaaatttgttaacggtttaataatttagataattttactgttaaaatctgaacttaaaaaattaaatgcaacttaaataataattgagaggatgtaggaaaaaaagaacacttttgataataatgctttttttttttttcttataatcgatgttgtttgttaataagtggttaaaagataaaaggaggttaaagcaatatatttgtttaattaagatgaagaagagtgaccagtgaggccatgcttcatgggtaggtgtggacagggccggccctgaaaatatatgggcccaagacgaattaaattttggggccctcaaaaatatataaaaaaaaaattaaaagaagagtgtcatagga

SEQ ID NO: 300061 - DNA, 1317 bp, Cannabis indica
tgttgtggtcgtttctacaaaacgagcttttctcggcagaaaccggcttagtctgtcggcgtcggattttgctacgcataagcttaaatgagggaaaattaagatgacccagaagaagaaaactgcagcagctctagctcccgtaaaacgttgtcgttttccgctttcttttgtacaacaacaaccaccaccaccactactactgctgctaatattgctattactactactgctacttggtctttgaccttctttagcttgcatttgggccaaactgctggaactataataataacagatatatagaatgtatttctggtagtagtagtagttactattactatttactacttgaggtagccaaaagaagaccatgaaaagctgtatggggttttttataactataaggctgtatgtacagtgagtactgtaaaatgggagagaaaaggtaggttttggtggtaatgtttgaaaagggaaaatgaaaaggaaaaaaatggagcttgttaggaaaaagaaacaaaaaataaatattagaggaagaaataaaaggaagggaaaaagaaaatatagagaggttattgtttccttgtctcaaggggtgtaggtggtcacatgttcttgacccttgattcctggaaacttcttatatatctttggctctgaatctttggactttggacctgaaaatttctattcccacccacttcttctttcctttggttttatctttaggatttgaggcatctggttttgagcttatatattattattattattattattattatatatgattaataataataataataattaaatatagatatgtaggtttgttttgtgaattgtgatatggctgatgatgctacttggagaaggtgtgggactgtcaagtattaataaccattgtctccggaattatattcaaatttatatatcaaaattttataaaaaggacatttcaaaacgaaaattataaaaggagcagaggcatattagtaaacaaactcgatagtcgcccttttttatttatttatttaattttgggtggggggttgtcactgctacaacttgctcttaaatgcaaatctctgctctcagagtttacattgatctttttcatctttttttacttcttctagactgatatgccctttatgaaaacagtatctattatttggattacatgttggtagttccattagaatataactacaagatcaagatcatataataataataataataataataataataataataataatataaagtagatgagaagaattaaagaagaagaagatgaagaga

SEQ ID NO: 300062 - DNA, 3058 bp, Cannabis indica
gtgaactactataaattggttgtgtctctcttactagcttatagttaactctcaatacattctcggcaatctagcgagctggcctgaccagatatctgtgtctagatttctgcggtaacaattagtaaataagattgtattgaaatgatcagttttatttagggcataaaacttttacaaaactataccttgtttaaaggttgttgtttcggaactagcagaagcaatgggagtttgtgaggcgctcatttagattaattaggatcatcaatgataaatagcgattcttgagatagattgattatgcattgtgtaagctttaagatgttttgtttctatgatttccctgcttggttgttttgtcatgttatttaagatttcttaagataaattgtttatgcaatgtgcaagctttaagataagttctgtttctatgatttccatgtttgttgatgtcatttagtattctaaacttttgcttgttgatttgagaagtttttctgttttatttgttaaaagatcagttaatataatggctcataattttattagagtaatctctattttatattctcaccgtcttttcactttgaaatatattttaactgatttgctagcttgtttagtaactgaaattaacaattaattaaataaatatttccattaaaaaaacaaaatagggtaagagtcaaataaaatacaattaaaaatcaaataaaaacagaagtattttatcaaatataaattgtcaaaaataaaatttacagttttcctgattatttactggaacatttctccatagaggagaaaaaaagtagtgcttgttaatgttaagtagctcaccgaccacgccactagaaacaagggcggttaccctctctcttatatatatatatatggaggtgctacagttgactagtggcgcaccacggtagcttccactacaagacaccacgcaataaggaaaactacaaaactagagatctaaaagtaaaaggcatgactactgagccaatggcattaacattcaagcccacgcttgtccactgcagccccactctaccatcgctgcaccctcctttatttgccttttttatttagttttgtctaaactaaactatacacacttaaaatcttacattttatgcccttttttctcagcatgtataaattataaatacattcctgacaaagaaatacatatatattatattattaatttatatattttgttgcatgcagttcaacaacacctcatatggtccacgaggcaggagttttatgcttttggtatacatgaacagtacacatatattgtatatgaatatacaataatttataatggatagatgacgatggtcagcgttgacacatacatggaatggaaccattaatataaaccagattacatgggttggggttagtactatatgtactttttaattaattaattgttatttgaattagctatgtatattatagttaggcacttgggtgttctgctagattctttttacttgtaataattttgtatcagctttgatttttgtattcaacatatatatagtaaaattaattcagtatgttatatgtaaatattgcaacttcacaagaaaaactataaaaacttgactattcaccgtatgctatggaaagaactcacatcatatctaattttatcatcgggacaatatttgtgtcaccttttaaaatgtgaaattttaatgtatgcttttatgtatattattttccatttgattgtagcagtaatactgtaatatataaacacttattttatgaaaactatataagttcaaaagataaattttggtgtggactggtaatgatagaaacttgtattcttattagttgaaattacatattgtcaagacagttagttataactgtttcagttataactgttttggttgtttgttattgctgttggcttttctattttccaactactttggcttttacttgtatataaactcttgtagctctctcgttcaaagtaatgcaatagcaatctttctcagcttcttcttcttctcttttctctcttatttcagctcaattatttctctcttactttcatcttttctttcttgtttctttagtgttcttcaacaatggctagatggagttctaaccttaacatggtatcagagccttggccaccattggtggctaatatggctaatattggaacagccaactcgagctcaacaaatcttggtgttcctcctgggttctctacagcagatcgaaacagaacaagaattgatgatacttcacgagttcatttcaatcacactttgtccatcagattgaatgatcacaacttcctgttattgaagcaacatgtgttggctgccattcgtggaaacagacttctgaagttcatccaagacggtgcaccaccgcctcaatatctcagtgatgcagatcaggctgcacagatctggaatcctaaatttgtggagtgggaggatcaagatcaatcgcttgtttcatggctactctcttccatgactaagagtctgctaacgcgaatggtcagatgtactactgcaagacagatatggagtgccttggagaaacatttcacattgcaagtatcataaaagatcttagaatttaggactaagctctagaatctcaagaaaggctcatagtctctcaatgattacctacttaaagtgaaacaacatgttgatcttcttgcatcagtgggtgaaatgctttcagctcgagatcacatagctgcaataatcaaggggttgccaagtgaatatgatacgttcattatctcctcgaataccaaaattgaaggctattcagttgcagaaattgaagccttattacttgcctctcaatcgaggatcgagaagacagatcaagaagttgatatgaatgtgaatcttgcagctactaacactgatctagaaaatcaactctcctatgaagcttttcttgcgcattacaatcgaaattttagaggttcaaatacttctcgaggtcagtttccttttaatcctcctctatatgttgggtt

SEQ ID NO: 300063 - DNA, 3417 bp, Cannabis indica
atgtttcaaagacatttaaatcttaagtagaaaaataatgtcattttacatataaatatagtgagatcaaatatacatagagaatactatattaatttcatgaggatggataaactccaagtccatttgcaaagtttcttaaaaaacatgggatcgatgcccaatatgttatgtttggtacaccgaaataatagtgtgtgacaatattacgaatctaagtattattgaacttgaggtggagtctgaatagcaaactttaaactttcctaaatctttgtcggttgatgcttttctacagtagtgtacatatcaaatcgtattctaatcaaatttatttctcaaacatatttgagctgtgatgaggttggaaactgactttatgatatttatatattttagaaaaactcgtataccgttaaagtacaattgtcaaagcaaagaaatgagcccaaataccataaatgagcctttcatcaaaaatgttataaggtctaagggttacatattttattatccatcccacaacactggaattgtaaaattaagaattgacttgaccggtgagagcgatcgatataggaaactaatttctaaaaatgatcattcattttcttaaacttccactttaagtattagattatttgtgattttcaacaaccctcaggtttaaatggttattgagaatacataattaatcattaataatccataagccattgataaaattctaataagtcatgttatttagtaattgcttacaattgctaaacaacatacatgttgaactatttgatcttttatgagtatgttagtccatccttaagatgacttattagaataataagatcaatagtttctagtaattacattatgtataatgagagttcaattacaatattaacttaagatataaattaaaatgcagaatgcaaagaattgaaattatggtacaatatatcatgaatgaataaataaatttcataaagagtaatgaagtctatctttagtaaagtttcttaatagggtggaggacaataatcgtgatttttcaccaataaatactcattaggaaatatggaaaaacataaagatataaaacaagatccactactaagaagtttcttttgaactaagattcaataacaaagaagatttacattctcacataaccttggcattcattgctcgtttcaactcattaaacaaatatgatgtgttgagtgtgtgaatccttagtgtgatcacctaaacactatataaaagaatctaaagtgctcattttggacatgaaattttctgtcaacaagcacttggtacttgatagaaaatataaggtttgataattcttaaagttattttttggaaaaatcctttagtgtttaaagatagggaaataaatttttggacaaaggtataaactttgttcaagtcatggtaattctcactattttatacttaaggttgtgagtcacattcttctcttattatattatatgtgctatataacatatgtgtaatctaactttctagcttttacgtatatacatatatattgtgtaaaaatattgtaacacttatggtattaatttttttttgtaatctttgtattattttataattgagttgtaattatcttaattttcttcaatgatataataaatctctaacatttagaacacaaaatattattgagaaattaaaattagtatatatttattactttatagtttcaaactaaacaaactattgacttagaaaattggctaatattgtcttgctagattggcaagataagtaatgagttaagtaaatataaatagagagacacaagagtttatagtagttcattctctatatcgcgatgataatagataaagaaactagagagagatgctttcactttatggagacacagcaaaatatgaaaaatgagcttgtgaagctctccttttataggcaaagaggtccattaaaatcataataaaatattaaaaacactgaaatatttcatctaaggtgatcttaatcattgattgtgatctaatgtctgagatgctcaaatttaacttcagatgatgtttgataaatttagtacgtaagtatacgcaatcgaatcaagtaatataatgacaaagtagagtatcattcctacaaggacttcttattaattaccaagcaattaattctttatttctatttgattaataaaaatattggagaaaagtaaataaagcaaagcaaataattaaaaattagagaaataaacaatgagaaaaataaggattattatgatccctaactatcctttattttacttcttaatgtatttacccaatttttcttctttctattcaattgacaagttgaattaagtagttcataatctagttaagacttacaaacccaatctatgtgaaaacttcctatattcatttggtaaagtttaatcacaaagaaaatattaaacaaagcaactcataaaatcatacaaataatctagatactttcgtcataaatcaatttgcatccataaaaattaaagcatattcaaatttcacatttctaaattttaattcgaattcatagataataattatcagtcaataattacaaaattaaatcaaattgcatggaattaaaataagagaagatagtttaaaaaaatgttacaacttgcaccactcgcactacaaacactcctacccagcacccaggttggaaatcttgtgattgagaagttgtctaatgtcaacttgggtgctagacaattgggaaatcatgcaagaaccatattttttgaagtctaggtgatatattgacaccacttatctaatttcttggttctggtgaagtcgttcactagctcttgggtgttttgtatttttgcaaaatttggagactcggaacttcctaatttgcgactagttgactaatatttcacttttttgaataggtgaaatatcaaagtgtgaatcttaattgtcacgtcgtatgtcttgttcactacagaaaatagctcgatgcttgaaatagatcaagaatcagataagagaacccaacgcactaggcccatatgtcaaccatggcactcgggttctgtttccaggtctctgggatgttgttttggtactcccatgatacttgaattagcaaacgagggctcctcccccattttggactaagaaagcttgtagcgaagtttgagttagagtagcagaaccatgcgcaccaggttgaatatcaacctagatgctaagaccaatcccagtgtcaacctaggcattggtcagatcttttggcccccaaatgctctcgtttgctctccgagaacacttgtatcttcgttattaatgaaaacaaagaaaatttctaggagacttcccgggaaaaatccttggaaatggcctaggttgacaa

SEQ ID NO: 300064 - DNA, 4663 bp, Cannabis indica
ttttttagttttttttaatatcataattttaagattaataatattcaatgtagtgataatcattgaaatttgaaagcataatagtgatttaaataaaaacaaaaattactattatactttgtaatagtaattaaaaaaaaattattattcgtcctaaatttatctttagaattaatgaaaatgctctggttaaactatcaaaacattcaaatttaatttaaaataatatttaaaatttaactaattctaaatatcaaaatttgaaaataatttttaataaaaaaataaataatatgaacaaatttattattaattgcaacaccttaggtggattaatgatgctgactttttacgtggcaacatctaataatttgttattttttttatttaaaaaaaaaatcaccctataatttcttataaactaagaattatgttatatagccacattttatatagaatagaaaaataactcagttaacaaaaaccaatctcacagactaaatagataccgtaatattttgtttataataaatcataatattaatagtatttaaatttatttattaattcaaaaatgctatttaaattaatataatggagtgaaataattaatcccagcaatttttaatgtatcaacattaccctccttaagagtatttatattactaagggaataacatttcaaggttaaactctcaaaacaaacatatatactaacaataataataataaaaatatatattactaatatatattactaatatatatatactgaaaatatatattattattactaaccatcaataagtaatacccatcaagaagtgttcctttgacttaatacccaccaagaagtgttcctttgttggataattttttagaaaaaacatgtagtgaaatcttaattaattactgaagtccgtataagcaagaatgttaaagttgggattctgccagcttaggccttggttttcttttgataatccatatttgatactgtctactacacttttttgatccttagtagataagagctttaagctaagatgtaattgcatgaatattggttgaatgatatattatatgatttgatttcatgcagtgacttaatgacctatgatcatagaaccgcttatgtaaaattttgttttattattctttaaaatatgagtgagtatacaaaattaaaaactcggaattatatttgaaaaatacaatcttgttctagcggtagaacccaattttgaactcaagttgcgaagtgagttgcagatttccagatattaaagggaaaaaagatactgacctaatgaagtgagttcaacaaaatctaattctgagcacatagcaaagtacaataattaaaatatttgttagaatgtctgggttccaattctatttgattcgaccactgttttaatctcttccttccatttgagatagaatttgcagcttgtgatatgtacttattatgctatgttactattgtatctgtgagtatctggaaataaatcatctgcaacaaatggtggtgacaatctgtcttttctatgcaggctgctcgttgccacattgaacaagctagtaatatcagaaaaaaaacctcaaacaatgctgctaaccacacagcagaagctatgaaaggaatggagcagaatcagtcttttgttcaatcaagcagtacccagtctcatcctcttgcacaagcaacagtttcttttgcacctctgaaagctaatgatgaagagagcaaaaaggcaagagctgctgctgttgctgctaggcttgctgcatctacttcctctgcacagatgctttcctctgtactttcctctcttgttgcagaagaagctgcttctatgagtggtagcttgacgtcaggtggattaactccaggaatacccttgttcccttcagaaaaacgacagaaacttgaaaaaccaatgtctgtatctgatgctagcaatgctgatataggcagtactggttattttaccctaccacagcagtcagttgccaatatgccacttacaccatcatcaggcatgcaatccctttctcaaggaaagcagatgcaatctactttttcccagccaccacccctgccgctcctacctgttcttcattctcctgctactccatcacatcaatatgtccaatccactggtcttatgtcaggtgtaatgccttttggatatggatcaaacacccttccacccccaccccctctacctctacattttggtatgggattgccaaggccaaatcctcaatcacaacagcagccacagccgcaccagtcaccacagcagcagcaacaacagctgcaacctgccaatggaggattttatagaccaccaggtatagggttctatgggcaaaaccaccaaccgactacgccaccagttcatcggcagtgaagtcttgtaagaaatttgttaacagggcaagaagtgtgttccaactttgagggcatttcaaaggagataggcaaaatgcaagccaatactgcaacaacagtggcaattacgttaccaaaatcaacaatacaagctgaaacttttagacagattgttctgtaaaatattaggaagtaggaagtagtagtttctagaaaatatttctcccataggtagtggttgcttggtggatgcattttagcattacatgatgttcagtatatttaactaattctgattgggaaattactaatatgagcttgaaattgttaaaggtgtctggtcctatcagctgggcttagacaggcttcttctaaatttgaggctaattatttagcaactaatttatatttgaggcaagctcctgggctttgtgggcttctccttttccaaggagagttgtctgtctttacaattgtataagagttaagtcaaactgctctgatagtaaaagtagccgttgtaattatgtgcaatgatagtgtaaacataattttcaactattttttttccttccctatttggtagttgaattgtagtatgcataagtattgtagctgctgtgcatcaccattagctggtcgaagtcattttttgttctcatataggaacctatttgtttgtgttagtaacaccttacgactatggcgactgacattgaaaattatacaatgggaaggaagatttaccaaggatggttcagccatgaggacggatccttccctgaggattgttctgacttcactaatgatggcccttgcaagaggtatccttcaccaaggatggtttcacattaagatcgatcctatatgggagatcatgtcttcttggctatgcatttttcagctgccatcccaacttgttcgacaatcgttaaatcttaagggaccatagcctttgtttcggtgttagcgacagtgatgagcattgaaaggtcactaacctcatttttctcgcgctcttcattagaccctaaagtttgggcttttattattgattcttgactttgtaccattttactttctgtaaatcaatagacatttgtgccattagtagcgtcatttgatcaacttcaattatcctagttgtctttttaacagttgacctctcactttactattgataattattcagccatatctttaaataaactcatagccttcgctagtgtcttggatagaattttactgcgtgatgtgacattatcaatgtgtgacctcttttgattattaagcccattgtagaaagcaagacttgaaactaatcttctataccatgtagtagacactttctaagcatctccttgaatctatcccacacatcatatagttgctccactatttgaattgggtgacttctgcctttagtttagaagtcttggaaggaggaaagaatttggtgaggagcttttgagcggtctcttctatgcaagtgcattaggaggcaaagattgataccatgaacaagcccggtctgtcaaagagaatgaaaagagcttgagtctgattatgtctggtggaactctatttatctttattgtgtcacaaatttccaacaaagtagacaagtgaatgtttggttcttcatgaggcaaattaaagtattgattttgttgcaccatactgactaatgcatgtttcggttcaaagttgttcacattcacttgctgccttctcactcccaagaaatcatcattgacaaccggcctaaaatagtcacaaggtcaacgtttgccacaagattggcacaattagcaatgtgattattgttgttaatgttgttaagtttgttgttgactgaggtttttggcaaccaattcaataatagaacgagaagagctctataagccttaatgcaggtgctcgttacgtggtttgggcattaatgagtcttagtccacgagtctttgttatttatgagagtatttttacagagaatgttcttggtgaatctctttctctcttctttactcccttcgattccttaattattcgatccactcctttttcattctatttgtgggtatttatagtattttttgggagattccctagaaagggatcacttgtctttttgtgttagcctcttaggggcacaaattcctagcaaatacaaaataggaaatacatgacatatgccgtaagtatcttagggagtaggtgaatataatcctttatcctcccttgattgatgtgagtcttcat

SEQ ID NO: 300065 - DNA, 2449 bp, Cannabis indica
ataaaaagagaaacaacacatgaaatgaggaatccatttgctacccattaagaccacaaaacatagcaacatacttaccaaagagatggttaaccatctacaaacaagtactacaatagaaaacaaggatcatggaatgtaatttatgagcttatatggcaagtatctctcacctagaattcatccttaaaaaaacaaaagagcttgaagcacaaattcttgttcctcttcctttacatgttaccaggcagagattgccaatttacacaagtcattgcgaattcgggacttaagcccagctgttcagaaatatatttttttttcttttacttttgcttgtgttcacattccttcagaaaaagaaaagcaaactaccctatataacttgttgaacaatgtcaagtctatcatactttatcatcatgaaaccaccacctcgtctctttcggtgatcgtccatttctacagttctttacatagcggtcgttatcttcagggcgttgctgcaagcataatgtcgaaatagtcagaaagattagaacatacattaccctgttacactctacccgatgagaaattcgcatgttaaagaaaagacattagagacatgcccaccgttaggccaaaaaattatgtcatcgcttataccgaaaaaacaccaaaacttaattgaaatgaaatgcatacctttgcagttgagcttgacagcattgagagaatgctaatacagatggaactaacagtcatggctggtgaccatgaatcatacagaatatctacaaattgccaaaatgtacataaataaaatcaatagctgaattcaggtaaaacatatgacagaagcaaggagaaaagttgggttagaagagtttcaattcaacttcattgaaaggtcccaactcacaagttcctaattgaactgaaagagaaaatatttcataaaatttttatatctagctatccaattataagaccccgtgtggccagaattgccaactacaaatcaaggttcccagcctaagactcaaaaaatttcacccacaaaataaatctgtcagtgcagctaagatcaaaagaagcatggaaaacattctatttggtgcagcaatgtactaacaatacaaacattaaaaccaaaccactagaaaatatagggaaaactgtgatttcatgatgaatatgaaaaccaaactgagaacaagacaagtacttttgagcaaatgaatgaatgtaaacaatgcagaagaaaagcaactttcaactatgtgactacatataaagcaaaatggtacacagataatttaactaaaagaaaagacaataaatgaataatttcagtaactagaagagaagctgaaataaatttacccaaacaaatatgaccattgctgtatatatgaggatgaaggggagccggatgcaaaaaataacctgttcaccccaacaacagaaataaaacaaagacaacattcaccaacaacatatgcatagatagaaacaaaagaatgatctaattctacccaataggtacaaattgccaaaagatcaaagacagtgacaaacctgaggggcttccattggataatgctcaggaaaatcaacttgaagctggtaagtctcatttgaataaagggttcctggagctccattgacttcaatcacccaccttttgatcaaagagaagacacaccaacccaatagaaatacatgatcagaaaagcaatcaaaaacaaaaactcaaaccccacaaaagataatttggttgaacaaaaaatagtgaaaagaaactgaacagataacaccaccagcataacaagtttccatttaatccaattgataaaaatatttgaagagaaaggcaaaaaaacaccttaaagtgtaaagattcaaattttttttgcttctttttaccaaagggaaagggtaaaagcacaaagccctaaagagaaaaataaaaaataaacctttgaagattatcggtgactttgtgtttgaaaccagcgggaggattgacctgccactccaacaactccttctggagccgactgcatgcaatcttactcaaagccttgattcaacaaaaacccatatcgtaaatcaaacaaaaacatcatagaaaccatcacaaaaatcaaataaaaaaagatgagatttttattgcagcgtttgtaaatagatgaagtaagaaaaggagcaacctttcgagaagtggcagaggagcttgtcatggtttttctgtagaaaagcacggtggtgaggtgtttgagaagggggagagagaagaattgagaaacctgattgaggaggtgttgacgaaagggacgaaagggacaaaggggaccaggaagccacggtttcataacccatcaccatatctattcctttttccttttttataattttatttctttttttttttaattattattatttaattaattaatattaa

SEQ ID NO: 300066 - DNA, 1247 bp, Cannabis indica
tttttcttaaagaaaataataaaataattcattatattagtggaagccatctccgaggtgaaagcggtgtacgaattgaaaaatattgagtggcagggagatccttgtggcccggaggattacatgtgggactgtctgagctgtaattacagtgctaatcattcctctagaattgtttccttgtatgtcttttattaaattttatatgataaaatattatgtatgtacaaatatattaacatatatatgactcatgacattttgcttctctgatatgcaactaccaggaatttatcgtcaaggggcttaaaaggagaaattgcaccatctattgccgaactcacttcgttacagcaattgtaagtacataaaaattttgcctgtgtaaatgtttacttaatactgtgtttagttaattactatacaaatttttcaggcacacttattatatatacgaagataaattaaaatattattatgaataaaaacatattttaagtagcaacaaattgtaaatttttgggtctatatatattatgtacacactctctcttattaattagtatcacaaatattcttcgtacgatgacatgataaaattctttgtaaaaaaacagtacttttatggttgtctataatataataataacaatactcaatataatttactcataattttttagttacaacataaattttttatgattaaatcaatgtaatttttaattacaataaaaaattacttgtgattacaatataacattttgatacaatattgtcagtactattttatttttactcagtattgtgattaaaaatacatttagttataacaaattacaatttttgtgacaaatacgatcaatcttataagtcacaacataaaaataataatttataattaattacaatttttttttttattcaaaaatatttgattgtcaagtaaaagtaaaattttgtgtgatgactcttaaaaataactaccaaaaaaataaattaagaaatgtacttattatcatttaatttcagggatttatccaacaacaacctcagtggagtcgttcctgaagttttagcacagctgttatccctaagagttttgtaagctaaaagtttggagactatacatatgatatgatattggtcaaaaattatcaaatcattatttgaactatctttggttgtttatactgttagataaattaacaattaacccaagatctatttgtatataacatagaaca

SEQ ID NO: 300067 - DNA, 1520 bp, Cannabis indica
aaaaaagttcaggagacacgatttagtacatgttaaagttcggggaaaaaaattattaattagccttttttatatattttatattaaattaatttaaatataaatatgtactgacttgatattccatttatattaataggaatatagattgtgaggcacgtcttaaatccttcttcaaaatgtcaagagtaggatatttttgtgatcataaagagatttaatgctcacatgctttgtatcatctttctttgttttatcatctatcatctttgaatattaagaatcattttgtcaatggcatatattatggatttcaaattccattgcactcatcactaatagtggctctcaatccttcaaaaaatatatatatttttttaatattaatgaaaataaattgtatttcttcaataacaagaacccatattggttctgatgactaaagtttttttattttatttttttctttttctttgaagtatttggatgtgttagttttcatttgatgtattttttttagtttatgtgtattacaatatttgtataaaattggagaaataatagaaccttataatggtccactttctttatcctaatggtatgaataaagggagttattggaatttctagataaatttattaaaagcatattttccaatgaaaaaggtaagttgacactagtgaataatggtccactttctttatcctaatgattaaagacgttagaacttgcaaacttcccaacttattcaatgagagagtaaataagtatagataattttttgctaattattttttattttatcataatttttagtctaaaggtttttataaataaagtttgttttatgtatactattgtaaaaatctcaattaatcatttaaaaagaatctcaattaatgtattaagtaaagatagagggttctcttaaaaaaacaaagaaagataaagatgtggtccaatgagttatcatctcattttcaagtgtttttattttttattttttgataaatcacaccaaacttgaaaattacttattttcaaattatcaaatactagtaaacattttgcgtttcgcggtggatatataaaatattttaaattatatagaaaaaataaattttgtattttaattaataataattacttaataaaattatattaaaattttaactttactattaaaaaaatttgtgatataaatacttaaaatattaaatttattgctaataaataccgaaatttgaaaaatagtaacataaatcctcatttatggtttaatttttattatgatgtgtgtgttaagttctgtgttcaaattttattgtgtgtgtttttaatgtttgagttttagtattttactggggttctaatgtttgagcttgtgtttataagatctttatttatatatttgtttatttatttttgtagattttgagaacttgaaatttgatgttgtttctattgattattggaattgaaagttagatttttcatacgggaattaaaatttgccttt

SEQ ID NO: 300068 - DNA, 1853 bp, Cannabis indica
catctaatgcctcaggtttaattatgataagttttggtgggttttagtaaatatttttctttttctagtttgcattaatagctaaaacatggagaaattaataagattgacattcctttttgtcgcagcatgtacaaagcagcataattattataatgctttaagttgctttttgtagacacactttatatagaatagatatataaatattattctttcgataaagaagaaaaatttggatgagaaaacaaacccaggtttcaactatataccatgattaggccacctaaaaatccttattataagtacagattatatataatctttatatatatatgtaatcttggtccactgtttcaggtaaagtatatattaacgaaaaaggaaaaagaagaaaagaaaaagaaattaatctaaacggctactgttctcaacattacattgcatcttcataataataatttgttttggtccataaaattaaatacaataagtaatgattgaaagaaaattagctttaatattgttgaatgatacatcgatcgatatttatagctaattactttgtctttttggatcaagaatatatattatagctatttgctatatatcttgatcaaactcaagtttattaggcaaccgaccattattttggatagggaaaagaaataatatggttactttatttatttatttcaagatataaaaatatatatgttttgaccaaattatatatatattaataatttttaatatttcaaacatggaagaattaaaatgaatcaacttagtattaattatattttattttataacaaaaaaaattgtttgttatcttttcatgtgtatcttaaacttaaagttaacaaatgtgttttgtgttgtgtactaaagaaaagaaaaagtcagtggcgtggtttcgtgtgaccaaaggagtgaagcactttataagttttgtctaatgacatagttttgatatttttctgcgaagaattgtagttctgtattcttttatacgacatccagtataactcattggttcagagtcttgaagaatgttgtgttaaactaacgttggaagaggaagtacaaggatgctacgaggtgggggaggaaattgaaataaactatagtttcaatgcgcggtggtgtttagtgagaaagttttttgctggcaagttgatggatttggaatttgttcagagtcaattagcttctttatggaaaccaagaatgagtatgtatgtgaagcaacttaagagtaacctgttcttgttccaattcttccatgagatggatattcaacgggttattaaggatagcccgtgaacatgtaaccaacaacaaatattggaacgacttaatgaaggagataatttccgtaaacagattgtacatgtgggtgcagattcatggggttttgtcccaggctttatgtttgacataatgcttaaagcaatagggaactatgttgggggttttcgtggaggcagatccgaagaattttattgaagtttagcgggaatatttgcaagtttgagtaactgtaagtgcacgatccctaagatgcagtttctaaggcaacacaattaatgcagactgcagagatttgaagagacaaggaaggattcacacgcttcaagcaagactgatgacatatcagtgcaagtacgtgggcataaacacgtgcacctagttgtgcaacacgtgaggcatagaaagcccccgtacaactataagtttccacgcaaacttaggggacaaacgttatcccaaaattttcactgatgacatggcatctagcaggctaacacgtggaagggagaatgtccctgggcaccaatttgtattga

SEQ ID NO: 300069 - DNA, 6022 bp, Cannabis indica
tttcaaaagcttaggacttcatagtgataggaaagatccaagaaaatcgactataatcatctacaaacacaatgtagtatttatagttttctttggatgagacatgggaaggaccccacaaatcagcgtgcaccagagcaagaagttgcttggctctggattgagacaaaggatatggaaacctatgacttttacctaactgacatgctttacaaaatttcaaattattaagagaataaggtatattagctttgtttaaaattttgctgagagtatgagaagctggatgtccaagtttattgtgctttgtgccaattattaatgtcatgagcagtttgtgaaagtaagacagtaggattataaacatcagagtagacaaaagatgttcttttattattttgttcagtacaagaagaggttgaagactcaacctaatacaacaatgattacaacatttagaatgactcaacaaagacttggattgaatgtctgaagtggcaagatgcacctgcagagcgctgtttgaaagactcaagttatcatctccaaggtgatagagctatctttgattttccctttaagcaagactaccccgtttccttgtccataacaaaacaacaagtttcatgaaattccaagaaaacatcattgtcattattaagtttggatacactaactagatttttagttattgaaggaatttacaaaactgaatttagatttaaggagtgagagtttgaggaaatagttgttgtgccaatgttataaatcaccaatttcttacatttagcaacaactactatttcttgaccagtatagggagtgacagactcaagattgtctaaagagtgagctatatgattggttgcaccagaatccacataccacccaacatcatcaccaaagtctggcacagattaagcaataaaagcctgaggatcatagtcaagagtgtgttctatgaggttggcttgaggctgagctagaagcctttggggtaacccaatttcaatcaaacctgtagtggtaagtaacaacagtacacccaaatttcatgcatacttgacattaaaggtctgttattattgataggtcgggatccgttgccacgatttgagaatgttggtacattttcagaaccttgacctcttcttgagctattaaaaggtctgtatgtgccatttcttgaacctaaagtaaggttggctgctatttttgttgaaagatctaagatggttgagtgtctctctagtcttgactcatgagacatcaagagagcttgaacttcttcaagtgaaagagttttacttcgagaggtaatgctggacacaatagaatcaaactcaagaccaagtccattaagcaggtgtaaaatcagatcaaaatcatttacagggtgaccagcaatagccaaagaatcgcatacagatttgatcttgtcaacataatctaaaatggacatattacctttttgcagatttttgttaattggcttttaagttgaaagagtcttgccttagattgacttgtaaatttctgttccaaagctttctagatagagttcgatgtgttgtagcaagccacagtggccaagattccttcagtcattgaagatcggagccaagacaacagtaaatgatctttacgtcgccattgcaagaacgaaggattgccattgccattggtgagctttgacggaggagaatttttactaaagagtaactcatcaagatcacaacctattacagtaggtatgacttggcatttcttggaaagcaaattcgtaagatcaagtttcaacgtgagcgaagctgtcgaagaattcaagaagggattccatggtcactacaagaaatgtcacttttaccagcacagtttgctactgcgttggtaaaagtaacttttaccaacgcatttcgcaaactgcactggcaagaaggtcaaagttttaccagcgtacatttgtagtggctaaaatctaacttttaccagtgcatttacgcgctgggaaaactcatttttgccaacgtatttcattttatgctggcaatagttctattaccaacattgatttgccaactcccttttgccaacacatcacaagtaaattctattttaccagcgcaataccaacttttgccagcacaaaaatgtgctggaaaaagtgacatttcttgtagtgggtggtgtcgtcgaggaggactgagttggcacaactgtaggattagaacctccagcttgagatgagtggtcactgaaggaagcaattggcgcaagtcaagggctctgataccatgaaggaacaaagcagaggaagaagaagaacatagtaatagttaaaaaaaaaaagaaaatgtagagaaaacttgatttcattaatgaatgattaagtgtttatatacacaagagaaatacattctgttagaaaaataacaatcaagaagctaacaacagtaataactaacttaacagacactaactaactgtcataacagttagttggtaatcaacccttaagctaattagtaaataaattattagcataactaattaatttgaaaggaccaagtgaaaaaatgtgaaaacaaaataccaactttaaagtcttactcaacatgtatcatacatagtgaattcgttacctatattcacacaaccttattatagtatacatttcaaataacaattgtacatattacaaaacaaaatccaaatgttgtactacagatatcacaagtccaaatcagtcaaggaggggtttcgaccttaattagtaggtttccttgaatatataataagaacaaagtggtcctccacaacgtacaaaaaagtcaaattaggtgtataataagttttgctcgcgtgaacaattaactcgatcacgactcatgagtcctcttaagtttgattttatatctatatagcaactttggactgggtcgtctacgtacgtggtcgatatatcgatgaaatatgttacatgcaggaaattaagaatcattaataaaattcttctgtccatattattatgcatatttttgcatcttcttcttcattatctttttcgtattctcagcctctctctcagctgataaagacaaaagtcaaaatattcctttctttatatattaggctaacaattcatttccagagattaaaacggcgttcaacattcaaatataattaaataacacaagttctttctttagttgtgagcacatcgttttaaatgttgtgataataatgcaataaacgatcgacatgatcaacttcgtataagtcaattacgtatttgtccctgatttgtctagccgattctcatatcttcataaacagatagatagaacgatattatatctacctaataaagcaacattgttaatgcatataattctatatgtaaatgttaaaaagtttaattttattacttatatatggtagattaaagaaacttaattaatataataaaacagagtgtgacataagaaacaagaatgagattggatactttccaatcattataaactcatgcaaatcctgactaatatctttagatctgcaaaataaaagagaagatgttgaagatcttccaaggatctcgttaactctcttttgactgtacttttaaaagattcaaactatatagctaggtataaaatgaaccaattaaaaactacctatgcaaaccatttttttttttttttagatataattcatgagttttattttactcattcaatctctctaaataaatctaaagtttcgtaaatacaaatagataaaataaaatttaatctttggtaataaagctttatcaccaaagaggaaaaattaataagaattttgtttttatgttattttagaaaatgttattttatgtatgtacacggtaattatttaaggtatatatatatctttgaaagtttttttgaaaaattcagaataatttaacgtgcaataaataaagttaaacaatttgttgaactagtgtttctttcttttatatataagtgtgaaataaaccgtttgaactatactttatgcattgtaaaatattttaaatgtaagtacgacattaattttttcagttttcataattgtaactggttacacgacattgtattgctagttttaattttcaatttcatagtgaccattgtcggcaactaaactaactaaaataaaatatgataaacacaaaacaataactagtatatatattatgtctttacaattaattaaagttagacaagaaggacaaataaataattgacttatacgaagttgatcatgtcgatcgtttattgcagtattatgacaacatttaaaacgatgtgtcctatatgagcacaactaaaaaaagaacttgtgttaatattgaacgccgtttttaatctctggaaatcatgaaatgttaattggcctaatataaaaaaaggaatatttgacttttctctttatcagctgagaatacaaaaaagacaatgaagaagaagatgcaacaatatgcataataatatgtatagaagaattgtattataatggttcttaatttcttgcatgtaacatatttcttcatatggatatatcgaccacgtacgtagacgacccagtccaacgttgctatatatgtatatataaaatcaaagttaagacgactgatgagtcgtgatggagttgattgttcacgcgggtaaaacttaatttacgcctaatttgacttttattttatgtacgtattgtctaaggtcaaaatcctccttgaccggtttggacgttgtgatagtacaacatttggattttgttttggttaataatatgtactatttctttttaaggaagatgtacaattcttatttcatatatagtaactacagatacaaatttgattccaggatttgaattcacactttggtggattatgggaccagtggggggataatttttcaaaaatttatttgtataatcctattaaaattattagctacaaagttgatgattgatctttattattattattataattataataaatatttttttaatatatagtgttccacctatatatcaattttcaattttttaaatatttttttttaaatttgtttattacttttcaaacttaacactaatatatgtagttgattattttctagcttaatattgtgttttacaatttatagaatataaagcaataatttcaaaatatatatatatataaattattattattattatcatgatatttatggggtattcaatgagtctccattactttaattagagattctcctaccccaaacccgtagaaaattaaatggaacgagagttgtgataggggacataaatgcgagtggagacaaggttggggtacatgttgtgttttctgtgataaataaaatttattcaatataataataaaatttattcaatataatcagattttctaattaataaaatatcaaaaaatcattttaataagtaatactcacaaagagtgaggttgatcccacaagaattgtacttaagtacgttaaaattaaattcttacttctatttggctaattaaaattttaagagaaaatttaaaccagaaaaacaagaaaaaccagtgaaagtaagaagcaggtaaattaataaaggaattaacaataatgaataaaagttagtgctttcgatttcaattgcatctattgattatggtttaatatgattatcttcctattaccaatttctatgcaatagcaggtttactaaggtaatttatagtcttctcagatatataaatctcaattacatttaaattttctactctcgtgataaattaaacatgtaacaggcattaagcacagaaaccctataagttatccaaaccttataggttctctcgtcctatattgaaatttgtttctatttcactatagtataatcgacactcacatctcaaatctcgcatcaaaatcataaacaataaattggtggtcagacaattaaaagtaattaagtactaatgaaatagaat

SEQ ID NO: 300070 - DNA, 5517 bp, Cannabis indica
ttttaaaaatatatcatttatgttgttgacgtgatttggatgataaatacaaattttattgtttattattagtatcttattatgttttgtaattattaatttacaattttatgtaattagtaggcttactcattaatactatataaattagtcataaaaatagttagacaaatctaatatagtaagttgactcattaatatatctattataatttagttaagaatttgtatgaatttttgtaaatatattttcaaatgtgtacatttttaaaattgtgttttttttgcacagtttttgtaattatttaagaaaatgtatacatttatgtaaaatgcccttttaaaaaaggaaaataaaaaattgggctcctagactgggtgggccctaggcacagacctagcccgcctatgcccgaggccgggcgtagtacttggtgattgaagaaatcggacttgagcagctatatagacttttctataacatggactcagcaacgtacgtggtttagatgcattaattgcggtggcataataataataataccatatcaataataataataataattttttgagtacaattgataatataataataatttaattgagtgctaaagatgtgcatattgtcacatattttaattttattataactcagagctcaaaatgatcacttgctcacacaatttaatttcctatccttttttatagaggttcattcaatgtttttttgtttataatgattttttttttccaagtttataatgactattcaaagatgatgtactataattaaggggcctacccaactgggcaccagaaaacgttcttttttgtttgtttgttttttctaaacttgttgagttttatcacgtgaaacaaaaaaacgcaaagatgcatgggacatgggagatatgttagtctgtacagagttttcaagaaacgtttatagttaattgcaataataaaaaaaaaaaatagatggatatgaagaacaagaacccattccttgttcacaattacaaatacttaataactttcttgtggtgctattctagccttttttgctctgctattgataccatgaaatatggtgattggatcagagacaacgtgaatagtagggagaagacgattaagcttgtttcagccaaagaaatgtttgagcttggattcttcactcccaagggcagtcctagtgagaaacgatatattgggatatggtactacaacctcagtccaaagacggttgtttgggttgccaaccgagaaaatccactagtcaccacttcaagaacaagaggaggaacctttggtattggagaagatggtaaccttcaactttttgattataaaggaaggtcattttggtcttcaaatctcgaatcttcctcatcttcaaacaggacattaacccttttggatactggaaatctggtgttaacagagtataacggtataagattgtgggagagctttaaaaacccaactgatacatttcttcctggtatgaagatggatgagaatgagagcttaacattgacttcatggaaagacgagtttgacccttacaatggtgacatatcgtttactaagggtgagggaactaactcgttcatgatccgtaacaaaacgggtactcgttggaaaagtgctgaagtcagtatgttcttaagctcaaatcagatgccgactacgataacaaactttttagagaacaaaaggggtgttgctcataaaaatactacttacaaaactggaccagaaatctcaaattataattactcaaggttagtgatcaactctaatggaaaacttgagtacttgagttgggaccaaaattggacagtggcatggtctgtaccaagtgatagatgcgatgggctaaacatttgtggcgatttcgggatctgtaacagtaatgaacagatgaggtcgtgcagatgcttgccgggatttaagtcgagcctggtggaggagtggtattctggagattactcagatgtttgtagcagaggagcaaaactatgcaacggtaacgattcattcttggggttgaagatgatgaaagtggggagacgagactcaacaacaagcatacaagttaacaacgtaactgaatgtgagaagacttgccgtgatgattgcaaatgccaggcttattcacttgagactcatcagaatagttggaacagaggggattcaactcaaactaatttgagttgttggacatggtcagaaaatctaaacgatcttcaagaagaaaatattactaaggatggcgttcacaccttctttgtgcgagttgccttatccaatttaagtatgtataatatatagtccctcttataatttttagttttactactaactacttataggtccgcaataattagacattctgtgtgtgttttctgtctcttttttttttcagaagatgaaacttcaaatccaagaatagtaaagcctaggagaagaaaatcgttatatctaattgtttcccttacagttacaagcgtaattgttctgtcaatcattataatttcgtttatcagttggagaaaaaggaagaccaaaagacgaggttagttattcaaatcaaaagatgcaatgcattattataatattatgcatgttccatttgtatgagaaaattatatcactcgcatcacaagaacttgttgcatgcaccacgcattattaatatccttatcacttcagagaacagaaaactatttgaccaacaaaacagagcactcaacaagttggacactgagagacacatccaagaattgatgaactccagcgaaatcaaggaggaagatgagaaaggcatagatgtaccatttttcactttagaaagtatactcaccgcaacaaataatttatctgtggaaaacaaacttggacaagggggttatggacctgtttacaaggtatttatagcttcagcaattttttttaaccaaagtaattatggtttcataaaagaaaagaaaaacatattggttagttcagtgttaaaaatagctgcatttgctccttattttaatattgatactgtcttgaagaaacttataaatgctcattgatatgaagctattagagttaatcccacattacttatgagtggaaataaactgttatatataagataaatgggatactctttctattgccaattggttttgagatggaacttcattcatcttataccaaattctaacagaaacttttttttttatttatttgtttttaagtttaaagctcaacatgaatggtgccacttttccttttctgtgtaaattaattagtttattatgtttttaagaaattgcaaaattacatgtttctctacatcagggaaaatttccaggaggccaagaaattgcagtaaagaagctgtcgagtgtttcaagacaagggatacatgaattcaagaatgaagtgattttaatagcaaaacttcagcatcgtaaccttgttagacttcggggatattgcatagagaaagaggagatgattttactctacgagtacatgcctaacaaaagcttagactccttcatatttggtatttatttcagctagataatctccatttcgatttgtatatcatagctcataataatttaatgtttcgggaaaaatgtattatttgcaagatgacacaaaaagggccttattgaattgggagatacgctttgacattattatggggatagctcgagggcttctttatcttcatcaagactctagactaagaatcattcacaaagatttgaagaccagtaatatccttctagattgtgatatgaatcccaaaatatctgactttggcttggcaaggatggttggaggcaaaaaaacagaggacaacacaaacagagtagttggaacttagtaagtttctttcatcttgacactcatttataaagtgggaattcatgcatggaaaccaatccaaactgacttatatctcataattcattaaataataatgttgaacagtggttacatgtcaccagaatacgttcaaggaggagttttctctgtcaaatcggatgtgtttagctttggggttgttctacttgagattgtaagtggaaaagggagcacacgatttgtccacttcgaatgtgatgaacccctaaccctcctcggttatgtgagtgtgaacactacacttttttttctcgatcaatttactttcctctttctgctaaccaaatgggataatcaatatttttcccaggtatggaaactttggacagaaagcaaagtgttggaattaatggaccaaaccttagaggaaagttacaaagaagatcaatttattaagtgtgtaaatattgggctcttgtgcgtacaagaagaggcaagtgatcggcccaacatgtcaaacatcgtaaccatgcttgactgtgactttgtaacccttccatctcctaaacaaccagcttttgtccacagaagagactcaagtagcacaccttctagtaataagcctggaacgaatgctgaaataagttataccatggaagaaggccgatagagttccatgaaggaagattcagttgagttagtctttaaatgctcttgcttaagggattatgtatcatatagattattatcataatttttccctcccattctttcaccgtcatgttgtacaaggttaaaataggaatagcatatttgtataaatgattaaaaatgaaaaatggctaaaagcatctccaatggtagcatcctttaagaatgctaaaagtttacatattatttaaaaatataatattttattttatctctcttcgttatatttttggcactcttacttttaaaaacacttcaatgtatagcactcatgttataattatctcacacattattatttaatatatatatatcctttttagctacaataattttttagcttcaattttttattaaaaataaataaatagcatcaacgctacaacataacatccatataaatttctagaatgatattctttgatctctctaatggtataacatctcaatattttgacacataatatgtccacatcaccaaacatcctctaaaactttaccattgaagatgccccaaggggagctttatttgcattcccacaaaatgatcaaaaatctcattattaatcttaggaacttagtagtgtaattgagtgagagtgttaattatatatataaacatttgtagcttcttctattaaagataccataaggtttgaaaataaatataataaaaaaaattaagtgtcaataatacaataattcgtggactttgagttgaacattcacatattggatctaaataaatataaaaattagtatttttataatgtgtggtgcggtcggtttgaaccgcatattaacaattcaaaactgcaaactgcaccgcaccacgcggtttaggaaaaattcaaaccgcgaccgcaccgcaaaaaatttcaaaccgcatttttttttgttgcggtgtggtgcagtgcgggc

SEQ ID NO: 300071 - DNA, 3211 bp, Cannabis indica
atggtatcagagcttccctcgttcaatggcgactgctacctcagctgattcctctcttcgttcaaacggatccaactcttcatcaagatcttcgtctctttctttcaatcatacgttatccatcaaactcgacgaaaacaactttcttccatggcgacaccagatatatgctgccatcaaaggtcacagattaatcaagttcctcgatccagtggcagctccatctaagttcgtgacagcagcagatgaagctgcaaatcgtatctctgaagatttcttgaatgggatgttcaagacagccttcttgtctcttggctactttcctctatgactgaaaagatcctcactcgcatggtgggatgcaacactgctgctcagatctggtgcacacttgaggagtactactctgctcaaaatcgagccaaggtaagtcagttcagaactcagcttcgtcgcacaaaacttactggaaatctgaatgactatcttctcagaatcaaacacattgttgattctcttgcctccataggccatgttctttctcctcaagatcatattgaagccatttttaatggcctcacaagagattactctgtttttgtaacgtctttgtccactagaaaagatgagtactctgttgccgaggttgagtcattattaatggctcaagaaatcagaaatgagacatccgaatctgatcttgatatttcaaagccagaagctaatctagcaacccaacccaatctgtcgaaaccatcagctactcgaggaggatatcacaatttctctccaattcaatttggcactttttctggaggaagaggctctattcgtggtaactttcaccatcaaaacacaaattacagcccctatcctccttacagtactggtcatcaccaatttggtaatctctatcctccttcttatccttcttttgctaacaatcctcgaggttctcgaggaaattttcgtggtggtttctcaggcaatggaaggggctctggtcctcctaaagttcagtgtcaattatgtcacaaatctggacacacagtcaagcagtgcttctaccgattcgataaatcctttacaggaccagaatctttccaatcctttaatggatcagctgctatggctgagatgcaggcaatggttgcaacaccagatactgtcactgatcaaagttggtatccggattcaggtgccaccaatcaccttactccagatctacaaaatctgatggctccacaagagtttcctggtttagatcaaatccaaatgggcaatggttcaggtttgcatatctctcacactggtcacaactcctttatttctccattctcctctcaatctctccaattaaataacttacttcatgtacctgatataaccaaaaacttaatgagtgtatctcaatttgctagagacaactctgtctattttgagtttcaccctcacttttgttttgtgaaagatcaggttactatgaagactttattggttgggaaggttgataaaggtctctataagtttgatcaaccattgcaatctgtctctcaatctcctagtcattcctctactgcagcagctttgtcttcgtctaaggctgtgtttcaatgtcaaaccaatacttcaagtgtacctttctctgtttttaatctctggcataatagactaggccatccatctaaacaaattgtacaaactgttatggccaaatgtaatatcaattctatcaataaaaatgcttttgagttgtgtactgcatgttgtcttggtaagcatcacaaattgccttaccccaattcagaaactgtatatacagctcctttgcaacttctacacactgatctttggggtcctgcccctgtgatctcttctaatggctatagatattacataagttttgttgatgcctactctaggtacacctggatctatctacttagaaccaaggatgaggctcttccaacctttatcaaattcaaaactcaaattgagttacaactcaatcataaaatcaagtctctccaatccgattggggaggagagttcagagcttttacatccttagttgaatcctgtggtataattcatagagtttcttgtccacactcccatgaacaaaatggggttgtggaaagaaagcatagacatatagtagagtctggtttgactctattagctcattcatctttaccactaaagtattgggatgaggcatatagaacttctgtctatctcatcaataggatgcccactagagttctaaacaattttactcctcatgaaacattgtttcagaccaaaccagattattctgctcttaaaacttttggctgtctttgctttcccaacctaaggccttacaataaaaataaaatgcactacagatctaccccttgtattttcttaggttatagcctcactcaaaaaggatacaaatgtctagccaaggatggtcgaatatatatgtctcgagatgtcttgttcaatgaaaccaccttcccataccaaaaatctgctgctgtccccaaaccagttctttcacatatgtccttcacatctgcatctccacctgtctctttgtcaccacctgtcatctcctccatagttcacacctctgactcatcattccacccacctgacactccttctacatccattccttcatctcatcttccttcctttccccaaacaacaccagttaactcatctaatccttccactgcctcccaagtacaatcccaaacacctcattctccacctcctgttgtgaaccagcaccctatgcaaaccagagcaaaatccggagttcgaaagccaaaagtactcactgcatctcttgttcctgcaacagtaaaaacagctttacaagatccaaagtggaacaaagcaatgaatactgaatactatgctcttaaaaagaacaatacttggattttagttaaactacctcctggcagccagtgcataggttgtaagtgggtttttcgagtcaaagaaaatgaagatggaagtcaaactcaatacaaagccagacttgtggctaaagggttccttcaacaaagtggatttgactttaacgaaacctttagtcctgttgtcaaaccagaaacaattcgggttcttcttactgttgcaatttccaaaggctggacacttagacaacttgacttcaacaatgctttcttaatggtgatttggaagaaga

SEQ ID NO: 300072 - DNA, 1852 bp, Cannabis indica
tcaagcacaacttgactaaatgttacagtctgatcacctgtgacagaaacaattgacactcaaagattagagaaaacacagtacgattatgatccattaatcaaaagtcaaatctaatgccaagaacatggaaagtaataagtgaactattcagaaaaataggccattgtgagagtacaggccatgcaagtgctaaagcagaaaatattcatttctctcgctcttcgggttgggcatgtttcacattgtcatctacacttgcataaacgatgcttaaaccaagagcactaccttctttatttgcttggtcaaagacatacttggcaagttttggaatgacttcagtatctgtctcagattcgaatgtgaacccatgtcgaacaagtgtttgctttaggacctgaaaacatgcggaatcagagaaagatcttggaaagagcccatggagaactaatttggtatacatgatagacaacattctaaacactaaaaaatttcatcaacatttaactttaataataaagcactcatgatttaatcatatcaagaaaattcatttcactcaaaagccaaaagctcaaaaaaaaaaaacaaaaaagtgggggagaaaagacattctgttagagttttaagcaaacctcataattagtaatgactccattatgaacaaccaagaattcatttccaggacccgatgactgggggtggctattccttggagctggctctccatgagtggcccaacgggtatgtgctataccagcatggacagaaaaagattcctccaacttaagttctgtttcagcaacctctgcaaattacagcattgcaagtactctagtaagtatcattctgtaaccagaatgccataagacatgcgaggaagtgatacatagtaagaaaagaagaaaacaaaatttgacattattaaaagcttggagtgcaacaggaggttccaactttgaaccatattactgtccatattcctttaaattaattatcagataaatgaagttcaaacacaaaaaaaacttgcgaataattgcactccaaagttaaacagttagatagttgtcagaactctatatccaattgtacaatagttgatgatgaaagaaacaaagaagttgagattataaaaaactggtctatttctaccatttgaaacttgcccaaaagcaatttttcaaagaggggcaaacatttgaatcacatcattaagaaaaatggaaaacaatcaataactcaaaaaagaagtaagactttgttttggtgcagaataaacaaaaaaggtgcttcagtttgccatgtaagttattcttattagcattgagtctccctgggcgatataaaagtagtcttgattcctgaagaaaattatgcttataaatcaacccccattggagaaggtaatatactttattaactacatcaatgagtggatcaatactccacccccaatggagtaactgaagaaaagaaaatgacagataaaaaaaagaggcatccaacttgcccagacaaagtgggcagatcaacccgtttatttccaagagtgctccaactttattgactatttttaccccaacattttcccggaaacgaacaacccttagatcccccctccccgccagaaaaaaaaaacctgaccttgataaactgatttgacgagggactcgatgtttccttcctggcgaaagacgagcgggtgatgaaggtttgaatgggaagaaaatgaatgatcaatagatatcccggcggagtcatagcctctgtactccaatcggcgaaggccattaaagagtacttgaagaatatagcttctctctctattgacgttgtgattcaagta

SEQ ID NO: 300073 - DNA, 1561 bp, Cannabis indica
atttttttttttatttttattaataaaatatatgtgaagatataatatttaaatgatatagagaaaaatataaagaagtatggtgtaatgtaaatatgtgaggtaaattagaaaaattgaaattttggtaaaatattttaaaaaataaagtaaaaaagttgttgagagtgctcgaaaattagcttccatcactaaatgttaatttttgaggatagtgtatatataaggttacatacgcaaatgatattgctagtcttaattgaacttttttttgtcccaacatttgtggaaacacattttggtatccaataattaagttttgaatatcatcacacctagctaccatattaaattaagttattaattaatgataaattatttggaaggatattatttccttttttaagattaatttattccatattcctctttttttttttcccattgtgagaaaaaggaaagtagaatcaaacgaattcaaaaccttcatatatattcataataataattattattaattaatgcatatataaataatttagaaaaacaagaacacattacaagagtatataaaattaaaacacattaattgctatatctgaaagtgagtgaggtagttatattcatatgtatggtaagaacaagcaaaacttacaagagtgcttgccgtgtggcccaagaaaccaaatatttgaagttttaagtccaaaatggaaaccaaatatttgaagtttatttgtatcatttctttctttgattgatttctaaatatttggcaaacatcatgttttagatgagtatacatttatatataaatatgtatatatatgtcaaaagcaaaagaatatatatagccttttagctgttagggttcaattttttctttctattattcaaagctttttccttttgtaaactttccttccttttttgttttttcttttctttcattacccatttagtgttagggctggggaatgccttatttagaggaagagatcaaaagaggaggaggaagaatatatatgatctcaggctttggtttctttttctcttgttttttccttaaaaaaatttgaaagtagaaaaaatgagtactttgaggttcataaagtgtgttactgttggcgatggagctgtaggaaaaacttgtcttcttatctcctacactagcaatattttccccgcggttagtttcatttttttttttaaaaaaaaattgattttcttttattataattatttgaaattgaattgtattaatgggtttcttgtttcctcttctttataagaataattaatattttatttgtttgtttcatttttctttgtaaatattatgttttgttgttacatttaagaatttctttgttttgagattgattttgaaaatatgatcgtacatttgtattcttttatggattttagatttatttgttttaatgatatgtgataattattaattatttagattaaaatttagattatggattcattatttcatactttgatggaaaaaaacaggattatgtgccaactgttttcgacaatttcagtgcaa

SEQ ID NO: 300074 - DNA, 1590 bp, Cannabis indica
caagaattgccgttagatagacacttttaatatataaagatatatattcatcatcatcttgtaagttgtaacaataatacatacatgtcttcgtcaaactttcataatcaccataacaataataatggtaagaaattatcaggagtaaaattgtttggtgttgaagtaagtagtagtagtagtactactagtgatagccatggtaagcagccagaggcagaggcagaggcagtgcataatggtgtaccagtaatagtagttcccttatataacaataataataataatcattattacagtactactagtcatgatgttaggaggaaatcattaatgtcatcatcatcagcagcagcagcaccattgtatagattcaagtgtgagtactgtaatcaaggttttgtgagttctcaagccttaggggttcatcagaatgcccacaaaaggaaaggaaagttaggactcaggccccaatacccaatatgctcctcctcatcaatactactacgggcgtctcttcaactcaccatcaattcatcatcatcatcatcatcacaagcaggttcttgttccttcttctgagtcagcttgttcttcaggcaatgaaggagttggccatggtgatgatgatgatcttgatcttcagctaaggcttggaccatctgctaattaataatttcactacattcactattaccattattgaagtgaaaaataataatgtcgttttcatccacttttagcatatatagaatatcttgtacctttttcttatatatattattattattgatcatcagaaccatctttatcctcattgcaaatggatctgaggcactgcatctctgcaggtcctaagaatatatattcaacattattatatatttatgttatatgtccaaataaattgctataataaaaacttaaaaactgatttgagctaggtatattaacgatttgtatgtatgatgagatgttctagcatatgggatgtatgagataaagttattttttaattagtatatatatatatctatatttctttcattcactgctgagtactttttagctttttttgtatagtacgtagtcgtcgtatctgagatgttgcatcacttttctgttattattattatttttttttcaagaggttgaaagaatccacagatcatttctttgaaaatttctaaacggcgttgtgaacaacaaaatttgaaatttgtatctaccaactgcaaaatccatattcataatttgtaacaacaaaatttgaaatttgaattgttaattgattttgaaatagaaatgttacttatcaaacactcactctattctacctttctccactgtatttctaatttctcacattggcataaaagtcaaactaaactctaaagagtatccaatcaaaattagaaaatctatctaaaaacttatgattgagcaaaaattaaccacaaatttgagaggtattatagaatctcaagttgataatgtgtagaaattaattaatattgttcataagatatatatatatatttatatatatactagcaaaaatctacgtgcaagacacgtatactaaatttt

SEQ ID NO: 300075 - DNA, 4146 bp, Cannabis indica
  modified_base (85)..(85): a, c, t, g, unknown or other
ctaacttttttttaatttttattttttgttctttctatttgtattattttatgagtttattatggtatgggaactttttttttgngtaacttattttgggtatgaaaatagaattataattatctttttaatataacggtgttaaaattttttaaaaaaaaatctgaataattatgctgaaattaggcacacatataaattattttatttttctataataaaatacataaaacttgttataactataataaatatcgttaaaaaaaaaaattataaaatattttacgtgtctagactaaaaatcatgtcatggcgataacgaaaaaaaataattaccctagctactacaaaagaccgtctttctaataatattttgcaacatgatatttgagatacaatcgataatgatctatcgaaaattctcaatgatcttgtttggatgcaaatttaacaaaaaaaaaaaaaaattaaatcaaattttgtagctatattttataaagtcatattcatcaattactctatgctatatatatttgtaactagggtttggagtaatggtggttaataatataataaagtttatattatttgagtatttttaaagaagtttttttgggatttttgtttttgtttgtatgttaatataaggtaggttcaatgccacaatactacttgaaagattaagaaataagagacttgtatttgtgggagactcactaaatagagggatgtgggtttccatggtttgcttgattgactcagctattcttccatctttcaaaaccattcatgcaaatggctccttaaacatttttaaggccactgtgagtactcttctttttcttccatttatcttttattaataattatatatggtaaaaattacaaattttatgggcttttaaaaatataattctttcaaaaaaaaaaatatagggagatagtataaggtaactaattaccctctggttaccataaggttaactggttaccctaaattatttttcttatattttttaggggttattttttacaaaaatattgtcttttttataaaacaaccttaaaataacaaaacagacgcagtaaaaaagttggaaattatttggtgtaaaaatccctatttttaaccttttttattttttcagacaaaataatattttcaaaaaaatcacatttttgtaaactgcctaaaaaaaccataaaaattgaaaattctccttttatatggtacaaatttagtttcttctctttttcttaccctatttgggtttatggctttttaaaaattattgacaagaatatcagtttttcaattttcgatttttttaaaaaaataaataaataaattatggtggtaagataagattcagtaattaggaaaattaattggaattttttgaagttgaattgctcttcttagattttttggatatgggctttccttaaacgtttcttgtttagttgggcttgggcatgtccaaaaaggcaagtcctttgggctggccccataataatgttgttttttcaattttatttttaagaaaaaaaaaagtaagacactaataatagtaccaaaactaaaattttgacagcaagaggtttacttaccttttcttcattttagagtaaagaataagaaaaaattagcttttttataaaaaagaaaataaaaaaaaaactggtatattggttctcttcattctctaaacatattttagtaacatatataaataatattttattctttcaagacttcaataatatataaaaaaaagtaattttttcaaactttaataatatgtgataggaccgatcttagaaatataagtaggtcaataaactaaaaaaaaaaaaataagcctttatttaaaagaaatatgataaattaaataaaaaaaaatatatcattttcaaatacaattttcttttggtttcagagcaaaaacttaatctacctatgcccaaagccgagcctattatatattaaaaaatatattatttacataatataaagataaaaagtagagaatgagatagatgtaagttgtaatgttagaggttgagataaaataaaaattaaaatttttgtaatatattaaagatagaatagagaagtggataagagtgttctaataataataaagtgattgtgaatttcttttttttttaagaaaagcaaaagtgattttgatttgaagcatgttcaaaactatgtatattgattatttagtttatttagtttttgtttaaaaaaaaaaatagtggtttcaatcaatcaaataaacatataaacaaactaaaacattcttttctattatttttattacatcaacaattttagaaaaagcaacttgccaaacactatttttgacctctaagttctaaccacattttcttttatttaatatttaaaaattaaagtgctcactaaaaatctttaggtcaaaatatgattgttaaaaaaataaattattgactagaatcttaatattactcaactggagaatggaaatcttctaatttgtttttattggtttttaataattatctcacctattatatgacatatgaagtgtcttatttttttctaatataaattatcattatgtctcaaaaacatttctatagattccttttctctattttagcctccttgaaaatatattctatctatcttcctagtgttttaaaaaaacaatccatctaagttaaatttcttttaatttttttatcctcattttgcaaagtaataatcttttgtaaaatgacatttgagataatatcatagttaaaatatttgattcttgaaggctattttaccaacaaataaaaatatatatataatatatcatttttaaagacagattttgaccattcatgtttttatatacataattattatttacaataatttgttttatatatatatgataaagatctatacacataaattacataaaatttaacataatgtgacaagttacttagtaagatttatcctacataaatatgattagttggctggccatacaaatgtctatcaagtgtgtaatttgtttatacacatatttatggatttttatacaaatatatatgatttttttttctaaaaaattattttgtggaaaaaaaattcaaaaagacagttaaaataatttgagaataatagtataaggtaactagttatctctgtagataacttgttatccatctagctaccctaactattttttctatattttttaacttgtttattttatgtttcccacaaaataatttttccaacaaaaaaaaccatttttgtggactttgccaaaaaaaaccataaaaatgaaaattacaaatttgacacattaataacttcaataaatgaataaatttatatatagaggactaatggttgaattttttttttattattttttatggtgaatgttaatgaaggaatacaatgcaacaatagagttttattgggcaccattgttggtggaatccaactcggatgacccagtgagtcaccgagttgaagatagaatagtaagagtccaagcaatagaaaatcatgccaaattttggaccaatgcagacattcttatttttaattcatatctttggtggagaagacccaaaatgaaagttttgtaagtatatttatattaaacttatttggaatctaattacttaatttctctactacctaattactaactaccaaatttgacttaattaatttgaaattaatgattgattataaattaggtggggatcttttgagagatcatcatatggtgtttataaagatgttaatatgttaagagtttatgagatggctttgaagacatggtcagattggttggaacttcatgttaatccaaacaacaccaaattgttctttgttagtatgtcaccaattcatgaaaggtattatattcatttaacccaataatcatcatgggtttaaatgtttttgccaatttgtacattcatcttttctctcttttttttttaagagttaaaatgttaattatatatatttatatagataataagaaaaataagggtaaatatcattttggaccctgtgttttacaaaagttatcgattagactctctattttgttaaatgacaaaatagactatgta

SEQ ID NO: 300076 - DNA, 2346 bp, Cannabis indica
tttctgatacttttatgtgtttaattttccatcgttttagaagttcatatctaggttgttaaatcaacatacttgtgagtagatctaagttcctggtaaaataacttccaacaggccttgagttgtgtagtattgccacatggagcttgaatgaatgaagtagagaactcttgtttttcattaactttgagccaagaaccataaccctgttgttgcttccccgttgcatcttcaaagattttaattggttctgcacaaatccgagtatcatgtcccacaaaaccacaattaaaacacataaagggtaatcgatcgtacctatatgggagccagatctttcgaacttcacatggaaagaggaatcctggaaagagtgggtttgcaatatcatgccacactttgaatgtaaagtagcctttggctgcaatcttgggagcatctgccttttgaacatgaataatttgacccgcaaagcccgccaatcgatccatgtttccttgagtgattgatcggatggggagatttagaatgcgtccactaagtgggaatttggtgagcactttgtctcaatcttgagggattccttcaaatttctccagaattaaaatgccattgttaagaaaccatggattcttggccagaattcgattcaaatcttcggatgatttgaatgaaaataccaagaaactcgcagattttgttgtatacttgatttcaacgctccaatttctttcggagatcccccagactcgtcccaagatagtcttcaagagtgagcgactaattgggcgagttgagcaccatcggcccatcgcacagagcgatgccatccgaatctccagaaccattgacttcccaaccttcgtcttccagcaccgacatgtttgttgttcggcaagcaggtcttccatggtgatgtccaattgttccatgtgtttaggcttttccagcatttcagggaggctcttctcaagagagagcatttggatctgtttcataattttgattatagaaaatatatactataattctatttttactactacaattagtcttatctctgggacatggttttaagttttttaatcttctctctgtgacatagttttgagcatttttgtcttgtctttatgacatgattttgagtgttttaaccttgtttatgtgacatggttttgttttgttttattgttggctcttctttgatttttgatggctcgctatcaaatcattgttagtggttaggaataacaagttctctgggactaaagttcagggactgaaggggttgttagtagtgcagttacataccttacacaatagtttagtgctcaagctacaaggttgaataaacttgctgtaacaatttttactattgtattttctccgaacaagagagagacttcaaaaacacaatatcattgctaaagattgctgtctgttctgtagaacacaaacatataaaatagaccatctcttcttttcttgttctttctcactagtctgtgaaaaacaggtaaaatgttggatgggttggggagctaagtcgaactcactgtgtaagcttctaaggtggatcggtcgagcaaaaactagtagattcaagaagttggttttttctagtgctacagcagcacttgtgtatcatctttaacatgccagaaatgacattctttggaactcagcagagcgaaaggatgatcaagtggtgtgtacgatcaaagaggaagttaagagaaaaatcaactgtgtttggcctaaaagtgttagtatagtagatacaaattagttttcaacattgtaaattattaaagaaaagcaaagaaaaaccaacaaaaggaatataatagggaatttctataaacaagcattatagaaaggttaattatgaatcattattggagatgtctaggtcttcaaattgaagatgctatcgggatgtaaagttgttgttttggagtaatgaatttcttactggtttaccgaaaaaacaggttaattatgatactgcaattttttttatttaattttattttaatttttttgtcaaataatgtggaaatcaggaggtgattatttgattcgtttttttttaattctaatcttagtagtgtctctaccatgaagatatgaaaatgtcccgatcaaattacaaattattattttagttgataatcattaataaaattctattatttattttaaaaaattacttgaaaaggaattaataaataattagtagccaaaagattaccatagccacactactctcattatacattactagcacaagaaattagacttattccaaataggctaattagcaatttttcccccgaactttga

SEQ ID NO: 300077 - DNA, 4893 bp, Cannabis indica
gttttaggatgcataatgtgtgagttcttgacaaaaaaagattcgattttgaccttcgttgtgattcttgactctttgagtcatgaagaacacgaagaacatgttcgagttcttgagaaacacacactttgatccatagcacaccctggatggtcatagaggtcttgttcaagacctggccagtcatggggtcttctcatgggagctggccggccataagggtttaccctaaagtctatacaacacctaattatgtataacttattttaccattttacttgcatgtatgagagtggaagttatatgtgtttgtatgacacttaattctaaaataacttctcctagaatcatgattgcttataatttggttttatcatccatacaacatttccaatcgaaattattgaaaccaactactatatttcacaatgttagttttttgattgttaacatatccttaataccataaggatgacaactcaagtaccaatacagcatgactgcaacagatatcatgatagtaatgtatatacttgactgaactctagaccgccttcaataagtatatatatatatatatgtgagacaatttcaaaattgatctctcattattatctatacacgtggacggtatgccttttataacacaacacacttaacaatttaaagattcttaataaaatcgaaatattaattacaataatagttagtcaatgcaaactataagaaaattcagtctattattgttgatatcattatgaagaatctaaatacttagaccatataacgtttattacagattctttgtttaacagagatagtcaaataatcgtttaatcgactctaaaatcgatcaggatcataaaatatgagcaatgtactatatcaagtaaccgtataaacattgctctcactgatctctcacgtagtattgactaacgataatatttcaaattgaaaattttgagaattatagtagtcattatcttgatatcctgcctcaaaatagatttatccattaaacttgtccatttaacaagacaaggtctttaaacaagaatttagttctctcatccatatatattgatttccaaatagtcaccactttaccattcaataatagtgcaaaacaaataaatatattattatagtagagaatatttttgatacagaaaatctaattatcgaagaataaggcacattaacacgacaaagggtcctagattcctatgttaagtgagtaagagaacttatctatacatttatcctggaaggaatagaaggtttggagacaaagaagagactccaagacccatcgaggacctcttcctcgcttcacgtgcaccacgacccccaacaagggggtccctcacaaggccctcagtgtgggggcctcctccccgtctcctaaccctcagcgaacggggttcctctaccttactcatacgacctccaacgaagggctcctcctcctcgcgaccgacccctaaaggacggggtcctcacctcactcgtatcgacccctagtggagggggcccctctcctcacgacccgacccccaacgagggggtctctacctcgttcgcacggcccccagtgaggggcctcctcctcgcccactacaacccccagcgagggggtctcttcctcgtacgtcaaggctctagcggggagcctccttgtctcacacgacatggtctcacaaggccctcactcacgtgagaggtcccatcacttgaggaccctcattgaacaaaagttcttattcaatatgtaataacaagagaggatgagtcaagaagagccttgtctcctcctattagctactcacgaaaggacatatgacgaaatctacacactcttatgcataatgaactttaggacgtaagacatgaagatacgggacaaaggacaccccgtaccatgtacgtgtgggggaccatccaaaaaagcctccccactattatagaacctgggcaagtagtcgacgtacaatgggtggtggagaccaaatccgcatgtgtcaggatctgggcaagaaatgagagtttcaaattcaaaattacggttttataggcatatttctttagttattttaaaataattgaagacataagccttaaaataattgaagataaaggtcttcatgacctatgtctttggttatttcaacataaccaaagacataggtccgcaatttttttttctttctttttctccttacttttatcttcggattttattttttctcttgtaaaaactaaagctatacacaaattttctagtagtggaatatgaaggtcgggtgtggggtggtggttcatgattcctccagccattgcattgcttcgacgtctattcctatttattctgctttgacgcctctagtggctaatgccttgttgtgcttcatggtccgacttagtgctctcggttggggttctagattgcggaggtgttatctgactgttcttgagtgtgtgagactcttttcaaaaaagcacatttacttgcttaagttggtaatgttactttattgttgatatttttttttatctgtacatttgttaatgttttacatttctctcattgtaataagctttctaattctataattcataatttggctaagttgaccatttccctgtatataactataatgtagtagcctaatctttttagttgtattaggggtgtgcagaaagtcatttaatctaattataatcgaccgatccaattttaactgatccaatagaattggatattcaattataattggatcagatcggatgtaaattttaaaaatccaatcagataagatcggatgttggatgggacatccgatctaatagattaccgaaccgaaccgattcaatgatcatccaattatatttatatattattaaaatacgtttataattttatatatttaatatatatattaattaatttaatatatatgtaacacgtgagattagaaaaaaaacattaaatctaaaatattaattctcatcctcttaaatgttaataaaattgtcaatgcgtattgaataaattttagtttttttagcattttattataagatcataagaattaaattggactaaactaatgtttattgtgtatgttagattattagattttcaattatattttatatatatatattttaataaaatcaacttaaatggtagttaaaatagattggatgaatccaatcaaatttaatctaataaaaaattaattaatgcatccaataattggaaccgattcaatccaatacatctatttgatcagatgatatcagattggatgacttaatttaattgggttggatcagataacacaattcaatatctaataaataattggattaaattagttggatctaaatccattaaatatgattcactaaatactcttaaattgtaccttagaaatggatatatatatatatatatacatatatattttggtttttttttttgaaagctttttggtcatttattgttttgtggtcctttaaggcttcaatgaatcctgtaaataagataattttgtacaataaaatatcaaagtcaattggccattggttatggaaaataaaatagctcacaagaacagattctaacttggtaactaattgtctctttttaattttattaacaaattattattcttaaaaggaaagagaagaaaaattatagtttgggaaggaaggttgcttcgcgcgaaaataggtgaatagttagaggcaagcatgcactacctacttactgtcgatatggataagtcatgatgtggtagcatcattactgttttagatttataaaagatcgtatgcatttaatatttgtaacattataatttatttgaaaaacattattatttcaggatatgtaattaatatttataaaattataattttattctaattttttcagtatagtattttttttaaatttatttgaaaaacatttggaagtaaagcttagtaacatttgaactattgacctctacatatatacatatatgtaatctagtttaactattacactaaaattaatattatatctataaatattattttttttattataaatatatgtcgtaactaattaaattgaatatatatttttttttcaaattttttttaaagagcgtctatactacatgtttttgtctaaactcaatgatctagttactaagctatatatgtgtcatatttaagacaataatagagtttgtactggcgaaattagaaagaaattatagttttacaaatattaagtatttatgctactaaaaataaatattaaatttatgacacttacaaacttaaatatgatgtatagacttgattagaatgagaatgtaacatttaaattaaatttaaatgataagggtttgtgtttccaagtaggttttacatttttaatttaaatggtgataatgttaatcccttcacgcatgggttacatattttctccaagtctactccctccaactctactctctttaactcaaacttacataacaaacaccccattaagtggcgttttattagaagaaatgaaaatatagctaaaataaaaataatattctaatattttaaaataaaaccaaacaaaagaatagaataaaaattgtctcctttctattctattcaatttcattccctctaaccaaatgcgactaaactatttacactgtttatttagagatatttacaccacagactgaaatttttaatttttttatttttttttattgtggatggaatttttttaaaaaaatattgtgtttttttttttcaaaaatactatgtaagttttatactgtgtactgtgttaaatttttacagttgttttacggttattttttagttgtt

SEQ ID NO: 300078 - DNA, 3380 bp, Cannabis indica
ctgaagcttgttgattcaaactctacccttgagagctccggaccggcggcttctttttgcaacaagaggctcaagggtttactagtaggctctgctccttctgtaaatgggctatcaccaggatgcaagctcctggaatattgacacctagagctagagaggctaccggagtactctccacaatgcgcgtatcgaaatgagtctgaacattccttaaaagcttggtgtgtgttgagttgctgcacaaaaagtgcctgaactattaagcgcagtggcatcaattcattttgaactgcttcaatgcaagcctcttgtgataacttctggcaactgaggtatttgcatactgcagctttctcatcttgggacacgtttggatgtgcctgaaaaacatttgcagcataatttcagattaaggctactgattctagttcagttcactctcaggactgaggggtcaaatattgttttttaacatcctattttcaagtatctgactcgattatctatacttcatcttcaaatttgaataaaatgttggaatttaaatagagcttaccagcaagaaggtgttcgttgccctatagagttgatcatgattttgtctgtgaagtattggaactctttcaatgagttccatgaatcttttaggcctcaggtcagggtctgaagctatgtatagtgagatatatgagtcccataggtctgcaacgattgagttgcttgctgagggagtatgatctgagtccgagtttaacaaaacatatctagaaattatgttctccattgtaaccaactccatactagaagaaattggctctttcccactatgcggaaccaaaaaatcttccacttgggcaaaacgcaacaacgatacaattttctcttgcaacttagctttactatcatctttcaaaccaacttcaagggatctagaaagtaaggcaaagtaaaacccaactgggatagctctactggccttctccctcaaacgcagtaactcaagaataccttgtaatattactgaaactctgtgattcatattgttatccacaaacttttcaccagagttcttggagagaacccatttgtttgcatagaaaacaatgatggggctaacatatctttccttcatgccttgtcttctcaaagacccaataatccttttgaagaatccgaattggagagcaataagatctttgatccagagctcttgaccaacaatttccttcattgtttcacagctccagcttcgcttggcaagtgtctccagtgtgactactggttggtcccttctcctttctggatcaagaatctccatacaagccatgaaagctagtgattcaatgcagcggctcacaatcagaagctcctcagaccagggaagcaaagtttgacacttttggaggactattagtgtgtcatcccaactctgcagtacaacttggttcatatagagatcaaagcgttcacagaggtttccatgacagtattcttcagtcatttcgagaaactcagccgcgcaacgaagggctgccacattaaaagggtcaaccaatgtggatgagccatagatgaagagtgcaatcatctcaaagctacctggccctccggggaagtcttcaggtagctcaatttcagttgattcattcaatattttcttgaagtatccactttttgagtacaacggatgctgcaaaaatcaataaacaaataaaagacttaaggattaagctaattcttgtgatttggttgaacacaaatcttggactgaatttaaacagcacaaagaatctaaccttgtgaaggttgaagatcttgtcaccaactcgaacgcgaaccgtgacaggcaagccagtctcttggctcctgagaacacaagattcaacaaaagcatgatatcagaagaataaaaatgaaagaaaagaatagtagacaaaacaagtaaaaatggaatccattagtataattgtaagcatctgaccatgaaatgactctaattttgagcaaggccccaacgtttggggaagagaaaggacttaaagagagtgaagtgtgtttggagctggcaatttccattactaggcaaagaccatgaaatgtatttcagttgagagttttttttgggtgtgggagtgggattagatgttgggagcattaataaatcctataagagaagactgcgcattaactagagtcgttggattaagaaaaaccaggggaaataaatacaaggcaagagaaagcagaggtggtttggtttattaagtcagtttgtactctagtccacacacattcgtgcaatttttcatgcatatttctttattttttttggtcaaagtcaaatgcacacgagtgaacttccaatttttaaggcttcagaaaaggttctcgagtgatgagaagttgaattcttggtgcaaccacttggcctcggccagtagaatagaacatggtaaaaagtataataataatactaaacaacaataataataataatgtgcaaaagtatatgaaatcatgtagaagaagagagatattaattttaaggtacaataagttgtgttagtgaaattattgttttggttgaatttgtgagttgaggatgaaggcggtggagtaagtgaaggggagttagatcagatctcaagaagaaaaatgaattgggaaagaggaaaagtaaaaagatgaaaatgagatatgatattccaaaggagaagatgaagtgcgggctaagcttttgtttttgttttagtgttgctaaaatcaaataataataatagcagcaggcacggcacgatttctcaaaatttggatgctttgattgaaggattcttctgctttgccatcaattctcaatccccatactattatattattattattattgtcattaaaaataacgtaaacctaactgcctcttcgctgtttctattatgtagaataaatctatccaattaccacaatagtaatagtgctgtaaatataactcaggtatcagattcattgagatggcatgaaacatgaatgagcaatgcccgacaaaataaataagggcgggctcgagcatgtcaatatgatataaaaaatagacttaaaattataacatgataaatgtgaatgctgttgataagtacacaagtatacacatattttaattagttcacctcatattaatattttaaaaaaaaaaaattataaaaaaaatatttttaatttttaatttttttcgtttactttttttttttgggaacgatccaaccccttcttcctctcttcttttttttcctccttcttcttttcccttcttcttcttcctcattcctttctcatgagtttcttctcccccaccttgccctcattatgctctctctctctct

SEQ ID NO: 300079 - DNA, 1038 bp, Cannabis indica
tttttagcgacggtccccaaaaaaattatttttaggatcgtcgcgaattctgatatttgtagtagtatcgattatgagatatggtaaatggacgtcaagataattactttcctcaccgaaatgttagacaagactattgatatggaacaaccagaagagttcaaggttaaaggagaagaagagaaagtttgcaaactcaatacgtctacatactgagtgaaacaagcttcttgttcctcgaactaaaggtttgatgagatcatcaaaatctatggatttgtacaaaattttgatgaatcttgtatttatcggcaaaagacaaaccaaacagtggtattcctgttactttatgtatgatattttactcattggaaacatagttaagaaataattaaatgtaaaagattggctgagtacttaattccaaacaaaggactttggtgaagtggcttatgttctgggaatataagtcataagagaccgcaagaacaaatttctagctctcccacaagtagcttacattgacattgtgttggagtaatttttaatggctaactctataagggaggtcatttgcctacaagatatggagttcgtctatcaaaggataaatgtttaactactccaaaagagatagaggtcatgagaaggattccctgtgtatctacagtaggaagtttgatgtacaaaatgttgtgtactagaccagacatctgctactcaatgagagtagtgagcatgtatcactcaaatctagaacaggaacattagactgtagtcaggactatcctaaaatatttgaagagaacaaggaactacatgctattctattggggtggagatctcaaccagttaggctacaccaaatcagacttctagtcttgcatcgatgatgaaaagtctacgtctaggatggtgtttactcttaggactagagttgtgatttggagaagcatcaagcatgtgacagtcagtagtcccgtgattcgtaaggagaaacaccgaataagctgtgcaatcccacatcgcctggggaag

SEQ ID NO: 300080 - DNA, 1498 bp, Cannabis indica
agagatcttgaacggaaggagtcattatatttcgctgcaatcaatgtaaggttttctaaaaaccttatgtgtttatttcattgttttagagcattcacatttaggatgttaatcaacatacttgttagtaaatctagatcctggtaaaatattcccaacaaaaacctcagatccctgcctggataaaggtaaacgcaaggtagaagaacctgcagaaaagtatgctcctagacttcctgcaaaaggcatgaatccattcagtcagcccatcaggatgcaaaagtccactggtcctttcaagcctaggcgaccttctactctaggaggcaaggttgtgcaaaaagggaaaggtacgaaagcacctaacccaagggacagaataactaccctagagattctgtcaaccaggacagaggcacgactgaagtgcactctggagacagttggtccatcgtagaccttcaccgacgattggacgccaagtatgaaaattacaaaagttaaaaagagaggccacatggagggacctcggaaatcacataagtgaaaaaatacgaggatgtgatcttcctaatagtgacatgaaaaggttagaggagcaaatagtagctctaaccaagctcatcaaaaagcaaagtggggtcctctcgaattctaaggatgaggaccaaaaaccttgcgatagtaggatcccagagaccctgttctcggaaaacttcaaaatgccacacattgaattgtatgaaggaaggatagatttgggaacccacttggcaaaacacaacaagatgacgtaaatggcacgtgtgagcgatgaagccaagtgcttgtggttctccctgatgttgaccaagtttgcggaagtgcctggctcccagatcgatccatagctagaaagatttacagtcagccttctgcaagcagtttattgctgcacacaatctagacatggaagttggctctctcaccaacgtcaagtagcaagaaaacaaaagcatgaaggcttttattcagaggatgatggaagctacaaccaaaaccaaagtcaataatgacatgatattgatggctctttagtttggattaattgttgggtccttactatggggagaaatgtagaggaaaatagctgaaacattacctgaatttatgtcaaaagcccaaggcatcattaaccttgaagacgattaccaaaaagcttttgtagtcgctccagctctagttccttctacgaatgcatccaattttgttcctcaagtcccagccgcaactttaattcttcctggaactcaattttttccaagtgttagcggactcactacttcaggtcccgcacctacgcagacccatttctccaagtatggagcaaaacataccagatgtagtgtggcttcaaaaaaggcaataatggaagttcaagattcaaatatgagccatacacgaaacaacaggggaggtaaaggctgttaggttttatgccttaaataaaactccattt

SEQ ID NO: 300081 - DNA, 1492 bp, Cannabis indica
tcattgtgtgtgtcacattgatcaatccataatggtatgacccttgtggattaggccttggtccgcttgctgtcaaattccgtctggtttggtacaagaaaaaatattctaagtatccctgcaaagattttagactctcatgataatttgaataaggaaaacagtacctgaatgatcgggcttgctcaagggaccaatcaatctgagttgttgggccaccgggaatagcaccagaaacacttcctgcagagttgctgtaatgaagagtggcggtcgacgtgagaatttgagaggtgaaacgggttgaaaagaccattatgtaatcttgaggtggttgatcggctgtgaccaagacagataaggattgccccagatgaatgtcaagagaatcataggtgttctggagagagtgagtgccttctacctcaacaagaagcaatttgtggccctggattctgaagttaatggaagttgtaagccccacgttagatatacggaacctgtaagtcttgcctgttttagcaagttttacaagagaaaaaaaaaccatcaacaccatgaccaaatgaccttgtataggtgtagcttaacaaaatgtatattttcaagttgaactggtgacatgttattatttgtttaccttggtcaactgtgaatgtgttcccatttgatccacgaccattgataagaagcccatcagggaaagggagatcatgcccaccatccaaaatggcctttaaatcctgtataagtttaagaaaaagtacattcttagaagccttgataattttctcttatatgagatttggcatcatctataaaattaggtaggttactcactgtgtgattttgcttgaaccagtcaccagctagtagggtgaaatcaccagcaggaggagggaaaggcaccggaattctcgggcggctaagaattctgataccgccatagcctcctgcggctttgtgtaaggcaagagaagggaagtagaaatagctgccaatctggtccttaacttgaagaacataagtgaaattttgtcctggtggaatggggcagtttgtaccatacactccatcttgccatgagttcctcctctgctgtacaccattcctacataagattgaccaagaaaacaataaaagaggatctttaagggctcttacatcttgccatcgcgtgcactaactaattacattaggtaattaaaaatgtatcaagtaacaaacaaaaataacacaaagttcaacacttccgggtaagaactagtacgatctgcttagtatgtttaaaaaaaattcaagttttagtggaaagaagaagaccatatttcgaaacagaactcactacatgaataaagaaagggcaagaagactaaccaggagatgagaaggggttcgtccaaggcattgaagacactaacaatcaagttgtcattggtaaccgactcaatctgaggccctggaaattgcccatttatcaagatgccctgaa

SEQ ID NO: 300082 - DNA, 4295 bp, Cannabis indica
ttctgcctgttcagttttgctgtagcagaattactttctgctgctgcaaacgcttacagtttttatagtttcttatatacaactgacatttgcaaaaacacggtttttttaattctattagttgaaattaggcatgtgcaacatgtagtttgagttaagattgatcatctaccgggggacaccatatagcctaatgcgaaagggtggctctccatccttgtatagcaccgagttgtactggattctgatcgaaattagcatgacctaatgggtctggacaggtaagaacccatcaaatcaagttgggggcaacttatatggtaatattttcttttgaaaattagatttaacttagattaaaacataaaaccactagtacagaacattgaacaacatcaacaaacaaaatttctacccattattttgattccaaaccaaaagaacacaaaaaataacgacaacaatgtaaatattgaaatatactaagctgatttgctctagactgaagcatattactgaagcatattttccctgatttagcgtctctaaatcaaggaggatttatcaagcggagatatattgcacataacatcatgatatgtcaggagctgattaggaattatggaagaaaggtttctaagtctaattgcatgatcaagattgatttgcaaaaggcttatgataccttggattgggacttcctagaggaaatgttgagagccttgaagttcctatcaaaatttatacgtgtggtcatgacatgtgtgaaaactcctagatactcattgatgttcaatggatctcttcatggtttttttgaggctaaaagaggtttgaggcaaggagactccatgtccccattgctgtttgttttaggtatggaatatctaagcagaatcttggcgaaagtggggaaggaggattttgccttccatgaaagatgtgctgaaatgagacttaatcatcttagctttgcagatgatattctcttattttgcaaaggagatttcaagagtatgtactttttaatgcaaggccttaagctattttctcacatcgggcttgaatgttaacaagtagaaattagctttatactactcgggcatgacaaatagagagattcagagagtcttagatatgtctgattttactagataaagagatccattcaaatatcttggggttcctatctgtgcaaggaagatcaatgcttcagattgcagtagcctagctcaaaaaatggctgctaaaatcaaggtgtggggcactcgaaacctttcttttactgacaggttggtgcttgtgaactctgtacttatttcaattcacatttattggagtcaaatgatgataattccaaaaaaaggtaattaaagagattgaatccatttgtttagaagttttctttggactgggaaagatttgatgacaggggctgaaagcatttcttgggagaagatttgtaccccaaagaaagaaggtggtcttggcattatgaatattgctacatggaacattacaggcattgttaaacatgtatgggttgtggctaacaaaaaagacaacttatgggttaaatgggtgcatcgtgtgtacattaaaaaacaagattggtggaagtacaatgctcccacaaccagcagctggtacgggaggaaaatggtagaaataaaggacaaagtgcagcaggtgcagcaaccaggagtgtttactgctgctacttatcaggtcagcaccggttatagctggtttgctcctgtttctcacagagttttgtggagcaatgaagtctggaatagacttaattctcctaagcacaatttcctaattctggttggctgtgcaaaatcgtttgaaaactcgagaaagacttcacaaattcagcattatagactcacccgattgtctattctgcagcagagttcctgaaaatgtggagcacttatttttcaagtatgaaattacacttgattgtttgaagttgctgaaagattggttgcactggcaggttcattcggattcgttgcatggtttgctgaaatggatctgaaaatccaaggaatccagattttgaaagaatctcaagatggcagcagttgctgcaatggtttatgcaatatggagagcaaggaatgatttgttttggaattcaaataggcaacaagctactgaaatggtaaagcaacttaaatgggctgtaaaaaaaatagaattttgtgtgtattaccaaaaaaagtgaaacaaaagatatagattatttccaagttttgtaaataaaaagttgtatatatataattttaaggccttgtttggcgcttttaggttgtaaaaatgagattggtgcaatgaactttttggttattaagaaaaaaatatattgaaatatacaacatatataagtacaacatatgtacatatacatttatatatacatatacatctcttatattaaatgtggatatctaacagaaattgttagttaaacggttttattttgttaagtttaatgaaactaacacggttaaattaagtaattatttatttttattaaaaaataattttaaatatttaaaaattaatttatttattaaaatataaaattgataattattttgaagtattaagaaaattagataattatctttaatacaaatcttaatttaaatttaaattagacgttaatatcaattaatcatagttcataataattttttttaagaaaagtttattatttgaaatatctaaacttatttacttattttattgtttaataaaattagatatattttcttataaataaatttaaaactagattaaattttatattaaaaagtataattgaattttattacatttaatttttattattacattcgaatgagaaaggaagttgttacaacctgagccctagataatgacagatatgtaacattcataacttgggtggtcaaagatcacactttgacccttgtaggaagatactgcttatagatgatgctttaatttatatcacagaatagtgcttatttataaaataagaggattaactcctatatcgataagaaaatattagtaacaaaatcaagtccactcatcaatataaaaagaacaataatatctctacagttatatagtcaccaaatagatagatttaataagtgttgttgaaggaattttaacaataccaaaataaataatatagaaataatataaggagaatatatgcgagtactcaacctagagtggcgagtattcaaactaaagacacaaaatactgaatagaaattggaaatttaaagaacacaagagaatatagtggttcagtcagatcacggtttgcttagtccattgttgcaaggatttatgtcttgtccatttcacgttggatcactcctttatatacaaagcaagtgtcctttgatttacatagagattgaattcattatcaatccgtttatacattgaattacaataattaaactaaaaaacgtaaacataataaatgaaggacagtttcaacttaattcactacatacaagaacatacgtgacttctatagtgtgagttggatgttcacattcttgcataagctcgcatgcttaagatgcgtttgagactagtcgattctaatatgtctgcgtcttgtttaagttgcttatacgaacatcttatagcaagtcggtaacctaaggcatgcaagtccttatcaggttatcgaggttattgtgtcatctagaccagctcgttgagtaaaggatcaatctctacaatttgtaagaggatctcggcaatactttcatatattctggtatatgcgagtgttaaaccgttcattggtcctacattgtgcgagccatacgaaaatgcgactagactcggtcgtggtcgcatcatctcactgaatctggttcaggggaggttcatattcgaggtgtctcatttacatctcagctcttcttgaggagcgtgagtacacgtgtctttgcaataggagtccggtctcgagtttttaggtgagaaaatctcactataacaattagtcaataaaatactaaaataatatctaccatctatcattcttcatttctatctagtacatagataatttaagtcatctagacactccattcaagcttaaaacaaaatcagtttcattggaaagtttgataaatagaataagactaaactaataacgactttcttcctcaattgtaccatcctcatccactagcatcaaactgagttcctagagtgagaaaaaataaggggtgagcttataaagcccagtagaaaaa

SEQ ID NO: 300083 - DNA, 2597 bp, Cannabis indica
ttactttttattttttaaatgaaaataaaattttaaataaaaatagtttactttcaaaagttatttaaataatttttagttacatattctatttatattttctttcatcgatattttaaaccacaactccataattggacctaaacctcaacgagagtcaaacccgaacccaactcttagctccaatgttggatccatctccaaactcctagctcaacctagacttgaccccgacccagcctcggtgacaaactttgctgggaacgaaaattggacccaaacctagctctagcccaaaccccaacccctgaatcctaatttggacccaaaccttggctcgtacatggactccaaccccaaagtcagactcagaccccagcttgaatctctagtccgtgacccaaaacttagactccgacctattttctctcacataatttaaaatataaaataaaaataaaatttaggtaacacttttattattaaattaaaaaaaataaaatacttatcaaacatgtttttgtattttaagagcactacaaagctaaaaaaaattaaaattctacttttattttcgtaatttaaaaaattaataaataaaaccttccacattgcaccctaaaaacgaaagaagtagaccatcaacattaaccctttgtaataggatttttttttttttcatttttatgcttcaaaacagattttttttggtatttttatggaattccacaaaaaatctctattgcaattaattaacagagcaactgaaatcgcaacctaaatccgtatatcaacccacataaaaatcccctgaaaaactaccttagaaactcaaattgtaaatttttgaaaaaaaaaataaaaaaataatatatgaagtaatttccttctaatattaagacataattctaattttttttttttgaatgaagtatgctttattaaaaagagcaatcgctcataagaatagacatcaactccataggcccacaattaattggaaagatacgttcagcttagatacgagaattttgggcaataaaatgctcggctcgattcgtagaacgcttaccaaaaacaagtgaaacatgagacaagttgttgagcattttcctgcattcttccaccaccaaaccgaacgcagagacaagagcagcaaagcttcgaatgggctccacacaaaccagtctgtcagcttcaatcaccgcttgggagaagttgtgtgacttaagccaactcaaggcttcctgaatactcataatctctgccaactctgacgaaactcttcctatttggcagccagcagtagctgcaataaggcctccatcagagctcctcagcacacaaccatatccgaatttgtgatcatgatcaaatatggttgcgcctacatttaccttgatgcctaaaatcgatttcgttcatagctccgcaccatcacccttttgaagaggggacaacgaagggaggttcccatttccttgagcttttaaccattgatcaagagttgaatccgcaaacacaaccacatctctcacatttcgagtacgatgattccagatgagatcattcctcgctgaccacaaagcccaacataacatgattacacagttctcagagtcaccatgatacagcagcaaagttctgtctaaccaatcaaggagtgagggagcctctctaccagccatagcaaaaccagaaaactcccaacaagtccaagcaaaagtgcattgaaccagaacatggaactcagtttcagcaaacacattgccaaaaaagggcagatgtcttcagataaaaccttcttaatgcaaagatttgtcttggttgagaggcaactggaagctgcacgccaaataagatccttagacttaggaggcactttcatagcccacattttcctcaaaaatccccctgtttctgtaggagccgagacaaaattctgctctttaatgagcttgtaagcacatcgaactgaataaaaaccatccttctcaactagccaataccaggtgtcttcatggacggcatgactaattggaatgcctaagatgacagtagcattagttggagaaaaaaaaagtctctaaccacatcaacatcccaatagaagttaccaacttggaatagactattcatagtgaagttttcttgtcctaggacaaaaagttctggtgtaggttggtttgcaacaagagccatggatcctcagtgattttcagagtcatacctaaaccaatacgttttctcaaacctagtttgacaacatccctcgcaggaaaaatgctactccaataaaactcaggtttgaccccagatcagcagtaagaaaatttccttgggggtagtatcttgctttaaaaattttacgaacaagggaatcatgaataactaagagtctctaaccttgcttatgaagcatagcaaggttaaaatctcttaagcttcaaaaccccatcccaccttcaaacttgtgctttgtcattcgatcccagttcatccatataatacctgttgggtttcgtgccataaataaaactcatttcaatataatcagatttacttattactaaagatcagaaataacattttatgtt

SEQ ID NO: 300084 - DNA, 2515 bp, Cannabis indica
cttgcaagaggaaatattgatccaagtaaagaaatcatggtactgactaaatcttgcccggtaagtaagcattttcctgcttaattgatgtcctttgtttctctgttgttgattaaatgtaaccatttcccacctgtgcatgcattctttcatttttactgtctgccactgttgattatgccatcttgtttagctatgctgacctttttaagtttaaatgcattatgctatcttgaatgtctgaaatttgtatgtttctatttgacatttgcgtatgtttcaatgtcggctagttctacttttgttttttaaatcacatggttttgaattgcggttgaactgatagagttgcttttgattttgacattggaggtcatgtcggtggttctaagatatgtgatgaatggttagttgtgattcaaggcatcccatctttattggctgggaaattttcaaacaactagttttcttttaaatagttatgaatcctaaaaaagaaagagagagagagagagaagaaaaaaaggagatgaagcattatgtggagtttgttctacatggagtcatggactaagagatcatgcccataatattacttaattactcgtcttttgacagtggaagcttcatatatttgagcttgaggaggagatgaagattgatcctcccatcaaatatgttatttaccaggtactcataaaatacatgacatgatacaaatccttccaattctctactgactcaaaagggagaaaagtttcttttttcagcattctgtggtgtctttcatcggttgaagtggaagttctaaatttatcattcttggtttggcttgtaattaaattatttcctgttcaggatgacaggaacaaaacatggagaattcaggcagtggcaatatcacatgataaatttgagagtcggagacctcttccatcggtttggaggggtttggaacatgacaaactctctgaggttgcaggaatcccgggctgtgtctttgttcacatgagtggatttatcggtggaaatctaagttacgaaggtgctctagcgatggctagagtttcattggcatactaaagtcagaatattttaaatatgtgcaggtaggatgcatggctattattataacatcatgagatatttaattggctgcaatatgtttgttcccaccccacacccccaggggaatttgaattatttttctttattgaatacatgcataattttcaatctcaaatggtgaaaatccggactggtgaaaatccctgttgcctttcgggcctcgttttctttagttttagagatttggagcatgttagagaaagtgtacacatttgaaatgtttgtaaggtgaaattccataggtgtcgtcacatacacatcaattattttcattcagttattctaatgtcattgtgtaaaactaatctattatttgtatatcattatattcacatagattttcatatcaagatctagttaattatgagattgacacatgacttcacaattgctgttagccatgatatattattgcttctattttaaacagattctgttagggacaaaaatttgaatgccatgaaatgtaactatcttcttcttaacaccctactcttcctcttcacttgtgattggtaaatcttctttggaccatgaataaagccctccttccaagtggtagacattgttatacccattcagaacaagcaagtaggccgctatcagtgatctgtagaaggtaccaatagtttgaacatctatgggaaagaaactaaattattatcgataggctataaaattatgttaccttgattgttgaccttctgggagattttgggttggtttcattgttcccccggttgagcaagccactattatctttgcatccttttttatttttgactccacagctatttaccaagtaccaattatgttagtccatggaaagaagttctcataaagtagtgtcgaaagaagtaggttatgattcatacttggtatgaactcagggttctcctctgtaccggcaaagatgccaaaaaatgcaaacgcagctcggcgagctatgtcccatgctgtccactcttttataagcctatatatttgtacattgatggcacctggtgcatgagcctaacatagaaaaccattaacttatactcaaaccccatagttttcattcttgctcataaattttttcatgaagagacagcaatggtgacttacatgctattagaatgaaaatggaatcttatgaactccctctctttccgataactattttttccgttttacttgtttcttattctaatgaagtgggtgttttcataagcagactaacctctttaaattctgcttcaggccgcacatcaagaataacaaagttattttctttctggagtctcagagcttctttagcatccacactccgtacctgcaagataggatttttcgggagcttgttaaatggttttgcttctaacccttttttgctcttgaaaacaca

SEQ ID NO: 300085 - DNA, 1304 bp, Cannabis indica
acccaacacctatgaacccttacaaaccaaactcctaagaaaagactacaatgcacccgaacaatgcactcgaacccgctcgtgcatcatggccaggttcaacccgacctgcctagtccaaacaattttcttttttttttccttcatattttcgggtttggctgagtcgggtacgggcgtgttgactgtctaggccagacccgatacaaatgttcagccttgatataacaatactaagatttctcatttcgataaggatgttcctgctgagctaatagaaataaaataaggttgcaaaattttgtgtttataaagaacatatacttaagagagctggacccatgcatattcttcattgtaagccacactgtactcacaagaagctttgcaagtatacacgacgattgttgcccaatcgagcgaatccacgtcatttcgcacacgaaagtagtaaagtaattgaggcaaaatctgatcattaacagcaaagataacatcagcttgcccatgttttccatgaaactccgaaaaaagtaataatgaggtaaaatacctggaattcaaaacgcatagggccactgcagtagctgcatttggggatgtcatcctttgatggtcgcccgctcgatgtgggccacagcggtttcgaatcaggagttttacaatacctattacatcgaaaaaacaaataaagcgataagcaaaaacagaactacttttgtaataacaaactctcttgtaactttactaggtttaaaattttaagataccttatcacttgttccggtgcccaagcgatgcgctcttcgaatgataaccaactctttctctcatcatcaccctgctcagtgacgaaacaagtaagaaaaaggtataatatttgaggaggcaaaattcgattctgtcttgcaaatgcatttctcacctcaaattccttcatcaatgacattattgtgtcatctgttcggttcctagggagcagcgtactcacggccccattttcatcgggtattcgtgtgtcgaattcatcttcatcctcctgtattacttcaagttctggccataaagtagtgcatgcaactacttgcaaatagatgaacaatatcagagctaaatttatgggcaatcatttcttatctcatatatataaaactttgctgagagtgaaaatggtaaattgaatatctcctaatatttatttcgctatttaggattttcacctcctgaattatgacctgtacattattgtatctcctgaatttttcagctcgttaaaaataatccctaaactatttacaatattg

SEQ ID NO: 300086 - DNA, 635 bp, Cannabis indica
taatcttaaattacaaaattattcttttttaaaatacaactcattgggcaccacaaggtcgtgcctaatagtatggttgatagtattaaccatctcaaatgggcactacatgtgtcatgccattagatcagtcagttggcacgatattatttgttgtgcccgttaaagtttttagacacgaacctattgatacaaccaaaagggcaggacaaatcatgccttcgtatccatgggcactaaaaattgaatttgttgacactaattttgtcatacgaataccattttttgcttgtaattaaatggaaaagatagctcttgtgacaaggattacgtttgtacttatcttggcgggcggtaagctttgacagtaatgaaaaatggccataaattttggtagagccaagaatttccaaacattatctcttgacggaaaatagtgtgatcaggaacgaagtaactccaagattgagctcctttgttgacaataatcggctggtagtgcttatgagggcttgccgacattaatggtgtagggtggagggctggccaagcattttggggactcgtgcaaaattttaaaattggactctttaaaaaaaaaagaaaaccgtatacattaaaactacaattctatt

SEQ ID NO: 300087 - DNA, 2295 bp, Cannabis indica
attgacacatatgagggtgctagacagcactggtaccttttagcatttctcttaaatttaatatatgtattgataagtttgaggttattatgggaaatgatttcagtaatttagatataagttgttaaacgaatagaaaaagtgtttaaaaaatgtaaaggaatgatttagtttaattaaaaataataatgtaattaaaaaaaaaagggtctcaaagtgagagcaaatgtaggtgatattttctcactttcattctacctaaattacttctacgttaaatgggtatttattaaaaataaaaaataataaaacaaaaagaaaaaaaaaaagtctccataaaaagggaaagaagcagaattttttattttggagagtagttttgaaggtaagaaaaaaaacagaagagaataagagggagaaagatttgtgcagaagattctataaagataaataggtaaaaatttctatttttttgctcttcactctaatttttttttttctctactgaattttctctcttggttaactttgatttaaatttcattagccataaaaggtctttaaaagtgacatatagtcaagagatatggaggaaaatttcacttttacatattgctaaaaataatctaatatttttttaaggtccattttgatctaatctttttgagtgacaaaagatatataaaaatgagatataatccagaaagatatataaaatcttttaaaaaaaaaatcaatactgttgtgctgctaaaattattgcaaagtgtggatttgattttttttaacgtatgaaaagataattagtcaataaatgttcgaaagttgtaaaagcattaagatatcctcactcgccgatataatagtcttccgtaaaaatatttgatatggaataaaaatttcttgtaaatggtgaaaatttattcggggtagtgggaactattttttttaactttgttattgaggttagtagcttttagtatccttcataagctattacattaaattatatcaggacttgatattaaattggactaataacaataggagtatgctcaggaccacttgtgttaatgtgaggctatgacccactaataaaaatattaccttttaaaaaattaaatttattttttttaatttaataattatagactaaaataatgaaaaagtcccacaaaattaaataaatctagagtgattataatatatgtataaatattttttgataataaataagtgctcacaaagtaaaaattctaaggcctttactgaatatattaggtactattggtacttattaatattttttatttttttttattttatcttgggatagtatttcttctaacggtgaaagagccatacattctaatggtgaaagagccatacattcactcattcattattatagatataacaataaatatgtatatgtattagttgaatttagtttaattaatgaaaaatgatgaagcggaggcgagaaatgcgtgagggcagcagagtccacatgagctgctctgagaggctgtcggcgacagcccatgcaacacaacgaccaacacacacaaactattaattattaattttcaatgcaacaatattattatatattaacaaatattcaaaacatattaatatactaaatttctattttttcatcattggtggccgtgctcattattcttgttaaatttggattttatgtatatacaaaagtagacgttggcatgttatattttcatattacttaatttgtttatatctttttattatataataaataaaaatgcacattttttctaatatacattgcatgtgatgcatcgtagagtttactattagaaaagaaaagaacttagaccatctcaaggtgtataatttgacttaaatttagcttaaaaaatgagtcattattatgttctaaattttacaataagattctaatatattagaatattgttatgaggtactaatggtgtctaacactgcgataaagtattgctttatgataattagttgatgattttatataatatttattaaagtaaacaaataggacccgatattgagttgtaccaagaatgatattacacctcgtaagggtgctaggcatcatgagtgccttttatcatttctcaatattagataggggtgttcatccaattcaatccgcacaattttgctcatagtgcatccgatccacactaataaggtggcgtttggttgagaggaatgagaatggaaatgagaatgagaattgaaataggaatgtaatagaataaaatttaaaat

SEQ ID NO: 300088 - DNA, 2134 bp, Cannabis indica
tgcctcttccttttgcacaaagaattgtgctctttcattaaattcattaatgtttctaatggggcgaccctacagatcataccatagttctcctcccgcagatgataggtcagttgtaattccagcctgaagagctgtcaaatgaatgctatcatttagatttcttactttggctgcttctgtactaaagagactcaagtaagcatttagggattctcagtttgttacttgatattagtcagcgaggatgccttacgcttcctgtcccttgtagcctgaaattatttcttgaaaccgttggatagttgtttccaagaggttatggaatggttggtgaatttatcgaaccaaactactcgttgctctcgttagagaggttggaaacaaaatacaacggaagttgtttgaaacattactttctcgcattattttgttaaaatttttcaggtgtgtcacaagatcagttatcctatcatactgtgcgacgtgggggttctaaaatctctggggaaattgagaattcaatatgtcaggatgaaaaggcttttcctctaattgtagtacccttaacagaatcagatccatgggttgttgctggactttttgttggtaacctgcattctggtttaatcgatcacgaagatctagaacatttcgattcaagtgctcatgcaagtctggttgtctatagtttagatggtcgcgtagatgagggtcgcgctgcctctcgtttctctcatcgtaattgcttactgaccttgttgcagaataactctcagtttgataactttgagagttattgatgctctcttgatcatctcaataatagtggcgtgaaccctccccatctcgtgcttgcctctcatgtgcatgggttctagtcgatctgctctgcccatgggtccttaatcttgacccgctaggatctatactcgaccttgtttcttgaggatcttcttgcactggcctccatctttggaatagatttggcatgcgtcccctacttaattaaataggtttacatgttgtccctatcgttgttttttggcctttgaaggtgtctcagtggtcagtctgatcttagccgattgcctacccctcgcatcgtgctgagagaattcttgattccaaagttttgtttgcctagtattcgtattcatgcgagatgattctcaattctcaggttgtagattcccacaattttcatatccagtggaagttcttggattgttgggtcgagtttcttgatttccactgtttcctggattttgggggatctctacatccactaggatgtccctcgtgttctcaagttggtcctcctgagtattcgtgggatttctaaggttattcccctaggagcatccccatatcttctggttctagagcctcttggtcttcccgggggtcatctagtagatgtgtcaggttggtttaaaggggcatcatcttgtgcagccctcgcggtcgttgcctcacactctagttttgcattttttttgattttatttagccagtcgctatcgaagtttcctatattctagttctaatagtagaacatatcttgtgggatcgtaagcatcctcgctttgcctctctgggatttcctccccagtttgttcaaattctctaccacttcttccagaatggagagttttaatggtattttccctatgagaagtttgatgctcttttccaggacgttgagttgtctctcctggctaattcacttcatttcaaggaatatcatctgccatgaatggacaatttgaatttgtttttaaggagtgtgttctttgagtttttattacaagactctcaatgaaagcaccaagctgttaatgtagattttcattagctaataaataaaccttttgtaataaatgaactccaaaattaattaagcaataattaataataatagtaataataaatgtgttatcccaaaattggcactctgacgtgccatcacaagaatggtgacacgtggcatctacttagagcacctggtcagatcaacatgctgagcaggatgcctcgctggcatgtccatgatagaatactccacgaaccgtgcagaatgagcaacacttagcgaattcaaccaagcacttcgtgagtcaccagctcaatc

SEQ ID NO: 300089 - DNA, 1860 bp, Cannabis indica
tattagtcaagacataaaagaaacaaaaaaaaatggaaaaaagaaatggaacaaaagcatttaccttcaaagtcttcttaacaggtaactgaactttaggatcgaagacttcattatgcggaccagtcttcagcaaaaagtctggttttttcacatagccacacccaccgttggatttgaacattccatgcatcaaccagagtgacctcccatatccctagagagaagaaccactagaatttttttagcaaactaaaataggtatgcagcacacgggaaaatcataaagctaacttatgcagctactatgtaataactgaatcagatcagtataagcgaagaagattttattgaatactgttaagagactttagacttcacatgcttaatttacctgcatattaaatgcaaccatctgagctccatgcgaccacccaataagtgggttataattcgatgagtcaaaacgtgttcccttagggtaaactctcaaaatattacgctgggtaaacctgtaacaaaagagaccaaaatctttatagcttatatccaaaactcattagtcgaattttgatagtagattaaactgaaaagccattatcacaatttcctagtcccaggagtacgctaatatctgaatatggctccacagtaaccattctaacaacttaactccaatgtaagaccttttgttgactaatggctaatagtttaaactattacaccatatactatactaaactattaggagcttctataaactggtcaacctttctgcttattcattttttttcagtttgacaaaacaattcagatctttacggagacaaaattttgtattaattagaatataaccataataataatcaatctgaaaaaaagtaagcaccgaaaaaatatatgaatgctacattctcataatgatattgatgaggtatacgtaataacttaatatcccacaaattatgagaaaatactgttaataaccgaatacctgactatatctttgccatgagtttctatggccttttctagctgttgctcactcaaacttaatcgccgaaccttgtcaggatcaaccttgagaccttcatctagaccacccttaggcttcccagcatgaattgcaattaaacgtctatattcaggtgcttcattttgcgagccattgggatctccatcttcttcatcgtcttcattactttcttcatcttccaaatcactctgcgaggaatagcaggttagaagtgctgatagattgaggcaacaaactagcaaaactcatatataaaaactctaccaaccttggcatgtcctagagattttagatttttgacttctttaccccaagcttcctcatcactagcagcctttcctttctgtgaatcagattcattttctttggcgtctttggcctccaggtattctttaggtggtttggttgatatgatgattcttttcttcagtgattctggagaaggaaattcctttaggcactctgtcccaggagaaaacagtacatctccaaatgtttgagtgaccatctaggattgaagatagaacaacatttagtaaagacatatataacataaaccgaaatccaaagaagaaataaaactacagtcacctcagcaactttagcttgaagatccggagtaaggtgatcttctagtgttattacaacaggatattcagatgcaacaaatgcgtactcctttatagacttcaaacatttgaggagttccactggagtagtcaatgtcctacattaagaaaagtcggtaaattaggaatagcatccttaagtgggaattcattaagacaaaagaagatatttgaaattttgtagttttttttttt

SEQ ID NO: 300090 - DNA, 2398 bp, Cannabis indica
aaaatagcctaaatatagaaactgattatattttaataatagaaatagtttaaaatatcataactcacgcccataaatacaaatcacgccattgatagcgccatctcgcaagtcatagttgactatgaatgacaacgaattctgcagttcgatcgacaccaacggtagattgtttataaatatcatcattctacacccaccaaattgcagaatccacaaatagatttggatacgaataaaagcacatagaagaataatactgcaaacattgagaaatttgctgaagcagcctaaaatatcaaatgcattatatcctagagaatgtggagaaccagagaccaaatagggaagaccaagagcaaaataatgcccatagtgttggatatcccatgagtttgagtgaaggagtttcggaatccgcctgaggcccggatgtgctgctgaagcagataacagccgatgatgaggcatatcagaacaccaacccaactgtcccttagagtgtgtgaaaagaaatttggagccacaaccagaagaagaatcaatgaacctggcaactccaaccaatctgcaagtaaccaaatatgtctatgagtttctgttatggaattagtaacccttttgagaaagaaatatgacatatttctaattatgtaaatggtgtggtattattctagagcattgaaactttttgcatttgaaaaagatcactttttttttcttcttttctttctgaaattttaaaccctttttaggtggggctgtatagacacataaaagcctgaagatgaatataaagtttgaactaaacggatatatataccagggaagtgtctggggaaaaaaagtcttagcacaactgtaataaaagcaacccattttccaaactctccactgcataaaaatgaagtaacttaatcattagttaaagattgttgtacaatcaaaatgtatacttcgaaaattacacaagggaaagaaaagagattgtcatacctcagaaaatggaacagtactgagggaaaactgaagaagatgtaggggattaaaagtgaggtcaacatatttgtcttccaatttgttcgatccaaaatcaacaagtatctgcagttaaaatggaaaatagttattatgatcatgtgaagagactacaatcatggtttgagtatgtaataaagaaaagcctttgtaactcaatgcaatgtaaacaagaaagacaatgaaaccaaaaatatgtcaaatgacatgaaaagaggaacaattggctttcactaatcacaatcttaaaagggttattgtttagttaaacaattgctacaaactagtttaacaacggaatcagataacatcaatccaaagttgcagataaaaaaaaaatagcttttaaccactttaccattgaaaagtcaacaaaatctttaatttttaataatggataacccaatcaaccaaatatcatgaaaaacaggaactttagaattgtcactttcccatttaagggcacactgaaaacagtgcactttttttctacctcaaaaattgaagaaacatatatactcaattatcaaacacacataacaaaaaatgggtattactaaaatcaaatcagtatcaattttgtaaaaaatgaaaactagaccaaagataaaggtacttacatggcagcaaaagaagcgacccatttgagaaacgaagtgccaaatcccaacccaccgagcttagtagcatgattaaaaagctttttggctgcaatctttagatcgttgatatcagaatcgatcaattcagcggttacttgatcagtcttcatagccaaatgatccctacccattgcgattttcagatctgaatactgaattcagcaagaaacaacaggaaaaaggagagaaatcagatataattgtttgattggttcttaatttttcgttgggaaggaaagaaataatatatatctacgtcgagttatgttgtgttggaactcagtgagtcaacccgagaacgtgagcgaagctctcgtttcggatcccaatccaaactgtattgagctggctttgactgttggaattacgccacctggccgcgccaattggggactttgctcggtgtaagcaaactttttgtccacgtgtgggtgtgagagttgcacacgtggtccaatcagagaatgtcttttttggatgtaataatatgggctctaaggcccaattatattaatcaacttttaatttcttgggctttttagtaagtgaagtttattttgggataattacacggaggcacaatttttttaaaatatagggaaatttacatggtatactaatttttgttatttttttacaaaaatactgtcagatgatattttttacttttttactgtatttttttataagtttcatac

SEQ ID NO: 300091 - DNA, 1464 bp, Cannabis indica
cttgagcgccattcggcggtaagcgcttttgatttcctgatcagtcgagttcctagaaacgctaaggacctcataagggtcccgccgtagctgcttcgcaggctcatgcttctctgatttcgatctatgcgccggcattgtcaaatccgccggcaattttcacccctaaaccctaaattgcctcctttttaggccctgaaatcggtcaaatatttaccacttcaaaactcaaaatttcacctcatcgtctgccaaattttccgacaagaaatccagtcctttcaagaacacaagaacaaccctagacaaaaaccacaagaacagcgaagctccatggagcggagctggagttgcgaggagagagagaatccccaagggaagagagagaatgagactagaggacaataaattggaggggaattaggtgtaacattgttgtttttatcattaaaaaaatataaatatcttatttatttatttattaagaaaaaaaatgaaggattttgaaatgtactgatgacgaaggatgcgtaatacgcattaggggatatgccatgtcactcacgcgggcagtcgtgtctgtcttgtgttttacattttaaggtgtgggcgtagtgcgcatcctggtgcccgcctagagtgaacatagaagaaagagaggagaggtggttgtttttttgattcaaattatgggcccaattactaaccaatgctgaaaagttaagtataaaatcgcaatcaatggggtgggaactgagagggaaatctgacctcaaacactcactcagtatttaccaatttactatatatacttttttccctcttcttcaaatgctgatttattaagacaatatttccttgcttttcctttcgggaaaaatgattataaccatgactggacccagctaagaaaagtttgaaattatgctgtaactaataactatatgtggggtggggatgaattttttaatcaccaagatacactttgatgtttttgtaagataataatagtaattctacaataaaacaaataataaaaatatatacagttgtggactgtgtaatgacctgacagctgataaccttgtcatctatgttagacaatgcataaaagctgctcttttgtcatttattttttaataaaaggaaaatactagtttaattttctttacttgagaaaaaataataaataataggattgacattttgataaattattttggttaaacgttacgagatgttctataaaataccgaatcacttgaaagtttgaaggatcttaaatgagatcaacacattgggtccccttcctgcaatttaaaaaggaaaatatgtagttaaagaattaaggtcgcgtttggttgaggaattggatcacattcaatggatttggacccattcgatctaatccaattatttattagatattggattttgctatccgatccaatctaattgaattga

SEQ ID NO: 300092 - DNA, 1214 bp, Cannabis indica
agagagagagagagagagagagagagagagagagaggtttagttagaggtgattatattgtgtgagttatttaggtttaatattaggttttcatttaaggtattctaaatgggcttgagatttgttatgctttttttaagtaatttaccatcggttgtgcaccgatgcaaagtttgtattgatgcgaacataacacaaaaaccctgtaactaacgctgaaaggtgcgtctaagcaaaactgacacaaaatttgactcctgtaattttttttaaaaaaatttcatctttagcgtcaacttttattttattattgaagtaacaactgatgcaaattaattattattagcatcggttaacaactgaagcaaaaaagtgagtgttgacttttgcatcggtcaacaaatttgaccagacatgttgaccaacgaaaaatttctttgtgtaatagtagatgaatcttgttatctttgacccatccgtagtaaaatgagcataactgatgttgtagaacttaaattcgcgcaaactttatactgttggaaaaggtcattcaaagatctacaaaagccatgaagaaacaatcttcaaattcatcctctaatagcgtctaaaataaaggccaagtggcaagtcttagaagttacaaaaattcattatcctccattgttgattatgcaaaatcacaaaatgatttcgaaactagagattttgattgttagaagtttatggtatttcataatcaatttagaacaataagagaatgttttttttaaaaaaaaaaataagaacaagatgatattcaagattcatattcatgggatgaacatgagccttgataatcaagaaacaaaatatggaacacaaaatgaattaaaagatataaataaaaaaagtataatgaaatatcacaataatatgaattaaaacagtaggaaaaataaaagtatgaacataattaaatagagaaatatacaaagattagggttagaaagttctaactcaaatttgggggaatcaaagactaatgattgttgtccaaaatctctagtcttaagcctccatggatgattggaacttatctcaaagtaggagtgagaagtgggatatataagatttgtaaaactcaacaagtcaagcatttttgatgaagtttcttggagaaaacaaataaccaagttagagagagagagagagagagagaggagagagagaga

SEQ ID NO: 300093 - DNA, 1641 bp, Cannabis indica
taagataatgatatgtctatgtttacaatttacactaacaaaagtttcatttagtcacaataaatttgtgacttaaagtgaaaaagttgtgactaattataaatcataataaaaaattcgtagttaaaggtatatattaattagtcacaaaagttataatttattgtaatgactaaatgtatttttaatcacaatacttattgttactaaaactaaattagtgacaacttgacttgtatctaaatacttttacaagttattttttattgtgactaaaagtcacatttaatcacaaaaaatttatgtcgtgattaaaaattattactaaaggtagcgttgtattttgtagtgttagtctattttacgtaaatttttaaatttatatgttcctattttaatataaaaaaatttctagtctttttaaattttttacctttcaccacacatacacattttagtattttattcattcatttaacactttccattccatatgtatacaacctatataatacactttcttgttaagaaaaaaaatttcaaatttaaactaatactcattatttctcttccatgaatcgtgggatcaaataattctgtttaacactacaaaaacaaaatatatttttaatttcaacaaaatttgtaactaaaaataaaatatttgtaattacttaaaaaaatcataaaatttatgttataaataagtctaaaaatattatgaaacaaaaatcataatttatcaacttgtatctaaatattcttctttgccagtacaagtaatttttttttattattttgactaaaatgatatttagttacaaaaaaaaatttatattatttactaaaacttctatttttagtgtaatatatttcaaaataaagagaatatttaaatataataggtatatgtcgagtattaatttaacctacgttctctgtttttcacatgtagagaaattataacatatttttttcgataaaggtgtatattatagttataacagttactaatttaaaaaaaaaaaaaaaaaaattagaatgataattacagtgctttaaaccttgataattttttttacatgcataaaaaaaatacaaataaaatcacgtgtatatgcaaaattaattatattaaatttgtattttagtattgtaaattattcaagaaataaataaaaaattaataaaatatttactataactaacatatattttcatataaaaaaaatgggttataaaccctagtggtatattatagttgaaaatgacaatggcctctgtagtataatttttgtaaaaattattagtcaaaattatatacacgacgtgtaggaatgtagtgtcaaaaagtgatcattgcataatttgtgaaagaatttagttattgtaaaatagtattgttagtatattcaaaaaaaaaattataagcgactgcggcacgtcttataattaattaacaatatttttttaaaacttattgtcttaaattatatgagatttgatatttaattacactataataatatattacaaaaaattactacattttgtgacaacttttagtcacaacataattttttggtgcctaaatgtgactttatttagtctcaacaaaaacttacttgtgactaaaatata

SEQ ID NO: 300094 - DNA, 4888 bp, Cannabis indica
aataatatttattctttatttttgtattattattttagtcaaagtctttaattaattatgctataataaacattagcatttccgttaggttgagtacttcttttaagaaatatatttgataataatattgattaacatgtatgattaatattgcttattatttttgtcaaatgtatgattaatacatttgatctattaaattattaatcaacatgtataatacttcattcaatttatgtatataccattcaatttatatatattttttttgtatcttcaaatcgttggatgaaaaaagaattactctctcctccttgattgatcccgtctggaaaaaacgtgcgttgatcaagattttcagaaactgattataatatggttatagatgatggaggattggtgacgttaatagtgtgcgaattttaaaagaaccatggcaacctcgaccaatatgtttcaagatttatgacaaaccaagtttgccaaatagtttatatgtgtttgatttaaaaatgtcaaacgggatgtgagatgagaaattcatttagaatacatttaatgatgaggatgctgaaatgatactaaagatgccttatacaaaaggggagctggacgataaaattttgtagcattacagcaaaaatgatgactactctgataaaagtgggtatctaatggcagctaaattgaggccagagcttcatcaatctgatgatagtcaactagttttgtggaggaggaaattatggaagttaaaaattctgccaaaagttaagcctttagaccacccttgtttaaaggctttttcacagtttcccaattagaccaaaaaaataaaaagtctatctacgctcttcagcaatagaaaaaagaattcttaggcaagtcctctaatgcataggaagaccccgtagaacttacttaatgagtgtcagttttctagcagaggatccaaaatggtccttctcggtagtattccactgaacctggccaaccaattttgagcatcaaaaacctcactagctctgtcttgataattaaacatagcattaaaatccccaagcacacaccatttggtcaaatagctgaaactagaaagcttgtcccaaagaactttcctttcaaacaagtggtgaaacgcatatgaataatttaccaataaataaacaggacttgcattatatatttatttgtaacgtctaaaatcaagtggcaactactaatagtatgaaaaaaaaaattagcaaatgaaattaaataaagtcaaccatcaaatgacaagtggaaatgaatgatgatcatttagggtttttctttcttttgttaaggatgatctaggtatttcatgatagtaataataaaacagcttgatcatatgaaaggaatacaagtgtagccaatcaaatgaaactttgttcgtaaaaatgaaaaacataaacaaaaacaaaaacaatggttattagtatagtttaagttcacattaatttaaacttatcaacgtgcgatcagaatgctcatagatttaaatttaaatttaaattctcagagagattagctatggtgccaagaatgctcatagattattgtcccaagagtacggcttcacataaattgaatttggggtataaaaattgaggatcattttgtcaagaaaccatgaaatttggaactaatgatgaaatatgcctaacatgtattatggttgccacagaaagaaatgaatgaagcaactgtctttcttctcttcccgtcggatttaatttggtcacaatttggtttggctcaatgtcatgtgtgaaaaaccaaaagattactcgacttcaaacaaggaatctgccttgcaaacatacctaatagagaataagtacaggacttaccagaaccattttgctagtctgtggggcatcccaacttatgatacaacaccacacctaacattctacaacctaccgtagcttaggaattcgtgatattccaacttctttccatgtaggaaggcataggagcatccagtttgaggctttctagttgtgaaagatcatagtctgaatactgtcccagattttgcaaaacttgagttatgtttggcaaaaccatttgtttacagtgaagatgtagtcgaggatgtttctctgaaatacttccattgtgcatgttaatgccaaacgggaggtttttcctctttggaaactcttcatgttggctctcaacattagacaaacttaaaggtttcaagtttctgtgagcctgccaaccatatttgtagtctccaactattggtgtccccaaaacctcagcacaatggacacgaagctgtggtatccgcacatgatttaagttgttatggggaaaaataagtcagtaaccaatggaaaaagtttgcagtcagtcatcaagattattaccgagttgtgattcatacctggtgctttctacccgtaagaggagagagctctaaccacgtgtaacctgcataatgaactctagcattagaagaatactagttatatgctaaatggtgttagcatattaacttatagtctactactgtttctgagccaatttcctaaaccatcattcaaaacagctttaactatgtgagctttagttactattgcttctgatctagtttcctaaaggttatacaacaatcatgttttgaatttgaataaagtttgtatcctaaccttgagatgatgatccgatcactttatacttcgtaactgcatgctgagatgacaaactttgtgaattgttcacaactgtaattcgctcggactttccgttgtccaccaccacctgaaaagaacccatttaaaaacttcagtaaacgcaacacgtgaataagttcataagaggtaaactgtcatctgttacttgcaatcctccatcaagtattggctatcttgacatccaactgatgagcattagctaatgcaatatactaataagaaaatgcatttattcttttatgctttccttcttccactcttttaatgtattaattctctctattgagccctacagtctgtgggaggtaggaaactctagcaaattgctagtaaggtccccatgaccaattggaaagcaaaatgcattttatcgtatcagggaagtgctgtctaaataatgagaatgattcagcagtaaaatgacaatagaaaagacaaaaatcaatacaaaagctcaaaggtcaacattttcagaaaacattcaacagctaacctttcccaatggagctgaaactaaaccctttggatgtctcggagatccaatgacaagtgcccaataccttctttccagaactcttttttcattagcagtttcctttaagacccaaaaaattaggagaaatcagataaagactgcagaattataacacacctaactaccttgacttctcattaacatatacattttttaccagtgacaagcacaaacatttctcacatttccagatgctccaaatgtcttctctcggaaaatcgagtgcaaaactgttgcacttatttgtgtacgtcccatgaccaagatcccactacaatctctgtcaagtctgtgtacctaatggactcaatgttcataattataacaatgaagtcttttcaagcaaacaaatggtatgttaaattcataataaactcaccagccgaggggattctgagcagtcataacttaagcaagtaatagccagttcatctaaacttgtcttgattccaataccaccctatccaaccatatacaaaccataaaactaaaaaaaccatacaaaatcaaaacgaaaaacaactaacttcaaaacatagctaacctgaacaggcattcccggaggtttattgacaacaataatggctggatcctaattccaattcagcacaagagaatcaaatatttgttatgaacaatataccaaattaccagtacaagtaaaatacagacttaagtccttgaaaaccttatatagctcaagactacggataaagttcacttcttctccattgcaatgcaactcttttttctcaacagggacctcttttacagtaactggaagaaatattcggtcccccaagttcatggagtctttagctgtcaccttcaaatcgattttaaacatttacagcataataataaatgaaaaactcatatcagtaatcaaatagatatatgaatcaaaattctgatcagttacccttttaagtcgaggtttttgtaaaagagcactggaatcagaatcttctatgtttgaggattctcttcgaacctgcaacgacacaaaaaacataaataatggcttgatcacacttgaggagccatgtaagaagctttaccaacctgtctgagtcgaaagagcttctgaacaaggcttctcggaagctcggggcagcaccggagaatccatttcagcgctgtcgttgaagcaacgtcggtggctgattcttgagttttggaatctttaatggcatcctttctcgattccgaccacctgccggcgatctccttacctaaagcggcgccgtttactgtgtcagtgtacgggggcaaagtgaaccaatttgtatcattcttctcgccaggcttttcgtcttgcgcaaaggattcgggtgtggcagtggaatagcgtgaacgccaatgattaatgcctgtgttacagactcttgtactgcataggtcggcggcgttcgacggccatcgaaggaggaggtggcggagagggttggggttcgccatttttgtggttttgggcttctgatagatactaatacaatggggctcgattaatgggccgggccacgaattttggaatattatattgggattatttcacaaatacagaaaaacaataaaaaaattacaaaaatacggcattacgaaattttaaacattttta

SEQ ID NO: 300095 - DNA, 2749 bp, Cannabis indica
tgccacctccgccgttgatgctcttgttcattccggttctcttgctgcttcttttgattttcttagctttgtcgcctgtggcccagctgcctagtgctgtcgacacccgactttgattatattatattttatgaacaaattaaattctacctaatcgcatttctttgtaaatatgcatgcatcgattccttttctattttcttttttttattattattaattttttattttcaccagtaatatttcttctttgttcctctttcttcttctgatatacccaatgcataaagggtaattgttaattatatgatgaaaatatgagaccttttctttgaattcgtatagagattaatatattaattattatagtacataaccaaaatctatgttttttctcgagtatgtagtgggtactaatatgtatttgttgttaaagaaaaagtcttagaacaaaaaaaaaaaaaaaaagtttttcgttttctgtcaacctcatatatagtagtatataagcacattgtttacattcctttagtgtataggtttattcttttcaagtgttataaagttcaatattttgaaatgtagaatatacctttagcagcccttattttatttttatgaaaaatatctataaaagaatgctgggctttctcaaggcattacagcgagaatcaagctaattgtaatattattgttacacaatacagcaaaaaaaaaaagtactattacattaattaatcttttatttaattctccaccaaactcaccaaacgcgtctctttgtattactagcaaagaaataacaaaaaccaggatatatattttccaaaaaatttcccattaaaaagttaagaaaagaaaaattaaagtcaaataggacggagagcacgaggaaaaacacacacaaaaaaaaaagaaagtttccctgtctttgtttgtttttgttagaaaaatactaaaaaaaaatatttatgggttaatattatgagtatcgtataatttaaaaaatagtttttaaagaatattattagtcaattggcgacatgtaaaaaatattaggaaccactaatacttaatataagcatgtttttttgttattatttatctactagtagattattttaataatttatattatttaagaatgatttgtttggttgtaattgttggggtttcgttttggaacggtttgtaaattcgaatgaatttgaagccgacatgcaaggtaacacgtggaaggagatttggttaaattgggaaggtgacagacaaataaatggacttaatttagtttactattactaggggcgtcagattcatgcatctgtgtgactgtatctatgtagatatctatatgaggaagtttgtaagtttgtactagtagcagtagtactattactactgtaatgataatttggttacttttttttatttttgaatagaatttggtcaccttttttggttggtttaaagttttctccaggactttgtttccttttacatcttttcttgttcaggttgcgtgtatcagtcagcaccactggcctggaatctcagaacctttcctttccccttattaattattacaataaatattcctctatagttgccaatttacagttttttaattttgacgttaattattaggctagatttacggctattttcacctatactactttattgtggctagctacgttaaacaaggacaaggctaatattgtcccatcaaattgtaaatttccaaaactagaactaataagtgcattttaccacccctatactatattaattgctctctgcaattttgaaaactccacgctggttttcaaaacttatttttttctttaaaaaaaaaaatcacgtggtgtgaatttttttcccaccctttcagttacttttatttttggtaatcttggggaccacgtgtcagtcataggagtcttgtacctctacatactttaagggtgcatttggaaagctacattgtaattggatttgtatgtaattagaggtaattacacaatttagcatgtttgtctgaccatgtaattacagtgtaactgtgtaattggaagtaattgaggggttccaattacactctcgaattctcatggcccatatgagaattggatgtaattacactgtgtaattactaaaaattttctatattaaacataagctactaaaaaatattattttcccatgtaattactaattattttgccaaacaaaatattaggaattcatatataattaccacctcatatccaaacacaccttacattttaaaatatagtgtaattactaaactttgtaattatcaccctagtaattaccctacctagtaattacacagttacttccaaacataccctagttgtatcatctgtaatcaccttaaagatttcctatcacacaaatgtcaccacctccaacaaggaccaaaccttgcttgaatcccttttaatctctttcaagaagggctggggttcgaacctttgacccaaataagggaggatgctaataaaggcaatttattttacattgattttatttattatgcatcttaggtttcagtaaagttagtgaggtaaagcttagctattatatacatatttttaagttgatggaatagtttttaactaaatgtagagattactatctattaagcgaaaaatattttattatttttatttaactttttttacatatgtatgtgtataattattatatttttcttttataa

SEQ ID NO: 300096 - DNA, 3837 bp, Cannabis indica
ataaaaatcaaaacataagggggtttcgccgcaaattgctcttatttaatagttaatagtaatttttataatattaatatcacttttttacgtaaataaattttaatgggctcgtttggtacgacgtattgtattgtgttagattaagttgtattgtattatattagtattatttaatacaatacaatatttggtactgacttgtattaataaattgtgtaaaattataatacattttcaatacaatcgatcctaataccaactacgagtccaggtctaggtctgggttcgggtcccaggtctgagtctcagatccgggttcgggtcggggtctcgggttcgggttcgggtttggggcccgagttcgggttctgagtcccgagaccggggttcaagtccaggtctgggtctgggtctggggtctgggtctgggttcgagttcgggtcccgaatttgagtctgagttcgggtcgaagattggtgttgatcccaaatcttttgtaaatattataatacaagctaatacagactatttattatgtattaaataatacaacatacattgtatttggtcgtaataattaatacacattgtattatccaaacatagtgttatttattatttaatacaatacgatcattatacagcgtaccaaatgagccctataattattaaatagtgattaaaataataaaaaaaatcacactacccattactttcctatgtatataaatagattattttagtagtatctaacactttttatagataacgccttataattggttagtgatattttttaaaaactattttttaaaattatacaagactcgctatttcattacaccaatattaatacgaaactgagaagaatgattgataccaataattttttagcacttctcgtataaatatcatgtggccccacaaaagtgttttacatgagacattatcctatccacacaatctggttgtcccataatctcttcccaaactcaaactcacagagatgataatgaagatcagattccattccactaaccataattttcactcactttactcctctccacaacaacatgcttcattggaaaataatgaaagcttagcaacaatggtgttgataacatcatcatcatcatgacatcagtccttaaccaaacccatcttttatttcccaccaaagaaaccccacaattcaatttcaattccaagctccaagaatgcatctcactgcttaaaaaatgcagaaccatcaaagaactcaaccaaattcatgcccaaattataaagtttggatttttatgtgaccccttttgtgcaggaaatcttgtggctactactgctctttctgattggggaagcatggattatgcttgcaagattttcaggtgtattgatgatgatatcccagaagctttcttgttcaacaccatgatcagaggacatgtcaaggatatgaattggggtaaagctttgttaatttactatgaaatgttggagagtggtgttgagcctgataattttacttacccacctttgcttaaggcttgtgctaagttatctgcaattaaagaaggtataatgattcatgggcattgctttaaacttggattacaaggtgatttgtttgtgcaaaatagtttaatcaatatgtatggaaaatgtggggaaattgaacttagctgtgatgtgtttgatcaaatgcttgaaagaagtgttgcttcatggagtgctgttatttctgttcatgctagtttaggtaaatggtgggagtgtcttaagctttttggggatatgatgatgagtgatgaggaaagaaggtttagagccgaggagagtgtgttagttagtgttctttctgcttgtactcatttgggtgctcttgatttgggtaggtgtactcatggatacttgttgaggaatattagtggaaataatgtgattgtagagacttctttaatggatatgtatgtgaaatgtggttgtttggagaaagctttgtgtttgtttaaccagatggggaagagcaagaagaatcagttgtcctactcggtgatgatttcggggcttgctatgcatggacatggtaggaaagctttagaggttttctctgaaatgcttgaagaaggtttgagacccgacgagattgtgtatatgagtgttctgagtgcttgtagtgatgctggcttggttgatgagggtctaaaatggtttaagaagatgaaaaccgagcatgggatcgagccaacagttcatcattatggttgtattgtagatcttttcggaagagcagggatgttgaatgaagcattcgagttcattaacagcatgcccataaacccgaatgacattatatggagaagccttcttagtgcttgtagagttcataataacttggaaataggcgaaattgcagcagaaaatctagtgaagatgaattctcagaaccctggtgattatgtggtgctttcaaacatgtatgcgaaatctcagaagtgggataatgttgctaggatccgaaccgaaatggcttcaaaaggattgacaccaaatcttgggttcagcatggttgaagtgaagaaaaaggttttcaagtttgtatcacaagacatgtcatatcctcaatgtgatggtgttcatgagatgattcaccaaatggaatggcaacttagatttgaagggtataaaccagacacatctcttgttttgcttgatgtagaagaagaagagaagatagagagattaaagtatcatagtcagaagttagcaattgcttttgctcttatacattcttctagaggaagtcctataagaatagttagaaatctaagaatgtgcagtgattgtcacacttatactaaacttatttcagttatctatgaacgagaaattactgttagagatagaaatcagttccaccattttaaagatggagtatgttcttgtagagattactggtaaaatcaatgatttttctccttctttcccttctttatgtatattcaattcattccctttttctgatatctgtactttttttcattgaagcgtcttagatatacatttttgagtgacacaagttggaattcgatcccaaaaccctccacacacccacgcacctctcaccaaccccttttggccacttgagctacctcgaagtggtttctgatatatgtactcaattaatgatgtcttctgcaaatatctaagctttgccaagtgaagagaagacaatctttcatagaataattttaggttgttttagcttgaagattttagttaaggctatgtgatagctccaaatgacatgttatattgtgtgaagaaatttgggccggccttaggcacatgtgttaggctcgtgcctagggttacacatacacttttcaggcatccaaaatagaaaataaaaagtatcgttaggctcagtggcggacccagaatttaattggaaggtaggcgtaaatttttttcatatataaaaatatttcaaaaaacaagtaaatataaagaaaaacacaattcaatatttcaattcccaactaaaaagatattaaatatcaagcactaaaaatcttctaatagaaaaaaaaaatgcaatctaaaacgatgttcaaaatatataacatactcaatatcttaaaattttagcaaatatatcaatttttgagctcatatctttagagttgttctcgatgagttttcatgttttgaaaacgatgaataataaactcgttgtcaatagcattgaatacatcctttttgagatatactgtcaaactatcattcaactattgatctcccattttgttgcgcatttgttgtgggcaatt

SEQ ID NO: 300097 - DNA, 2394 bp, Cannabis indica
agggtattttggaaaaactctaaattcccgaaaaatctcgacattcccaatgtctaacaataccgccccgctatactaaataccaggatgtgattctactaagccatacaccgcgttccaatgttgctgggcactgaacatgcaaaaatatgaaatttctatatatgacatgtaaaatacattctgaattcaaataaatcatcataaataattattttaatatcaataaataattttcataattaaaccctaattatctgctaatttccaaattaaagctaagcagtctttacatagagaataaaggaaatatcaaacagtaaatgataagaacaatagatttttacgtggtttaagcattaatgatcctcagtctacgagtctatattattggcttcctagggcggatgttgtatggttacaatgtattacaatatagtagccttgtgcaggagaaactacagctacatatttttctagggtaacggccgatcaaacatcctacccccttttagagagaaatgaagatatttataggcacacatggggtaaaatacatgccttttacctacttaggttttcatcctcctcacgttattgaggcatgtgcttgcaaagagaacaatctgaccatccactggggggaactttcttcatcgtgtggtgtagagtggttgataggaacctttatacgaccttagacacgtgttgcgcaaaggtctcgcatatacgaaattctttcgacccatgatgtttgggcaaaaagcatgctcgatggtgcgtacgcgcactaccatgggctggcacaggggacaaggtttgatcctgtgtcaaaaaaggtataaccgtctttggagtgccattttgttaggagctaacgtgtcctaggtctccagaacttgtatcgctatccgggttcctcatagaaggatgctactcctggaagccattacctcttgccaccttctggatccaggagtcatttcttttaattctccctaatgccttacgtggaaaccgttcccttactctgatcgtgccacgtgtctgattaaggaaaatttttataacatttaccccccaagttttcgtgatccttcgggtcacagaagcttgatatcaccttggatgttgatcgcggacacgggctacagtttgcagtcacgaacataccctcgattgggttgcattcttcgaaggatatttatggcatttgcttcccatcgcatggcaaccacgcaatgtgctagagcgtgttcatttgttcctcttcgtgttgtggtaaggcgcgcttagcaagaaaggaggagtgcctctggcgactgagtgacatgaggaaacagaccctgacatttatgtgggtcctaggatcatcacataggatccctcatttccctagctgttggattccatgtaacctcttcaagctatcgatctttgtggagctctttctcctttttgaaatagaaactgtctgtggcggtattattttttactcctttaatcaaagcattgtttttcctctgcaacttctttgttcttcttgtcgtcttttgcatgcaaaaaaaatttgaggatttaatcaagtgactgctcgttattcgcacagagctcttcccaggcgtcgttccctttcaattgaaccaatggagttcttcaccaaagggagcattggatttttaggctgactgtgaccgttggggtcttcgaacaaactttctgaaggcattgaatatctcttccatttcttcaagtaagtgcgctaaccctcctatctgagtttcttggcattgtccttttagggcaagaaaggttcttgcttaggttagggcttggtctgttctcaggtcgtacaatgaaacagcgtaggcgaaggtctcgccttctcatttgtcccttgttccaagaagtgtatctttctttcatggatttaaaaaaagtcccccccaccagcgtaaccaagtctactgagggagaagtcgttcaatccggcgaaaggccttttgtaggacaggatcaagctgaagattttttgtggcaatgccccaactactggaggctttaggaaccattcttgaagaagaacctgtcgacgagaaaaaccttcccgtggatgccaagggcaataggaggaggggaattccttcgtcgatccaggttcgccctaagtccatacgggagatggactaaaaacccaactgcttttgatcttacgagatgttgcaagcgtactctgaagttgttggtcttcgcaatgttcccagtctaatgtggcatatactttctgttcttgaggaatctgcatctgtcaacgttgatgggtttagtgcatggagttggtcccatatttctagcggcgccccacctccctttgagaacctacttcgcgaatct

SEQ ID NO: 300098 - DNA, 1518 bp, Cannabis indica
ggttagtaatataataaacgacttaaaaataaaaaaaataaaaaaaataaaaaaaaaaagattgataatagacatacctattgattttggtataaattgaaagtttaggaaaacaaccaataaataactaaaatattatattaaaataaaaataatgattgtaattatatttaaattatacacactttttatgttattccctttaaaattatattttattattgaatgtcatttgactcctaacactattaatctgatatagattcaatttgtattaggataaattttattgtatgtaatcactttcttttaggtaaaactttaattttttagaaaacaatcatttatttataaaattagaccatctcatatgaggtgtaaaaattatgctatattaataaaaaaaaaataatatcattaattcttaacattgtactttaatacataattacaaaatttgatgtcaaatttaatatttttattaaaattataaaaatataattactttatcattataattattttttaatattacacaaattttaatcataataaatattatgctaaatttaatacatatttattatgtgccaaatttacataatattttgaaatactaggaacacatattttttaaataaactataatttaaactttgcatgacttatttacatctcatcctcttataaacacaaaagtttccaccaagaaagtagattttatcaaattatttattctaagaacgaaaagggcatccaaaggcagctatgatgaacagattgaaacagagaagccaaaaaaaaaattgctagctacaaagaattatacaaatttattaataattactatacatgtttgtctgctacaagacgaaccttattcaaagactccttaaatgcttgccaagcaaccatatagtgatcttgagaattcataccttcctcaaccacttgcattgctcgtttgtacaaatgatcaaaccactgaactgggtttgtgatatcaacattattagacccgaaatccggtacatacaaccgcttaaaatccttcctccatcgcggtaacaaatactgaaatgggatttcttcaacgccattataattgagtacgcacaaggcatgtcgacataagaagcctttgaaattgaaacagctgcaaatgcagcgaatttctgcgcctgttttgtcatatactacttctaagttcctaacatccctcataatttctcccccctcgctttctttgacagtgtatgtcgcaattgtaccatttgtgagaatttgggttatgttgaaacaagaagacatcatcacaacctcatcttggaactttctgaatacctcttttgtatacaattgagaaagttgcaactcataatagcaccttgttttcaatatgggactcaaatctcttgactcaaaatcatcaagagcttctttctgacgcttcttttccaagaatatatcataaatatcgaaaaagtccttcaaagaagttttgtcgtgcacatagcc

SEQ ID NO: 300099 - DNA, 3602 bp, Cannabis indica
tcggattgccaaagtgtggttgacaaaatttatagctcttattgtaataactctgttcttagtgatgttattaatggtattaggaattcattgttgttcagtcctaatctttctgttctttatgttccaagagattgtaataaaacagctcactcgcttgccaaggttggattaggattagacaatgaatgtatttggaatggttctttaccttccaatctcacctgaactttgtactctttagttttatcaatgaatctcaagttttctcataaagcattttgtacttttattatttttactacaaaatttaattatgctcatcctaaaatgaaattctgagtccgtgacgggctgatatcacatataattttgtatgtttttttatttatgttcgtttttatcttttattaataagttgtataccgcttataattctgtgtattctttactttatgttcatttttattttttgtatttaaggtgtttaaatatattgggttaacgttcaaatagaatttatgtataaatattttcataaatggtaaaaattaattatttaatttaaataattaagtggataatcttaaaaatggaatttcataaaggagagatgcttaagtgttgtctatcactactacaaggtcttatattgttcgtaatgttattatacaaaatatatttacttaaatcgtaataaatcacaactctttgaccaagagttccacaccatgttcgggctcaatgactaactttatggctggtttgtggacataattaggagaaagagtgaaggagaacttagatagaatgagagctaagagaatcttgagctcaaccatggccaagttttgccccagacagattcggggtccgactccaaatggcatgtaaaggtggggaagtttgcaagcctctctgattcctttcgagaatctttccgggttgaactcaaaagaatcgggtccccatatttgtgggtttgtatggttagttaaaaccatagtccatagattcgcacctttaggaacaaatatgttaccaattttcatgtccttgaaagcctctcttgacaccactgatacaggcgggtagagtctcaatgtctcatgaatcaccattgttagctgtatataaatgaaaatattattattatgtatcaaaaaaataatatattgtacttttaccaattaacccatttgaattacctgtttcattttacggagcatatcgaaattgggatcttggccacagcagatgtcgagtacctcagaacgagctcgttgttgccattgaggattcatggccaacaacatgagacaccacgtggcagctacggcagttgtctcatagccagccaagtatatattcttgcagttatccacgatgaattgatcagttgcttctttactaagatcactctctttagctccctctagtaccatttggagtagatccttctcatatgcagcttccattctctttttcaccacttttagaatcaaatctttcacctctttctctagtgcccaagcctctctgttgtttttagtaggtgcatacctatttcatcaccaacaaacaaatatacaaacatatttacataaataatcaattaatttataaaatcaacaatgcccaatcaagagatcttttcaatacctagcaccaggtattcctgtagccaaacactttctggacataacttcttggagctttcttaacttgatgaatatctcttgtcctttagagaaattgctcccaaaacaagcttttgaaataacatctgcagaaaaattcctcatatcctcatcaatttttatgttcacaacctttcctccactactctctttctcaatcctactcttccatgagtcaatcaatgtgtttgttgactctgtaatcatattcaccattccctattaccaaaaacccatttactataaagtcaacaatcaacatcacttttttagagtacaaacataataatagtactagttctttctctttctcataccttaactttgtccatatacaattctggagcaaggattttcctctgatgagcccaaacggtgttgtttgaggttagaataccttttccaagtaaagggccccgttccttgtgttgataacttggctttcccaagtccaaagaggtacatgttgttaattctctcacggcttcactatcattcacatacaatatttgtatgttaccaagtgcaaacacgaacacatctcctgtaattattttcaagtacaataaatatataagtttgataaattatgatatgtaagtagttttttgtaacaataaatatactatatgagtttgataaatttaccaaatttgtttctccactcatcaaaaaatggaaagatgaaagaagcgagattgtgagtctgggtgagttcactggccgagttggactgagccttcttgatctctcttacgtttccgagcaaaaaattggagggtggtccatgaatcccttggtctttcaaaatggtccttattctctttggttttagaatcaaaacattgtacaaacgaacaaccaagacaaaaataccaagaagaacaatggtcaagagtgccttcacaatctccatagctcaaagctagatttttttctttgtcaaaaactagaacaaaattaaagttcaaatggtaagtggtggtgttgtgtgtctcactatataaaggggaagacaacacccctgccctcaaacatttggacatttcttagaaaaagaagttgttagtgtgttactaagtgtctaatctttactagcttttggagtcaaatacaaacgtggctttacataaagtttaattagtagcttctccatttttcgtcaaatggaattgtaccaaatttattgaaaccaattaactcaatcttttaattgcctggaaataactaatattctatgtttttgtatactgagtcttttctgtaaacacaacatactttttagagtgagagagtaaacataaacattaccaggaaggtaattgtgtcaactttattaatgtattgtcattttctgtatataaacgcataactattcttgagtcaatcggtcatggtcagtcaagtgctttttggtcttgagatactgtatatacctcgtgaaaacacactcttcaatcttcatcaaatcaaataatgtgtgacacaagccacaagggtgtcgattatattacattattatcattatcatcatttttttttttaatgtttgaatatttcttacacgtttggtaactaatttctgattttttttttttttttggaataagacttctttatttttgttttgaacagtttagttaatacggggtcaggcattgattatattgacactctaaattttattattttatttctttcttttcaaatgaataataaattaatgaaaaacaataacatgttcaaacaatatttattcataaaaaagtaaattaaactatccttcgtcttcaatttattcacagttaaaatacaatacaaatcaaactatatttgcttaattttatttaaattttattaatttgttttattaaaaaatcatatattttgggtttttttttt

SEQ ID NO: 300100 - DNA, 1238 bp, Cannabis indica
ttggggtccacaattaaataattcacaattaataataaaataattaaaattagtgctaattgcctttttttttaatccatattactagagcggtcattacaatgagagctgtcctggttgaaattttgtagcaacttcgtgcacttctttgatctcctctgattgtcccaatgattttggtatcacttgggaagtttaggcacaaatggcagatggatgttactactccaaaatccatcaaaaatggtcttcccagaatggtgttgtaagcggtagggcaatcacctactacgattgtgctgtacttggatgatgacattgtattgcttctgggaacttccccatttattgtcatcagaatgtctatttttcccatggtgatcagcgtgtctccactaaagcctcacagttgaatctgacatggtaacaggttgacttccaccagatcaatggctttaaaggctcctttgaaaatgatattcatagagctagatatgatctagatatgattgaattctaattactctctttccatatttagctagatatgatcttccattcgagatacctgggagttgattgctgatattgtacggatttagtaattaatggaaaactatactggatatctggatcctcattaattacttcttctagaaatactatttaatatcttttggatatacaccatgctggatgggttcctgccaagacgggttatttattcttcatccggaaggactaactgcttacggttttggccaagttatttcatttgggcccactttggatctagagtatttaaattatattttttgtaagaattccatgtgtccctatccgaaaatacggataaaaaggtttaatttaacttttttttactatattatttttactaaaatttcgccaacataacaactataaaatcccaaaatttttaaaatctaaaaataacaagaaataataaaataataataataaataaaacagatgaattatcatttaaatcaacacccatccaactgcaatacatatttagtcacagaacctacttctctattttaagatattcaaactcatctataactagcataaatatatcaattaatgacatttatataatactataatatgtaaataaaaaaattaataaatactaatcttcgaacgcaaaatagaaaaaaaaaatatcgacagacaacgaaaagagtgagagcgagcagcggtgccaaatcaca

SEQ ID NO: 300101 - DNA, 1228 bp, Cannabis indica
aaaattaaaaaaattgtaaaaatatttaaaattccgtaaaaccgtatttttataattttttttattatttttatgtttttgtgaaataatctctttatttattcctctcaatatcgaacaccaacataatagaaattttatgcatttcatttcttccaaccaaacatgacctaacaaaaaagttcattggaatatacttaaatgcctctagaatatttgtgaatgtaaaagggtattgttgtaaaattattatgcctttttttatttgaaaaagacaaagaagaagaagaagaaaacaggactcttcataaaccctaaaaagaagctccgtcttccacactaaaaaacctccaacttcatctgctacgatttcaggttagttttgcttcatttctgggtactttaatgctgtagtatttttctccggttactgaatagatctctttctctgttagcaattatataatctctgttttgaccattttttttcccagaaagttgaaggcttccatcaagtgttaaaaaatggctctggtaagctttcttagctttattttcactttaacatctttacattgtttatatatgtagatatagatgtatgtatgtgtgtataaaactaaccttttatagaaattgaagacctgtcttgctttctagttatgtataactgtttctcaatcttctcgagtgaaagtggtgtattcccataatttgtagagtattttatgtagaattttcaacgctactgccaataactacagtagcatgataacttagccatttggagggtttttttcttttgtttttaattataaattataattgaattttcttataccatttttcttttgaattacttttaggttctacacgcggggaataccaataaaaatggtttcaaggcacttattgctgcagaatatagtggcgttaaagtggaattggtcaagaactttgagatgggtgttacaaataaaactgcagaatttcttaagatgaacccaattggaaaggtgggttattttagtatgcaagaagtctagtaccatattgaaaggttgctttgtctgaactgaaacaattatatgtgtaatgtaatgtgcaggttcctgttttggaaacacctgatggtcccatatttgagagcaatgccattgcacgctatggtgagccttcatttttatttgtcaattttgtacatgatagttgtcggtacttcaatttt

SEQ ID NO: 300102 - DNA, 1990 bp, Cannabis indica
atgcgattagactcgatcatatttgcatcctctgctgagtctattcaggcgaggttcgtactcgagaggtctttcatcgtcatctcagctctcctcgaggaaagtgagtacacgtgtctttttaataggagtccaatctcgagtttctaggtgagaaaaatctcactataacaactggagaaaacagggccagactattgttaaaacaaaagaccagcccaaaattatttaactgcatgtaaacctgtaaacctgcctgtacaccctatgatcatggtgtaaaattatttaagaacactagtgacgatataaaataatccaaatatgcaagcattattagcaatcttcggtatgctactaattgtactaggctcgaaattgcctatgtcgtgggattattaagtaggtttaccagtaagcctagtgtagaacattgatatgctatttagagggtcatgagataacttaaaagaaccatgaaaccttggattatattatcagaagtttccatctgtccttgaagggtacaatatgatgctgactggaatactttatcaaataactccaaggcaactagtggctatatctttaacatagctgatagagctattttataaaagtctaagaaacagactattttggctaaaccaacaatgcagtctgaaatgattggactagttactgctagtgaagaagcaagttggttgagaagcctgctagtttattttcatttatgggtgagacctataccagctgtgttggtccatcgcaatagtattgtgactattgcaaaagttcaaatccgtaattacaatggtaagagagataaatacgtcgtaagcacaatattgtttaagagtttttcttaacaggtgctgttagagtggatcactcataagggtaaaccaatctatagactgatgataacttagttgatcctttgaagaaaggtttagctagagagaaaggccttaaactatcgaaaggaatgggactattgtctttagatgatgaatcactcataagggtaacccaatctatagactggagatcccaaaaaatcgattcaatggataataacaagttatgaagtgataaaaatgagatcatgctataattatatcaaaattgaagtataaattcttgaagcgaaataaggccgagttaatagatgttcttaatgagttctttagcccaagtggagtggactaccgagctacaagagtactcttgatagactcacctgtgtgaatgtgggagcgggaccgtttcctatgaaattttgggcaaaattttttagagcgctcactatattgagatagccgtgcatgaccattaacacatgacttttggaatataccatagaaaggttatgcgttgtatatcgttagagatagaattcaagattatgagtcattctaatatataaaaagttgtattcactacgtaaatatttaaattgaaagatacttttatttatgcttaatgctattgtttagattactgcttgataaaaatattttttaaaaatttaagtggagaattattgttaaaaaaataaaaaatgtgctatttgaggtcctttaagaatcaattacacattgctttggaacaattgtttgcaagtgtatatatatttatattgtaaatgtgagtaattgggttggagctcaattggtatttatttttgtagaagagggaggaatcacagccactgccatcttttagagaaaaattatttattaaaaattattattttttatttaattaattaaaattatttttaaacatgcttcataaattggtaaacaaagatctttcttctttatattttttagccataatccaactatctcacaattcataaaaaaaaaaaacttgactttgtttttatatttatttaacgcatcagaaccaatggagaaagacattagacatcccttttttataaagggtctcgttttggaacgttgtattaagtcgtattgta

SEQ ID NO: 300103 - DNA, 2992 bp, Cannabis indica
gttcattcattccaatgacttgaaaagcctaaacaatgttgctgcttctctaatcctcgagaactcgatacaaaatgcttgaacttcgatgaacagatccttaactgtaaccatacatcataaacaaacaaaattattaccaatctaatcatttccaatagtattattataccaaaataaaactcaccattgatgatattatttctgattaggctctgcaaaaaaatgcatacgagcctcacaagtctgttttgcatgtatttgtcttgatatccacaaaaaagcatataacatatgatataataacaaaaccatgacaacattactacatgcatgagtacctacaaatattttggattcttcctcacatcttagcattcaaacattacgaaaacaaacacaagggcatgagtgaagtaccttgatgttctcacagacacagaatgatatacatttagttatgtacatccaaataaactcagaaggatgatatacagttagttatgtacattaatatcgactttggattttatgaactttatggactatggatatggatgtattttaaaatattttaattttcacttttatcatgattcatgaacatgaagatgaagtttgatttgatgaacaagttatttgtttgttggttggattgattaatgcttcttttcttcaataatagatttgatgaacaaattgttatattatatatgtttaatttaataaataaataagataaaagaaataattatttgaataaaaaattaattttttttaaagagttgaccgggttaacccgccaacccagtcaacctggccaaccgaaacccgccaacccgtgaccctccaacccaccaacctgccaacccgtgccctattcgggtccgggttcgattttatttttttgaacccgaaacccgcgaacccgaaactcggtaaacccacccgatgttcagccctagttgatactgggtagattctaggtttaaactctctttctttaccttatgattctcctatcattaataatgtctccttttttattgatgaggaaggaagttagaaccgtagtaaacttaatcattacctttcttcctataaagtagatggtgtactctcgattcacattgatcctttgagggaggactgcctcatttgggggtatcacccctttggtaattttactgtcaactcaatttatcaccttgctaactgggtctctgttttgggctctccttcctctcctgtgcatgactatttaaagccttagtcgaagccagtttggaccaataaaatccctcctaaaataaagcacttcatctggaaggcttttaatcatgtcatgccatttgctctcaatttgtttaggaggggagttcttgacaatcctaattgttccttctccagaagaaaagatgagattgtgtgtcatgccctattaggctattccagagataaatctgtgtggaaaaaaacttccttttactaattttacactacaaataaacattgtgacattaaagaatatcttctcaggagctttgagtcttttagtggggatgaatttattttgttccttggcattaactggatgatatggtctcaaaggaatgccttccttttagtaagaaaactaacccttgtgcaaatgtagaagatcttgttaaaacttttttgcaggaatacaaggatgctcaatctgttcaattcaatagcacactcaaaacaaggattgcaactgtataaactaataggaatactttagctagaaattctccagctcctcctcaacttcatcttggtgccttaaaattgaatattgatgttgctcttaatgtttgcagccactgtacaggtcttggtgctggtgttaagaattgggaaaaccacattataggaggtttctctgctcctaaggttggaagctcctctcctctgtttgctgaagcactctccttcatgcgcttcaatggtgctcatctattagattgcccctcactcatataaagacaaactgtcttcaattagtcttgaagatcaatcataaatggaagaatcgtttcgctgtctctcgtttcattacaaagattattaactctttatcaacttttcttaatgtatttctgtacatgtttctagaaatgacaactgtccaatctataatctagctagagatgcgttacgactagataaagagttggtttggggagcttagctctcattctctcgttgtaattgtaacctttatatttctctttcaatttcctctagttgcaattacatttaaaaaaacttatagaattaattaataaattttggcacagaaaattcatcaggcaagaattttctctcgtaaacatttcagtcactattgcgacgataagtcgtcgctatagaggaagatattttagaggcataggtttatcgtcgaactctactgtaatgagctagcatctattgcaatgactaatcatcacaataacagggtttcaaaaattggaaaaaaagaatactaagtgctcggaataaatttcatatcaataacttgtatttgagatcatcactttgtcgtaacaattggtgtcttcgcaataaatgtcttttcttgtagtggcaaattcccactattacattgataagatctacaaaataaaaagaaagaaattagtagggtatatatagatctttcaagttcgtacgaactctttttaaaggtgatataatagaataaatatgagtagcagtatttggagactaatactatatatttatagggaccggatttcgtcccgttactgtacggacacggatttcaatccgtgatgtactgtaaccgtttgatgggtagttaatttgatccaacggttggggttcatgtaggggttcatgtaggggtaattaggtatgaaaaaatggctaccggttactttttttgaaatttaaatttattaaaaatggaaaagtgaaaagtgacatccatccatcaatc

SEQ ID NO: 300104 - DNA, 3957 bp, Cannabis indica
aaaacaagaattttgaaaacaacaaaatattgttttttgttttaaaaaccaattcacttttggtcaatattgtttttaaatattactaaccaaacgtgacttgtgttttaaaaacttcaaaaactattttttgttctcatttctaaaaacaattttttaaaacaaaaaacagaaaacaataccaaacatgctcttagttactgaaatttaattattttgtataatgtggcaaaatttaattattttgtataagttattaaagtcaccgaaatttaaatttattgtatatttcactatctaatattgccctccaactctttagttttagctccgcccctaattataatcaattcctattacaaattttataataataataacattaccatttcattataccgaaccaaacaccaacttattcttaattttgtgatccttcacgaatcacaatagaaagtgatattgagtttgaggtagtggagtggtgacttgacttcggcttttaaccgttcttgtattagttattttggcttgcagtttgcctgatagctactttaatctcaaatctcaatagatgctcataaactaactaaacaagtaaacatagactttttaatttcgattaaaagagtgttagaaaatattccaacctaattcctatattgcatgatattatcgatgagagttgttttataattaataaaaatacaaatctatatttctgaaaaatgacatttatcatgagaacccaaacagacctaacccaataccccaaaaagcccaaagacgaagcctaggtaggtttcatcactcgccagtcaccacccctgctgctgcgacgcttccccctctccggtcaccgcaaccgtgactcactctccactctctgcctctggtatggtacccatcctctcctcttcaacttcaatcacccctcactcatgctttccttcaacattactaactattattgtgtgttcattctgaggattaataattttgtactttgtattgcgtgttgaatgaacatgttctgatttgatttgatttgagattgaattaagttatggttgtgttctttttcttctttttgatttgtatagataattctccaaactgtctacctgaaatcgtggaaaccacccaaactacaccgcaaatcgtaggtgtggtttgccggtttgacttcttccttcaccgctcttccgaccaccacaatctccctcaccctccgccgctcggatggcgcgtgcctttttacgcgccgttcctgctcttctccatccctcatccttctccaccaccacggtctcctcttgttctccctctgttcgcggggccaatggcaatggcggcttctcttcgttctccagttcttcggtggtgttcggaaggagctttcacgccctgtgcggcaccaaacaacggtggggggctttgaggagttcgggaagagtttgggctgcgcagagggactatcgtagggcggcgaggaggagatcggctgccaagagaaataacaaggagttggagcttaatgtcagtatctgcatcgaagaagatttacctgacgatcctgaaattttgagtattgcagagttgctgcgtttgaatgctcctatggcaatgaagttagcatttgatggtttaaaagagtcgcagtacaagactagagatactgctataactgatgttggtggatttgaaagtgtggagctttctgtgcttctctgtaatgacgaatttattcgaaaacttaacaaggagtggcgggatgaggatcacgctactgatgttctttcaatgtctgatcacatacctgatcttaaccttccgattcttatgctgggagacattgtgatttcgatggagaccgctgcaaggcaagcagaagagagagggattagtcttatcgacgaaattcggattctcatggtacatggtttattgcatcttttgggatttgatcatgagattagtgaagaggctgaaatggaaatggagaaggaggaggaacttatcttgaaaagtcttggttgggctgggaaaggacttattcagagtgcatatgatgctgctgaaactaatggcaatgccattgccgattctcttgatgatacaaagaagaaagaaggcagccttcggttttataaaccgaagttcagctatatcttttgtgatatggatggtacactgctaaatagtaaaagtctgattagttcaacaaccaccaaggctttgaaagaagcctcatcaaggggtgtgaagattgttatagccactgggaaaactcgagctgctgtgatgagcattttcaagatggcggatttagctggaagtggtggcattgtttcagcagtttctcctggggttttcttacaggggttgcttgtctatggtacacaaggccgcgaaatttataggaggaatttggatccagttatctgcagagaggcttgtgtttactcgtgggagaataaagttcctctaattgcatttagcgggggtcgctgccttactctgtttgatcacccaaaagttgagtcgctgcacagtgtgtatcatgagccaaaggcagagataatgtcttctgttgatcagatcttggctgctgctgacatacagaaagtgatcttcatggacactgcagagggtgtgtctactactttgcgcccctattgggcagaggcaactggagatcgtgccagtgttgtgcaggctcaggcagacatgcttgaaatcattcctcctggaacgtcaaaagggagtggggtgaaactcctccttgatcatctgggagttagtcctaaagagataatggcgatcggcgatggagaaaatgatgttgagatgcttgagcttgcttctctaggcgttgctcttagtaatggatcagagaagacaaaagctgtggctaatgtaattggtgccagcaatgatgaaaatggcgcagctgatgcaatataccggtatgcattctaagccttcttcatttgcatttgcaggtaggagtgaagagtggaatagagtacctttgtacaatcaattcacattgaggccaacaaggcatgtcttagttaatattttctatttattttctcttgacacagagagttttcttaattttttttcacagtaattcactattatttttctcaaaatagaactttctccgtttttgtttatggactttggataattggatttcgttctgatgaaatttgtatatgaaattaaataccgaggatttttgatgaagtttgtatatgaaattaattacggagttataacatagatgggatagaactcttaacatataaatatttaaatatttgaacaatgtgattcgtcgaagcattttcataagtgagtgtaaaagaagaaaagtttcatgacaccctcgacttcatagtaacaaatactcaacgaaatccaatttaattgtttggttatttctttttagtttcaattagtaaattttcatctcccaatatttataagaggcttcccctttcacaaatatcacattgtcccataataatcacattgatgcggctgggataataagtacaagcaaaatggatataaaaatattggatacatggaaaagcatattaggaatcacttggttaaaaaaagatggttagcacttgagcaaggtaatgctaaagtaatgcttgagctatttatgcagatgcaaaaagaaaatcccaacttcttttatgcaattgatttagatgaagaacgtctaaaaatattttttagatagatgttaaaagtcctgatgactacaaaaattttaatgttttttgtaggtttgcttattttgttcatttacacttttataattagggttgtacatcggtcgatttagtcggtttatactacatattttctatcccaacgtaaagatcgggttgtaaaattctgcatgtaacctgcccaattttttttttt

SEQ ID NO: 300105 - DNA, 3611 bp, Cannabis indica
aaaatatattttttttttatatatacttctttaaagttctccatagatttttttttaatcttttactcattataacttctaagaatattgatttataatatatctttataaagattctaaagtaaaaaaaaaattaataaggcttataataaatttacaatgaaaataataattcaatagttattgatgatattaattaatattatcggtaaaaaaatttaaataatcgctcgtgatacgcatcatgtttcctagtatatatataaaagaaaaatataagacagtgacatataatattctttattttttttttttttttgttttttattagtttcataaatattaattaatataaattatatacctctgtttatttattaatagattatatatttaaaaataatattatacatatatttaaattcttttatttgttttattcttaattctctcacctttataattttttattatatttaataattaatattaattctttaacctttttcatatacaatttaatactaattttgaaatatctatcttaaaaaaaattatatctatataatacttcaatttagaattttcaaccaaaaattttaaatcctcatagcattagcatttgcttgatgccaccatttatcggatcattaattcatggagagaaagtaagtacaccaaaatttcattctcttgtgtttaagttattatctgttttcattaaggtttattatatatatggagttaatttacattattattagtttattattaagtagttttgttttattgtagaaattattaatttttcatcattattatttgagattattttggaatttataattctttacactattttttttattggtctctttatgtagttttttttccaactaaattgaaagtttgaaagtttacaaacacactagaaaataaaataaaaaaaaaaaacaaaacaaaaatagaaaacgtttcaacaatgcatgagaattttattgtgtcttgggcccttgtctaccaccaaaggtttcgattccaagccaaactgtatcaagtttctaatgatattatctttattccatagcatatagtgcggttgtcaaggatgatgcggctattcatcgaggcctccttctctatttttaattaaactttactaatgtggttcacttatctgattgcacaaatactctcaatgatggcctctgaatacaacatattgatttttcttattggtattgtctctttaaaattttgcagtagaacaagaattcatgaggcccatagcctggccaaggaggggtttcgcatagatcagtatgtatgcaactttctaattatagaataagttttaccacattctgtctaaatgtcttgactactgctaatttacttctgatcactatattagttaatcttcctttcaaaagagttgtacacaaatattaacattattggtaaataatccaatgttacaacgaaaggcccccctctgaaataacattgtaacattgttagttaggttgtagctgtataaccttaagtttaatatggtgaagttctcttttatggtttgttctcttatttcagtgttgttctcttttatggagcaataaaggtaacttgctaatagtgtttccagaaaatttaaacaacaacacttaaagtacacagtttgtttcctaatataatatatagataaacaaaaagccaaacgtacgtacaacttaaccatgctaagctagctacgcaaactttgaaccaaacagagatatagaaatcgaggaaacaaagagaaaaaaaaaaacaactaaggttgatgtacgtacgtggctgactcgttattctaaactaatattacaagctgctccatcttctccatggatatggctaaaaacacactgatgatcttcttctccaacaaacagaagctcagggttgctatccatcatcatcaggtccatatactcatcatcgttatcctcaccaaaagcaacttgtggccaactaaaaccctccatcaaattattgcccgtgtcttccgactccgcaggttctactgctccaccagtagagcttgctgactcagactctgccccagaactcgtactggtagtggtggacgagtactggggataatgatggtggcggccaggcatgttgagcttggccagtgggccatattgcttccaagccgcatcgtcgtaagcgcttgcggcttctgtagcggtgttgaaggtgcctagccacaggcgcgcgccgcggtttggctttcggatttcggccacccattttccccatgtcctctgcctgacacctatgaaaatgcacttagcgttatccgggcctccttttcctttcatcctcctcttcctcgaccgctctattgctggtttcttttcatcatcattactaatattaatattattagtattatcattattattattattattatcactctctactttggagtgcttcattatacatataggctgaaaaaacaaaagcccttctcttccctttctctctctgttaagttaagccttcatcaatattatatatgttgatgtgtctctttcaaatttagcttagctagcccaccttttatatattatgttgtagataaagaaatacaatcttgaggtaagaacaactattgctgtagaagcgagtagtgtcacaaatgtcagtgactgtgagtaacagaaagctttgttccaagacctaaaaatataaagtatttattgaggaaatatagcaaagcaaatccaattgaagcaacttgagcaagtggttctcttagtaggcatggtcaacgtgtacatatctaagcaggacacttggattgagatattttgtcaaacacctggccaactactgaacaaacacgtgtcattttccccaacccttattctgagactacacaagttttctcgtgttatatatattatttatatataattcaatacttttaattaaacgctttgtgtttttgtgaggagatttttgttatcctttattaagtttcgggcagttgttgcatgcgttaactaccatgtgtgtgcactgtggagagggttagtgtcgcaacgagctaccataagctgacattgcatatgccaccttggctgaactcggtttctcaaaccgaaaatgaaggtttttgctttatatattttaaaggaaaaccaacaaggcaacaatgtaatatgtaggaataggatcgataaaatttataatcaaagtatattatattcatagtattatatattttgatctacggtgtgattctgtttcacacatctaaatgagttaaagcctatctcttttatagtcacaaagtactttcttttgatagagtactgctattacgttcttaacatcatatagagatatgcacattgtgaatatttaacagtttattatgtaagatcgtgaatgggcagggctagttcgactcgtatttatctatactttttaaaaaatagatcatgtcgtgtcacaaaaaaatatgagtcgtattgtgtcgtgtcaatattttgaaaggttaggttcgacactgctcgtaagcccacactacaaaaaactactacttttagtgacaa

SEQ ID NO: 300106 - DNA, 1347 bp, Cannabis indica
gaatttatacattaaatataatcatgaaacaaatcatgcgaaccatgtaacataaaatgtgatttctgatctttattagttagtaaatctgattatattgaaataggttttatttagggcacaaaacccaacaggtacttcactgaagctactctcaccaacattggtttctctagctctaatcatggccccatcttcttacaacctgatgtttatcatatctctacccctactcatcgattttgttatgagaatgcttggtcttgaaaacccatgtgtgcacagatagcgaaagactgctggagttcaaatagccatctctcttttcatgacaaaattaaaatatgtggtgctaatttggataagtggggaacgaagctcacaggcaactttaagaatcgtatttctaccagcaaaaagaccatggctcgtctgaagcagcaacatgatttccctttgaacattgagtttgttaatgaacaaaacaattattttaaactcttagctcggcaagaaatattttggaagcaaagatcaaagtaattttggctccacaatggggataaaaacaccaaatattttcatgctattgctagtgccaggaaaaggaacaatcaaattcagcacctaaaaaactctgaaggagtttggaccaattggggaaatggtcttgatcaggttattgtctcttacttttctaatctgtttactgctaactgctctttgaataatactattgtgaatgaaattacttgttctgtgagtaatgaacaatatgaagagctcttgaaaccaatttctgaagaggaaattagaacaactcttttccaaatgcatcccgacaagccctagtttctttcagaaacattaggatattgtaagtttagatgtggttaagatcgtttctgacttctttgattcaggttgctttcctcatgagttgaatgaaactaacttggttttatcccaaaaagaataatttcacttctatgggcaactagcgaccaattgctctttgtaacattgtctataaagtgctttcaaaagttctggccaatcgtatgagaagcctcatagaccatgttatttctgacactcgaagtgcttacatcccaggatgtctcatctcagataatgttatggtgggattcgaagtgatgcactatctcaagaggaaaactaaaggcaaaaagggttttatggccctcgagctaaatatgagcaaggcctaagatcgtgtggagtgggattaccttagaatcgttattgtgacagtcattagtcatgtgatccgtaaggggaaatatcgcgtaagctgtacaatcccacaccgcctggggaaggtca

SEQ ID NO: 300107 - DNA, 2812 bp, Cannabis indica
aactaacttgccaaaaaaagactttacataaatgacttgtaatatttcaaaaagattttaacaagatcccaaatatgtaattacgttattttgattttaaataaagatatattttataattgcaagttttttttttatttaattaagttattttatttaatgtaatcatggcacttggcatttctccaagtagaacattacaaaaattgtcgttagtgatttgggtaggggatattgttcgcatcagtgaagatgcatagatcttgaaagatcgtgtaggtcatgcatattcttttcagggtagtaatgatctttagttggtgagtgacttcaaactggaatctatattggaatactttatttttcaaggatgtgtttgatgatgttgaggtcaaacctattttgtctatccccacatcttcttttgatagacaagatagactcacttggcattttactgatattggttcctatactattaaaagtaggtattggcataccatgtctaggctggatttgggttaagtgtcgacttctgctaagaattcttgttagtagaaattattttggggcctctctcttccatttatgattattaagaattttgtttggaaaaggagtatgaatttttgccttcctatgcgactctgactcgtcgtggcattaatgcctctaaggtgtatcccatttattattaaaataattagacgaaaatttatgccttatggctttgttctgctctcaaagcaatttgatcagagtgacttgtgagaagtcttgatgatttaatagtcatatcaagtttttatgaacttttattgggttgtatgactatcttaactacatagaaagttgaagaattttttgttttatgtcgacaaatatggcataggtgcaagtgcaacacttttgtgcatgatcagaaaattctctctaatgagatggtaagtttttgggcattgagttatctttgacgatatcaggatgctcaaaaacccaaatgcttgaatggtttgttgagtcctgtgatagagggatctattgttattactgctacatattttgatttgaaattgggggatgttaacttgtttgaagatgttggtattagtgtggaaaatttaaaagtggggatggggttgtggcaaccgattgagatgggtaggctctatattctaccacttttttggtagttgctgtgttcgaacctcatattgcagaggcgtcacccttgctggaaggattattgctctttctctaactaggctacacaagaatttcaaatttctcaaattatctctaataggtacaagctattgatcgtaaggaaataccttatactgaatttggtattgttctcactaatattttcaaggtttgaaattcattttacaatatttcaatttatgattgtaagaggacccataacaccattggcaattctcttgttaagttggcattatccttagataataatcgtgtatggtggtcggggctccctttctttttaagctgtaaattcgtgattgtattgttgtgactcttttggctttgttatccttttctcaagagagagaattagtagcaagcgtgtgtgttatcaattttaaaatagatgtggttataggaccccacaagtatcacctataatggggcgaggattccctgcctatatggggaatgaggtagggaaggagacaattttctattcccaacggggacccatttaattttttaatttattctataatattacttttaattattatacatatattttgatgtatttttgtaatttattagtacatttttaaatatttttatttcaatttacataacattttatattttaaattattaacaataaaatattttaatttttatataatttatttataactttatttgtttctaaataaataggtcccctacccacaatagggggaatggggaatatacaagtataaaggcgtgaatgtgtagttaataggatgggaatagaggagtactcccccgcctattactcgtcttattttcacccctagtcaaatgagccaatggcataggctactcatgcacaagcattatacacgtgggttttgaatcaaatcaatttgattatgaatgaccaatttgcacagactactggtgtgtttaagctgggtaattgggtctctatgtttaaaaatttgatacaatatagggtctaatattctaacattggactatttctatccgttgtctatgttatgtgggtctagaataaagatgaaaaagaaattatatatatataaataaaaataaaaataagataaaaataagaaattatatggcctttaataaaaataagataaatttaaaaaggtgtaaactgtaagtttttttagaggtccaaagtcaatttaaaattaaaggtccgtataatatatagacccttatttatttatttttattttattttattttttgaaacagttataatccattaattaatttagacggtgagaattggattaaaagagttgtgaaaagtaataacatgtactctaaaattatcgttcataacaaatgagttttctaactattaaattattaagtgaaaacttaaatccgaaaagtaaacaatgacaactacaataataataataagataataacatagtttatgatgagttaatagttttgttgctgtcacttcatctggtagaattatacatggcaatcctctattacaccttataaaattataaatacaccatattattaaaaaaatatataaatttaaataatttttaaaaattactattaatat

SEQ ID NO: 300108 - DNA, 2178 bp, Cannabis indica
ttttatcttaagcttcatatagtgaacgtgaacacttgtcgaacatggaatgaagatgtggctattatcctatatttagggctttaaaacgtgatatgtggcaagcaagtgttatctttatcataaagttcaatggagatgtacatggattgttattgatagagttgaatgaatttttgaaccatagcactagtcaataaattaagccttatcacaagaatataataaaacaagaagaaaaaagacattacaaatatatttcattatctttcatacaaattaaataatgttttggattggactatactaaataatagcataagattattattattgttgttgttgtttttgacctaagatatgataatatttttttagataaaacccaagattatttatttatttattttttaaaaaaaatcatatctcatgttttaaaatgatagtaatagacatggtaaattgttaatgatgttaaatctatttataatttctatttcaacacaccccacaacatacatcattaggggaagggaatagttataattctgattatttttaatttacttacctatttttttttatgtaatgaactaaagattaggaatgcatattttctctataggaatggtctcacaggaacctgaccttaatgaggtggggattccccgtttaaatggtgaatgaggcagggatggggattattttttatctccgaatgttaaacaaagtagagtcggagatgacactccttgcctcgatgaggacccatttaatcttttattttatatttttaataatattttataatttatactctatgtttttatatttttttaatatattagtatcaattttatgaattttaagttgtgttttaataataattagtatattaaataataattgatgtgtaatattttaaattttatataattaatatttttatatatttaaatttttattataaattttatttttatattaaggaattttatgtcccgtcctcactctcattagaggatttttcaccctaaatggggatgaggactaaaattcttaacagggatggaacgggaggagcacttctaccaatttcttgtcccgtgtgcatctctatttactaacgatatatattttaattatttatataacattttgaatttttttagataattcgaaataatttattatatatgcttgaaaaataattaaaatatgagtctattgcgtgtaaaattatttaaatcttacttttggtatagtaaattaatttttaaaaaatataaataattataatgtatattattgtaaaattattttccttttctgttttttttttttcgtaaagaaaaaactattatatctcagaaacaaaatattgtccactccaaaaaccatagaatcaccctaaaattataaacatgctcttcaatttgactaaattatcttatagtaggtgtattatttcgaagtagtctttgtataatttttcaaatatgacctagaagatgttataaaaatgtattaaattcaacaacaaaaattccatgatacaagctagctagcactatacaaaataatttgcaattttttgggaaataatttgtgattcaaaaaacactatagtgattagtgaaggtagttatttcccctaaaaataataaaaataaaagggtagtttatttggtcaatataaacttctcttctaattaagaaatttaaggatgaaaccaaatagctagattgagcaatcaaatataaactttaattaagattaatttaacataattatatggaagtgatttaagtaatgaaaaaaaaaaaaagattttagtaacatgataaagataatttgtgttctgataaataaaaaaaaagtttttttgtctttctttattttggtttttattaatttatgaggttaacttgttaatattaatagggtctcatctgagttaagacaggttgggtgggccttaaattaagcttgcacttaggtagtggcaagcgcagtataggtggccgatgccctctcaaattttaatatttaagttttttatttacaatttaatttaaattttttattttttatttacattttttacttttaattattttgtaaatatttttacatttatattaggaaatttacaaaaatactggaatttgggctaa

SEQ ID NO: 300109 - DNA, 1016 bp, Cannabis indica
tatacaaaacttaacataacaaaaataacgttatttttgaaaataattgtcaaaataaggtggcccatgaaaatttcctttttatttttaacaatcaacacaaagattataggcctcaagtttgggtggaccctaaacacgaatttaaccgatttaacttaaagtcagacttagtgttactttatttataatagtactagacactttgatacttataataatgctcaaacaattcttatgacatacaaacacacataaacataaataaatataaaaaggtggcttgaataattttatatatatgatcgatctagatctatctctatcaaaagttaattgatattgcataattatatatctgtttttgcaataactagcagcagtaataattgtactactttactacttatttatgtaactgtactctctggcaagtggcaaccccactcaacccccttcaaatttataataactatagttgattgattatattttataaaacagtgatattaacatgtatttataatgtatttacctaattaggatttttttacttgaattttgatataataaattatatttttcgaactttcatctatatttaggtgtttgttattaaaattaaagagaattggacatgaattcttgaatttaacaatttcgatagttctgtaaaaaaaatttaatggttcgaatagcttaaaaaatacgatttgatacataataaagtttagaaaaaaaacttaattaacctaattattattaacatacaatatatatatatatatctacagaagctctctctaaaaattctagaagtaaccatgcttgagtcttgagtatttttcttcttatagccttctcggttggggtataaccagtgatggatctaaaaattttattttatggggctttaaatattaaaaaaaaaattgtacctagttaaattattatgaatatatttgtggggttttatactattatttgtatttaattatcaaataaaataaaaaaaa

SEQ ID NO: 300110 - DNA, 4359 bp, Cannabis indica
atattacaatcatgtttcacctgggacacgaatccaggacctccaacacacacacacacttatgccacttgagctagcctcaagtggttaagtttttctgtttctaaacctactcatgtttcccattggggaacatatcccatatcccgattgggttgtcagctattattttagctgcttgttgaatgatttcttccaaaaaaaagagttgaaactatattttgaaataagccatatctttgaagatgaagatgagaaactgcttcaaaaaaaaacatcactgttcatgacaaaacttgatactttatttcttctctttactttttttttaggtaaaaaacttgatacatttccactcatctgaaaataatatagacttgatttttgatttgactagcccaaccaaaaatgcacatatgggattcccaatgtcgggtaaggatggttgaattaccttttacgatcattattttattttgtgatataatcatcatcattccggtaatttaatagtagggttctttggaaaaatcacatctttatttatattcatggagagtaacaaggatttcagaacatcataatcaagcagaatctaacaaaaaaggaatctctttcacaattaactaaactggtaaatgagtatcaatcaagatataaaaactcatactttcattatgctaaagttggttagttttataaatagttgagttatttgaacacaaattccaacaaagtgaccattgattccaatgaataagaagttcatactaactagacaacaatggggggcaaaccagtaaaagtgaatgtattaataattgtggagttattggagtgtagttggtacactacaaacatcaagtatgacacaagtcacatgccttcaaaaatttaaataaataaataaaataataacaataaaaaaaaaacataacatggggagggaccctcttggggctttcactctaagatgcttttttgactatactaaccacaaaagctcaacaaaactgagaaaactcagaaagacatgttaagtccttgcatgattcatgaataataataataataatagataagaaacaaaaccttcagactgcacagataggtactactgaataaaatcatcactttcatcatgtttgattcatttttcatttatcttcttctgtataaataaattcatgatactaagtctcagtgatacaactctctgcctagttaacaataccctacttaaccaaccatccttaagtgcccaaaaagttctgactatgattataacaaatgcattttacataaagacatttatgtcatattatgggttatgttatgatatatccacatcaaaattttaagcaagtgaaaagagattacttttctgatataactacaaataactgaagtttgaggtatgtgaaaccacccaatatgctaattctaattggatcttatgatcaatgaacaattcaagaagacattctaattttaaatataataatctagctagggaaagaagaaaataacctctaaactcaaatgccagagtcttccccacaacacgaaagatcctacggtctcgataccttatatgaagtttgagtgaaatttcgctctagcacacgaaacaaaaaaattgtttcgggttttctgtagtggctccaagagaaaaggaactgtacatataacaaagacaagatgcaccagacatgattttgaaatttcccaattgttgcagtaataacagtagaccccaaagcaattccatagggatgccatcagtaatttcgagaatgcacaatgaaatccacatggatattgcaaactattcccaccctatttgtacacattctcctactaaattttgaaccttggaagatcaacaacgagctttcccgcttccaagtgtaagctccagatcatccacagctatatcatgaattctctctccctcccatggtttaaccctgccgttctcaaaatcaaactctgggccccgtgccatctcagcagggattccccagccaactgggccatgcccaccaactgcatcttgtagaatactctgctgagccactggctttatgagattaaatgttggagaaggaggagccactgaggagggtgcccctcctgctgtctgcatactgacccaacgaccagaatctacagttgaagcatcagactcatcacactctggtattgtagcatgagtgagatggtgacggcgtgtaggacttgaaggggcagatgcagcaaaaagagggtggcgcaatgcctgtagggagccattagaaagagcctcccagtcaggttttggcttcgaacctctagaagttggagacgaaagaggcggggttacaggagcgctgtttgagattctaagatggggaagatttgtagggatagcagcaatgttgcgaaggaacgggagaagataattggaggggtttgcatcaaaacgagttgggctcgggaaagaggacgaggatgggctggcatgataggatggtacaggactagggaaagatgaggattgtgggcttggttgaacagaggagcatgcactaatgtttgttgaagcaaccccaatatctacagctggtggctgagttccctatatgattatgagaagagaaatttagacatagttcagagataggaaataggataacagtacaaccatcttatacagaacaatgaagagcaaaccataaatttaataaattataaactaagttcaatgctagttgtccctaatttcaacttctttgaacactggtctctccaactatgagctaaagacttaaaagttgaagtcctaactgttcatcacaaatctccatcaatctaagttcaacttactctacttgtttatctccaaactaagatatagcagttagccagatccctcaaccaagatagttcacaaaacaccaaaaagattaagaagatttatacattcaaatagcaatttggaaaagataaacatgcaagtaaagctgcaaacttgaacccaatgaagctgaagccccctttggtctatgaagattactcagatcaaatcccaaaaatgtcaacccagataataaagctcccaaatttccaatcaaatcaaacaattgagcaaaaaccataatagcccagaaccctactgtgtcccaccagaacccagataaagaaaaatgaggacaacccacaaaaaacaaacattaaggaaaaccaaaattcaccctcaaaaatgcatgaatatctacaaaaactaacccaaaaaaaattcaagtcttgaagaacaaaaagctcagaaaaaaatataaaaaacgaacctttcggtaagtagtaccatcgtcttcaacaacccaaccagcttcagagcaaagagctttcaaaacctcgttgttatcacagtgtttaggaagtttatagtttccctgagctctaagaccagagtaaatctttgcagcaatggctcttctccttctctctctcctcttgttgttctctctctccttccaagtaggtaacctcccagatgaagcagctcccgtcatttctctatgaacaaaaatgaaaacccacctccttcttccgctcctctgaatctttctctctctttttctctagactctaaactgtgttgtgtgtgaattggattggagtgtgggtgtgtctgttgctttgggcagagactattcttctctctctctctctcactctgtccctgtccctctctcacgagcacaacgctttctttactccaatgagttttctatatatcaaaatcatctctctctctctctctctctctctctctctatatatactttttcacactcgtgcatatcaatcaatcaatatttctataaaacgaaaattctatttctaagacaaaaatgagcttatttttttctatttttaaagacaatatttttgtttattttttttcaagctttttaatggtatttttatatgattttcaaatttcaatcctaacttttttttaataaagaaaaaagtttaacgcttgtttgtgttgatttagtcttgcttttcaaaaaaaaaaggattttttcatttagtctaattatttttagtattttttctaaaattaatttgtagtcaattaattttaattgctttgttaagtatttgtgtcaagttttaaagtaattttctaaaatcaattagtattcaattaaaattaatctctcaaatgattcattcctaattacattaaatatatttattcgtaccataataaatttagcctaattttaaatatggttttattattttgtaatttcttagttattaatgtttaggaatagtttatatttatatattagatattgatgg

SEQ ID NO: 300111 - DNA, 2666 bp, Cannabis indica
agatgagagggacaccgacgggaggtggcggtagtccgatgtatgcgatggagaggagatagagactgacgggaggaggggtgggtagagatcgatggacgagagagacgagaagaaagggagatcaacagagggaggaagacgtcgagagaggagggtgatggtgtggatgcgtgtgtggggttttggagagttaagatttttattttagggtgtgggaaattgagaaaaaataggtgagaataaataggtgggcatgtggaaaatagaaaagaagtaggtgggcatgtaagaaatatggcgagaagtatgtaacaattttttattgggctcttatacctgacggtttaaaaccgtcgcccgtcgcccgtcgcatatactataggtgacgattttaaaccgtcgcctataagagcccaataaattttacgaattccaattaaaatcatcgcctattcctgtaattactgttaaaaaccgtcaggaatactaatttttctcgaccgttttaaacagttacttaatttttttagcgacggtcccctaaagaaacatttttaggagtctttcctagaaaggctcaaaggccacgagcgatggatgtctttatttattcacaatatcataacttccttttatgacactatagcttttaaggatgtccggggtggacttgagtcgatttgaattttgaaaaaaaaaattgattgtggagtagtggacgtaaaacaaagtactttttgaatgcaactcaatttttatttagtaatttaaaactttaattttttggggacttaatttatttattttatattcttttacaggtttggttatattgatcgctagctgtataatgaggaatcgaaaaatatgtgataaagaaagttgaaaatctatgcaagtggtgcgacggcaccaaatgtctatgcacccgcatcggcagagagcacctgccaagttgagcaaatcgcgtgcccgcacaaagagtgatgtgtacccaacctaatagaaataaaaattcttattgttttttttcctttccatcttttcattcttttagtttcacatttttttttactttcttcctctattttaatttttttctccttttccttctaccatacacaataaaactatctcttattcgtctatttaattcatcatctccatcattccacttttattcttcttctctgtcaaaaaaggtcttagaatccattattttatataattagttatgttggttaggagttagtaatagagagaggaaactttttgttattttgttagtaacagaccttggctattgcacttgtatatatactcttttattacataataatattacaattttaccttctaatatggtattagacgtttacaattctctctgaaattatcacttttgtttttcatccatggcgagaatgagagctactagttcaagaaattttggccaaacttcattgtcaaacaactcttcttttataccaaatgctcccttaaatcctttaatcattcttacgactttcacccttaccagagataataacaaccaacaagtcatcaccaatactcgacctgctcacgaagacaactccaaccctgatttttcaaacttcagcgaacatcctggattaactccagtcacaccaccactatataatgaacccttctagctgttgcatcttgagtttgagctcttggttgtgtgagtttacacttgttttgatgtgttttcaagtttggatggattttggatgacttggagttgatacaatgcaaaaataccaaagaaaaggcaaaaaaacttaaaattgatgtttctagagttgtgcgaccatgcaagtgtttagtgtggctgcgcaactattttacaaatgtatattgggataaatttttaacaaatcctatttatatcctttcacttgggaaaaatgatgagattaagatttaatttcaattttgattaaggagactcaacttttgatggttggaactgaaaataaacactttgcatttttttggatgaagataggatctagcgtttagagttattttcttatatatatatattttatttttatagtttatgttcatatatcttatttgtagagttcttaatgattaatatgaactaatttctatttagattttctaattgactctattgaaactcacatatagtttaatttaatatccaattccttcttcatctaaagtttactcaattcatgtttattgtgtatgttattgattgtgcacctcttacacactatctatgaaatcgaatcaaaacctgagaagtgatatttgattatgctaaaaatgagtatacatagatttcaattttgaatgagagtattgttggcctagaatttagccaaccgacatcggagtcgtatttattactaatgcttgccacatgttacaaaataagagtaaaaaaataaataagacacgagattttataatggttcgactcccttatttagtgggtaatgacctactccctaatctgttgtattgataccaaagataatactacttagaccacaagtgttgtggaatctgcagtatctctcttaagattacaatatgagaatggagttggcaagtcttaagtgagggagagaacaagcctatgcgtgtgtgtgtgtgtgtgt

SEQ ID NO: 300112 - DNA, 4019 bp, Cannabis indica
catcatgtgttaaatcgatattagtgcaaatttaatatcgagtttcacactttttgattaaatcaataatataggaaaacgcaaactactcacaatgtgatacattagtataatattaggcaacttagagtgcctaatagcaattctcaattaataatagtttaattttaagtctatccaattatttgagacataatatggccctagttaagaacgatgttatgttattatgttgagaagttttatttatttttagatgaaagaattgtgtaattaattatgtggcagccaataatttcaactaaaattagatcaaacgattacaatttaaattacacatttttttaatcaaatacatataattgtgtctgtaactatatcttttagtaaactacacaatagttttgacctatatatttatgtatgtaattttagtgaatgctttcctcttaggttgatgtgattaaagaaaggaggacattaatccaagcttcttaaaaagtttgatcaaatatagaataaagctattagagtgctttctttgcaacttgcataaaagaaaactcataatgaaaggccaagaagaaaaaattaaaaaatctaaatataaagttgagaattatgtcatataccaattaaaaaaagttaaaaaggataatgatattgctcctgtatgaaacttttaatgcccaaatgcgtggtatagaaaatgatatgtgcaaagtgacatgagtgcactaaactttacatagtaattgcagcagcaacatttgtggtcgtaaaacccacaaagccaacctaaaagagatcaacaaacacagtagtagacacatgaagaaacatgaattgtatttgtttatttatattaacttgttcttttgtcatttatatatacctgcctacctttgagatagtgatcttcataaaccccattctttatatacatgaggccccatgtggtcatttaactatatatccttttcattttcttttctgtaattgatatttatcaaataaattatacaccttatatggagatgaacttttccattacagtctgaatttcaaacatcagatcatatcaacttttaccctcattaatcatttcagtgattttgtatatttttactacacaacagaccacttgggacaattatttcttttgcattaaagtggaactttaaggccattacttctaatctttggcactaagtgagtcaaaatcattatgaaaaaaaaacccattgcaaccttcaaaggtcgagtgtaatcaatatatactggttacataagctataaaagcttgaatcttaagttcaaagaaaatatattcacaataaagcatgatgctctaccccaatgagaggcaatagtatatgccaccatgaagcagaaaacagcagtgagaaaagctagacttggacttggatttggtaaagagtgtcaaagaagtaaacaaatgattactaaaaatgtattttattttattttttctttttcaaaataaataaaagaccccacattttacaagggtaatgttatgtggatcattctatattcgagagaggagataatagatagaagcaaagggatgcttatattaagtggaatgcaaactcagcatcaaatataagtagattagtgtagtgattgtgaggaagcacggtcaacttggccatattgggtgcgcaaagcaaacaagggtggaaagtttttttaatagaaaagtaaggcaatcagatacagtggacatttcataatgagtgcttagtgactcacatttcttttcttattttgtccacatagcctaatgacatgtctcattttgtgcagttatttcttttattattatacaacaactatcctttgcgtagattgagattattctggttttaaatcattcctttgaaaaagaaaaaaaaaatactagttcttgtaatatggtcagaaagatattggtttagtcaaactgttgtttatagaggactaattggataatgtcatgtctagtcgtcttgattttctaaattgaatgaaaaatcactacaaacatgtctggctttatcattgaaacttcaaaactgcaaattgtaattgtaattaaggcttctttcgtggctaaagttcaagagcagtagagacttttgaattcaatttcatggtttttcttcagagacaattacattagaacattatcaaatttcatcaacttttgattgttcaacaactttctacttcatacagaatcatatgacaagagttactacaaccgaaattacaatataacacttttttttcagatgacaaattctattttcataaatacaaaacagagaggggtgactggctactaaagtgctttctttcgtttgatccacgtgatttaatatctggaggtttgcacttcaaaaatcgaagcttgtggctttgaatgagctgcataacaagcgccaccaccaaatagattttggcctaaaggcaatttaagtccattgggggcaatatcatatggtgaagaagaagacatgaatagattgccacaagcagagcccaaagccatgagtgcttcttcatcactaggaatattccagtcacgtaataccttttgtgcttcttcagcagaaatctgtagtgatgggatcacagaggagtggtccaagaaagatgcagtgttgttttctgaagtagtagtggtttcagtgagattataagtagtgaaatcatgtatacttggtctccttttatctttccctcctgaatgctgccttaaataatacttttgtgcatgactagccacttgtgttggggtcttagtgataacgaaattccttgagatatttctccaatcccctttaccatatttcatcagccccagcaaaaatctcctgtaacacaacatctcagatcaattagctttaagcaacaacacaacaaagaaaacccaattacaaaaaatgatttcttaactcaatactaagctttttttgatagataattactcacgtgtgctcatctttggtccaaggaacacccttttttctttcgtggtcagaacctcgagctgaagagggaggcctctttctaaaacaatcacgatcatcaaccaactcaaatggaaaaggagaagcaaggtacccaggaattgggaccctcccagcttctatatcactaacatcatcttctagatccttgtactgcttaatcacatcatacactgactttcctgggatcattgcagccacctttgcccatcgattcggtgtcgtttcatcatatatagctagagccctctcaaactccttgttctcttctttagtccattctgaactttggcttccttggaaaagccaactcgaagtcgatataaacgaagttgggtgtagagtttccatgctaaatgagtaaattataatctcagaaagtcatatcagaattggttaaagtttggccagtgagaaaagcagaggtgagagtaaaggcagaaaaaagttgaagcttgaacaattgtttttaaaagcattgaattcagaatattttaatgggaatcaggaatctcctttgcctaatagcataaactaaagaatctaaagaaaaaacagacccactttcagaatcggagggaatcttggaaaaagaatgagaaatctgataccaaacaggtataaactatagactcagagaagaaaaagcaaaccccatttgaaaattcccaactttgagctaaatggaagttaataagctcaagaaagtttaagactttataccactctggcaaatctaagctccccaccactccaaaaaacaaaaaaattattaaaataagatgatcgaatcaaagggtggctccaaaagggtggagaaagaaagctaagatgaccccgttgagtggattaaaggagagagagatactaatctggggcatcagagtagagaagcgggaaaaacaattactttctatgtttctttatggagaggagagagagaaggtaaatatatatgtatatatagagatagatata

SEQ ID NO: 300113 - DNA, 2431 bp, Cannabis indica
attttctgatattccattagcttccttgatgatctttaattgttttcagctttgtaggactatttgattgagtcagtactgagttcaggaagtcatttttattggcatggacgagaaaatgggagagaagaaaaagcataaaagtgagaagcacaaggagaaaacaaatgggcatgaaaaggatgacaaggaatttccggaagatgaagaggataccaaaaagattactgatgaagttgcggaaactataaagacaacttgcttagaaggcgaagacagtacaaatgaaaaagcaatagagcaaaaggaactaaaagagaagaagaaaaagcacaagaaggataagaaaagaaagagggaattgctggaatatcatcttcgggtgagaactgtgaggatgatgaaatggatgggcatgagcttaacaagaatttccaagacacttctgcagtgagtagccaggtacagcaggttgaaaaggaaaagaaaaggaaaaaagaagaagaagaagaagaaggaaggagttgatggaatatcttcgtcgagggagaatgttgaggatgaggtagtcaaggtgcaggaatgcaatgtagtgaatgacgagatggactgtgctgaaaagaaaagaacaagaaagacagagctgatggaatatcctcttcgggtgaaaatgctgcgaattgtgaaatggaagaattagttaaagggcaaggatacaacaagaatggccaagacacttctgtagtggatatgaatgtagaacatgctgaaaggaaaaagaaaagaaagagggaaaaagatgatggtgataatgcagtaaagaacagcgagacagatgtacaaaacctcccaaaaaagaaaagaaagagggaaaatgtgcccatagaggaagctattgctgacaatctgggtactgaagataaattggatgatgttgttcgtgctagtgatgagggcaagaagaaggtcaagtcaaccaaacgtggtgaaggagatagtaaggaagatgattccaagaaagacaagaagaagaaagccaaagcaggaaagcaagtttcagatggaaaaggtaacaagcaaaaggtaagaacaaaaaaagatagcaagactaccgagacatctgagaatctttcaccacaaggtaaatctaagagagttactttttctgatcatgtggaggttttttcaccatctgatagtccaagtgtccagagtaagcaagtgggaggcctagtacaaggtaagcgcttcacaccagaagaagatgagttggtcaaagcggcagttttgggatacatagaagagcgcggtttaggtgatgcgggtttagacatggttctcaattgcaaatcacatcgtgaagtgaaaaattgctggaagacaatagccttagctctaccttggaggccacgctatagcgtgtattatcgagcccacatgatctttgaaaggagtgatattcacaaatggactcccgaagagtacgagtgtgttttaaattttcacaaagaacatggagcagattggaagaagctgtcgaaacagttaaacaaacatagactacacgtcaaagatacatttcgaagaatcaaattcactggagtgaacaaagggcgttggagccaagacgagtactcaaaactatttgatttagtcaacatggacctacgtttgagggcgtctgaacaaaagagagtcaagcatggcatgttgagggataatatttgttgggaaataattagtaagaagttgtccaccaggcaccatgttggatgctgctcaaaatggtacaaacaattaacatcaccaatggttgttgaagggttgtgggatgacaccgatgaccaccgcctggttgatagtctcagcgacttggatgctgcctgcatcgaagatgtggactgggataatttgcttgagcataggacaggggatatttgtcgaaagcgatggcatcaaatggtgaaacatattggtgaccatgtgaacaagccattctctgaacaagttgaagttctatcaaagcgatattcttttgatgtccttgaagcaagggaggaatataacagcaaggaaccagtagactgttaattgaggtttctgtgaacaaatctgtatgtatcggcttgctgaatgggtgcaattacaaggatcagattgttgtattctcactttctcttttttcctatttatatcttatatagagagagagatggacaaaaaaatatactaagttacaattatcacttcgttattgtttagaattaatatctctatgaaacacacggtgttgtagccacactaaaataattgggttttaaatttgatgataaaatttaagtggtgttttgttaagacttttgattaggtgcgggtggtgcggtttttaactattttttcaaatcaatctgcacatgcggtttttctaatt

SEQ ID NO: 300114 - DNA, 4159 bp, Cannabis indica
tattaatgttttcttgggtttctcaggatgaatttgctagcttgccacctattattccaaagggtcccattgccattcttggattggtaatatgagagtggtgatgacattttgttcaagttttactattgtaagcaatttttgagccaaacaggtgatgttgttaaatgttttcagggtggtggaactgctgctcatttgatgcttgatttgtggcctgaattacagctcgaaggctgggaaatcgatcaaatagtgaggactcacttgttatctctcttcagtaattccatgtgaaggttttgataaatatattgcttttgcttaatgatttgctctctcattgtcaaactaaatcctgattttttgataaaaatgatactttgcactaatcaataggataacaatacaaatgatagttttatgttttcaccattcaagtacaagcataaaaacctgccaataagcataaatacatttatagaagacaaaaacaaacataatgattattactcaaaatttacaggaaactattccagtccagtctaactaaattttcggaaaagactccatacagagatgaaattcctttcaaaggactttttctgtcattcctttacctcttttagtgtcccactgattttcagcagctctgtttctactcttaacaactttatgccaattactttaaatgcatcaatgtttgctggttcccatttgaggacacgatcaatatttgcttgaatgataccttagctgtcaaaccaatgtgttcaagatattttttattttgatcataagttttccacattttacccgtgttctgtgatacatgcttactggttgggtattctagctgattgataaagcgagagaacattttgcgctttctgatcttgagaagcatacaaatgctggtggtatacttacagttcatgttggtgatgccttttctccctcaattaatgtttctggaagatatgctggtgagatcattgtaccttatgcttctattttcaacacaatataatgtcaaaattaatactacagaacatgttccttttcaaaaaaataaaaagtaaaaataagaacatgttacgcaccgatatagactagggaatatgccatttaagttgcaagtcttgtaaaaatggaatatttacactaaaattaataataaaaaggccatctctttgaatttttctggtatgtaattgttcatttatggccagaaattatttcaagtctctcccatgtttttctaactagttgttgcagtaaatgtcaggtgttattgttgacttgttttctaatggagaagttttggcacaattgcaagaggtgagtaaattttctcattctctgttgagcattcacattatgtcgcttttgaggtttgatacacagataaaaacgtgcctgaaataccaataaaccagcaaacattagctaagaaatactgttccattgagattgttgctactgtttgctggtttattggtatttcaggcaggttcttatcagtgtctcaataattgtaaaagaaaccaagtctctacaacgaattgaaagccgaggctctccatggatgctaagaaatacttagttcttgcataaccttttacacactcaaacacgctctataggagcagctcaccctacccaagagaattactaaaactcccctccactcactctcacaaccagctagccaaacgaatccacttcccctgtagctgtatattctgtctattcccccctccttgcattagtaaatcttacactaggccttatcatgcctatcagatactctctttatttcatgatcatgctcaaagtttctggagaagaaaggtgtcatgggtacggcattgttagtcatctccatcctcctcacccaacttaactcttgcattgggagatgttgatagttgcaaatttgatattattttgtttgagttaagaatcaatcaaataatgtttaaatacataaaccaaataaacttcactgcggtcactatttttcctaaataagcctagctattaacataatagttcagtgttgaaatacttgaaaaaatggcctttcattcagaagaacttattctatctgagcccccttgtcactcatttggccttaaacccatggtacttcttttttcttcgaataattaaaccctcgatactcaatcgaaagcttgatggaaatctgactcgaggtgtgtctacaactaggttagagctagaaagaaagatgaagaacaagttttagcatttatgttcaatctagaatcttcaatgtacctttattaagaatttgattaattgagtgaccctcctaatgtcttgattatgtctcatatatttcacatgtttccaggaatatccttcgttgtgttattaccatagttgaagtttttccttaatcattgtgtactagtgtgtggggggttgcattggaggttttggacacgtgttatttcagttttctttcaatgttttgtacaggtcacaacatggtcgaatttaaataactggttaatgccaggaggtcgtatcatggtgaattgtggtgggattagtgcgccatctgaagttgaccctaaaatttcatcagaaaatgtcttgtggatgcagaattctacaatcaaggcattatctatagctttcccggaacaagtaggactctgatgaatttattacttggtttgatttcagttattgcaatgacagctattttattcctttaaatgttctataattatatctacatacaacccaaagtttaaatgtagaaaacatattgctatgctgcaaaattattcaagactgctgggaattttcccacagaagatgatgcaaactagcaatgtctcctttttatagtaaatgactagaccgtggtcaatgtctcttatattctgagaaagttggtttttaatctctcaaagaaaaaaataaggaggtcttaatgaaacagtggtgttgtaattgaacaatctatgatctcttcttagcaactaaaaatccaacttttaaatgaaaaaaagtagaataatttagcattattttactctgtttggtgtttttttttgggccatattatgatgtttatgtgctttgcttttgaatattgttaccaaagaaagctcactgtttgacatttaactgttcacagataagctggaaaaaaatgggaaaagaaaatggtgcaaattatcttgcccttacaggaccaatacccgatttagagtcatggtccacaatggtaccagagcctctgagcaacagtgtaaggcaatggaagtcatgtgaaggagaattaggccttaactagcttgttgtatgaaaatcgcttcacaggttgctctaatcaaaatttaaacaaataaattcctctgctgtagaccatcatcacattggaacacgcaagcggaatgtgaagtgaacacatgctgaatcctgtaagttatgaggttgactttatcttattttaatttaattatttttttccgtgggagtaacgtagatgttggagatgatttgctattcagcttgacttttgttttaatatttagtagcttgtaaaatgatcaacaatagaatagacaaatataaactgatcattttcaaatgatagttgcattgattgtcatcacattcctcattccaatttgctgggggtataatgctgtatgtagtctggtttcttgtggtgcttgatttcatgttttaaatttcaactagcaaatacacctaggttgccttgcgtagacatgaattttctagaaaatgattgagaaaaggctcttccatatgcagtttcttggaaaacccaattagtgcacatgcatctataccactagagaaaaatcatgccaactagcttcatcttcactcagatgtaattttgtgctagaaagttaaatagaactagaagaataattgtttgaaaaaaaatcttattcttaatatgtagcatcatttctcaaccaaattttgccaagtggactctaccttcattgttttactacaggaagttaatgtagctctggcttggcatgtctttagatgttagctttttcttttgagcattgctattaggcaccagtggtgcctagcaccttctcgacatgtcgcgttgcgattggctagcgat

SEQ ID NO: 300115 - DNA, 3162 bp, Cannabis indica
taactattacaaatggattcaatattataataaagatagattcaaattacgaataaaatgtagtttataattttttttttgttttttacaattttacaacatgaactttttatttacaactttacaaatttaattttaactaattaaaaattttattcagaattataatatatactaaagtatattttttaaatgttaaaaattcttctaaaattattttcttaactatgcaatcaagtattgtaatgataattacacactaaaaccaaaaccaatgtaattctcattacaattaacattccattacaaagaaaagataacattttaataaaaatatactaaaaaaaatcaaagtctatattatccttttttttctttgaatattttataattataaaataaaaacaataggattattttggtcaatacaaattttattctattgcattctcataccaaaccaagcacaatgattctcattacaatgttcactacaactacaaactaaatattgtaatcaattcgtattaccattcttattccattacattactattactattaccattatcattctattacaccaaatcaaacactacctaaggtcctaccctaggttgtgtactctgcatttattttgacatagtcataacttaagtcacagccccatgcttggctgcttcctggtccatcacctgttttgatagcacagaaacaaattagagttaattcgtcggagaagacaatctgatggtgaatgctgctcgcccgccttcttcgttagataacaaagatgacaccaaaatacaggcaaaattttgaaacttaccgacagacactttaatttgaaccgtgccgtgtgtttcgcctgctttcttgaggtattcactagcagcagaactgaaaaaaatttccacacaacatcgtcaaggttacaaattttaaaggagaatctcaagtataaagggcgacttttatgattccgaagatgaaaaggaaggcgtctaatgattacctgtcaaacaattgtggttctccaccatccattaacaaaaaatcccccaacaccactcgaagtttatttaggtcaaagggaactcctgcatagccagcagcacaagcaatgcgaccccaattaggatctcttccataaattgcagcctggataacattacaggtagtgattgcattagaatttgctttaactaattctacacaatataaggctggtaaggttaatgtcatgcctttataagcgaagaagatgctatggtgcgggctatctttgatgcttcagcttcattgcaacccccagtaactgtcacctggaaatatccatgttagtttcagaaattgaatatgaaagtagtttactcatagaagaacaagtcatcaaacaatatcacacctcaattaggcatgttgctccttctccatcccaagctattgatttcgcaagaccttgcattacctaaaatatatgttagaatattcgatatatactgaaccccaaaacccgttgccattggaaaacacgaaattccccaagagtgtaatgtttttggctgatctgactggaagtgtatatatctttacacagtagatggttttggactatatttttattctgtataatttggaatacagacactagttgaacctcagatgcctcttaccgcatcaaggcaagcttgaatttgcattgcttcatcactttccaaggatgaaatcctgggtgagccagataatccactggccaaggcaactacagtgtcattggtactagtatctccgtctacctgcattaaaatcactcctgaactagttagcatacaaaaactgtaaatccttaacacactggattaagcaactgaaacttgatcaacagtttatgtgcaggaacttctccaggctatgattttcactaaaaagaacaagaacttctagaaatgaatgaagtacaaaaaagaaaacattgacatacagttatttgattgaagcttcggtttacagcaacctgaaccatttttctccaaacgtcactggtaacaacagcatcagttgtaattacctgaaccgtatataatttgaagcagattatacttctattatgatccttttgaagggagataaaagaaaagaattagaagatacttacaccaagcattgtagccatgttggggtggatcattccagaaccttttgccattccaccaatagttatagtttttcctccaacctgaacaattcatcatcaacaaacattacatttgtctagttccttaagttctgaaacctaagaatagaattgcaaccatgtacagctccagctcttttagtttagagacaatttctataatatatatacctctctccagaaaagtagaatgtaatagttttttttttcttcaattctttctatgcatctaagaaccaattcatatagaaacttgtgagcaaactaactaaatcaaatcaagacagcattagtcacatgaacaggactttctccacacctgagattctactgccacactcttggtaacaaggtcagtagtggtgattgcaacagctgcagaatcagccctgcaagccaaagcacattattcaagaatgttagaaaaaaaatatacttatatattatctacagacatatatataaacttgacatgcacatatgagttgatgaacagagttaagaaaaataaaaggaacttacccttgaactgaagacgagagtgaattaaccaatttaggaagagattctagaagtgcaccctgttacaagttaaacagatagggaataagacaaagcttctaagctttttagctggtctgtttgttaggatttggaataagattaatgaagttccatctcaaaaccaattggctatggaaggagtagctcattcatcttatatatggtaatttatttccacacattaacaatgtgggactaactctaatacactctcctcacgtttgggcctggaaagtatgggtataatgaacaacctttaagagaccacagggccaaacgtgacatttgaaagaatcccacaaggccaaatattgagaaatttgtgagtgtacacgttgggaaattgtgaacttttgaacaagtcaaagatcccaacactaggaactggcacacattggccg

SEQ ID NO: 300116 - DNA, 1667 bp, Cannabis indica
ctaaaaataaaagaaaaattacaaaataaaaaacacttagagagttgattacaaacagagacataattatcaatattccaaaaatatgtttattaattattatatgtatagtgatatcatcaatttaattatatatacatttatgggacaatatatgttttttacgagacaaaatattagccttatagtattttcttttaagccttatagtctctttttggttctatccagattaggaaattgatgatgtgtagtaagttcatgcacacaaatatattgtaaaaaggaaaaatagacaaaagagaaaaaggaaaaagataggaaaggtgtgtatcataatcatgaatcatgactacatatatgtattagtttttttttccttagatatatatatatttatatatatatatgtatagttagttgaatgaatcacaatgggaatatataagataaaaacaagattacaactatatatagtggaatatctactcactatacatatcttctttcggtttatcattttgattccacttttttgttttgtttatttgtttattttaaatgatctaccggtttatcatagtttcatgcattttctatttcctttttctgatcgacagaaaaagattaggaaaaaagttcaaacacttatcactctgtcggtttatgggtcagttattattccaaccaatttatatatttatatatggatatcaaaaaaattgccccgaaactatgatgcacttattttttttttagagaaaaatgttattatattaaaaccatagtcaaaatacaataagcattagcggaggagacatttcctccaaccaaatacaaatagagtccatcgaaagagcatacttagctaaaacatgagcaacagtattcgcagatctgttgacatgattgatctgcactctagagaaattagacgctaaatgagtaatattagttaacaagctatgaaagtcaaaaatggaggcttgaaaagattgtagccccttaaccacaagcaaaaagtctgtttcaatgtagtgcattggtaggtggtgatccttaagccattgtagagcgtacatttggctttgtaccatgaagttccttgtttctctcagtccaaatacaccaaaaagttgtgataaattgctccaattgtaggtcattccatgtattagcatcagtgattagtaattctttgagactcatatggtgtgacagtaggttactttgagagagtgtggaattttgccaaactttctcgggccttttgcagagaaaaagtgcatgaatggtagttcctttgtgacaatgacataaggaacagttaggcagatcaacaatgtgtcgatggtgaaggattgcagccacgggtagataatcatgaatcactctccatatgaaaatttgcaccttggaggggacagaagtccccataatttttttccgaaagtgagtagtgtgagagccactaaccgttggattttgttcttccaagtgtgttgctaaaaagtaacccgatttgaaagtgtacatgacatttgattcattattccaaatgtgatgatcagggcggggatacaaagtcaagggtatgctctgctttccacaatggctaattttgacgaatcatcaagctcgcttagtactctttccgcccctcttgc

SEQ ID NO: 300117 - DNA, 2417 bp, Cannabis indica
aaaaaaatttctaattaaatggaaaaattaatcataaaaacttaatttttctaatattactcattcatgagtaatacctattaagagtgcacccatatataaatatgcatgaattagattggattggttatttttaatatcaatcaacatccaatcagcacaagtgcagattttagattttccaatctaatccgcataagtgcaaatatccacactttgctgattggattgaatttttataaatacctgtaaatttatttctattcataccactataaagaaacaaatattcctttttgtaatattaactaatataattgccacatagaacagtctattaattatctcacataatatgtgaatagattcactgcttttctcttcctcgaggtattcccaaaagttttaaaaaataaaaaaataaagaaataaagaaataacgaaagaaaagaagatgagaaaggtaatctttacatatttttctttcaacttttgtaaagtgtaaattattgatttaactggccaaactatggcttttctagctgataagaagtgcacctttgaatttccagcctctcgggagatgagatacgctgaccacggccattgactcatagcatcctctgtaatatgcatcctacagtacaagcaacatcgctgacgacaccagagatactatggattctcccaaatctatggagtttatcttaaaagaatgctagcaactcaacttctaatcaagtcaagcagatgagaatagctcaaactcaaacaattgaattaattgaggttatattataaactaaaacaagaaagaaactagatatttgaaaaatagaaagctagtgtttcatactaatgtaacaacaattcataaacacattaatgtatgcatcgatcgagattaatgcagaacaactggatggacatatataatattgctagttgcaactgactattcatattagaaacaaattccttgaaaattaggcagaacataaaacaggagtagcaaaacttggaatcccgtctcaagtcattcaaattcacttaactaaaatagacaaatgactctgctttagttcccaatggcaatggaagaactgggccttgtctgctttcttcaagttggtatcagccttcaaattaagaacagaaattcaaactcaaactcaaactcaaactctagccctcttgctactgcaaccagggcacttgtactgcttgatgtgctcagccttggctggtgtaatcttcacacatttaccatggaaccatctctcgcacacatcacagcagatccagaattcatcggcaccatagttatctccacaagccccacaggtagcaccttgttcgtcatcttcttcttcctcttcaccactttcatcctcatcctttggtggtgaagacatctttactcccttgggttgggactcagattgtcgtgactgcttaaaagacagacattcatgtagcaaaagatgattaaagtatgaaggtaacaaaaaaaaattaaaataaaagcaaatagatagtagaaaggatgagtgatacaacttcttttattcccaccttgccacttgatttgcttttgccactattgttctgggtagcagactgctcctttgattgtttgacgacactccccgttactacttcaaatatggtgggaagatcatttatcatctgaaaaagccttttcctgcaaattccaatcaaacaagtgggaaccctatgacttttaatttaatatgatgctaataatagtaaatttgcacattaatcttggatggcaaggtggcaatatttcctaaaatcgtgtaggatttaaaaagcacataatagccaatagatttgtcttccaagtatttaaatgttgtgtaagccaattacacaagaaagagacatcaacaaaaagataccaacaaactaacacagacgctaatttatacagccaggaatatactctgcaatcgatgcaagtaagaatttatacaggaaaggaccatggcttatataccatataaagtaaactatctatgttcgatttgatgcataaattaattgtctaaggaattgaaaatatacaattgatctgtgcagtacatgcaagattctcttagtttcctagcacctgaatctgtataaaacacaaatcaaattaccaacatcttagttgcaggcaaagccaatataagatgagtcaagagacttgccagaacttcaagcaaaagataataataatatataaatacatactattttctttaagcaagcagcttctaaattacagtgacaaaattgttcaggtcacaccaattcaatgtacaattgaaaaagaagaaatttcccaatcaagggaaaaaaaaaataatgtgttccatatttattattcttttgattgtactaagtca

SEQ ID NO: 300118 - DNA, 4683 bp, Cannabis indica
ggcacaaaacccaacatatatattaaaccataaacatgtaacatacatgtaatcataaatcacttcaaaattctaaattgataactaatcagattgtaatgggttttatttagggcacaaaacccaacatgggttcactagtatcaccagtatttaatgcatgactgagaaggatacgaggtttgaatatatatgcttatgctcttgtcaccatgggacgagtgacaggaacctttggttgaacaataggttgttgttgttgttgctgtggcagaggtgatggtgatggatttggtgaaggagaaggggataattctggtggtggagcttgagtgagtgcaggtgtaccaacatcagaaatcaaagtcataaaattgctccccattaggcacatcatcagaatttcaatgaaatgaagaggaacatgatgagggtgcttctcgatctgctagtgtagattggccaagggaaggagaatctgcattaacatcagtaagaggtacagacaaagaagaccaggtggaactatgaataattacaggcggaggtgtttgataattattgaggaaacccgatttaaaaggaaactccaattcattaaatacaacatttcatgagatatagattttaccagtaggagtgagacactcatagcttttatgagcattgttataccctatattaacacattttatagagtggaattggaacttgtgagattggtagggtcagatgcatggaaaacaagaaacaccaaatacttttaagaacttatagtcaggttttctaccaaacagcacttcaaatggtgagatgctatgcagaactagtgttgccagtcgatttatgagatacacagcaatagcaaaagcatctgtccaatatcttaagggcatgcttgcttgtgcaaggacggtaagtcccatctcaacaatgtgtcgacgctttcgctcagcacgaccattttggcttgatgtgtgtgggcatgagtgttgaaactcaattccatgagttttaaccaaatttgtgaagggttgatattcaccaccccagtcggttctgatgcacttgattttggtatcaaacttgttttctaccaaggctttgaattcaacagaagcacttaatgcatcagctttgaacttgagtggatatagctaggtaagctagctataatcgtccataaaatgtatgtaatatctgtgatttgtattcgagttaatgggggttggaccccataaatcagtgtgtatgagttcaagcacagtgctagctttgttttgagacagattaaagggaagagcacatgctttgccaaattgacaagcatcacagaagtggttcatttcattcttggaaagagttacatgactagactcaaggacttgactcaacacacgaagagaaggatgtcccaatcttctatgccaaacatcggctttagacacaacatgatttttagttcgagactgagctacacacaaacacttaggactggtgacagtcgacataacaaaggactgaaagttttctgactttggagaagatgaacctgcaaaatttggaagaagatgaggctggacaagctggtataggccatctctaagcaccccttggagcagcaccctctttgttaccttgtccttcaccaaacaatagttagaatgaaattcaattagcacatcattgtttgtagtcagttttgacacactaattaaattctttaaaattttaggaacaagcagcatcttttttaacttaagataatcaccattttgtgtgtttaacgcaccattaccaatgtgagaaattctgagcttgttatcattgctcacagctaccatttccttaccagtgtactcttgtttttggctcagattagatgcttcagaggtgatgtggctacttgctccactgtcggcaaacaacacatcattcttaaggatttcagaagtggcaatgaaggcattgtgactgttttgtctagttttgccttgagtttaagggttgttaggatcttctcccatgaagctttcatcaaagcagttgtagcaaacgacagcgaagtgaccatacttgccacacacttggcaagtaggttttggaccattggagcatcctcttcctctataccttcctacatcatcacagttattcgagaaccagccaccaccactgtagttatggttttggtgttaaaaaccacgaccacaaccacctgagtttcctgagttaattttagcagcaacattagcttgtggtatagctccagatgctttgtttacaacattgagagtttaaagcctctcgattttgctgtcgaagcttatgagaatgtcctggagctcctgccaagttgtattcaaaatcaagatcagaaagaacattagcaactaaatgtgcttcagggtagggatccccagccaaggcaagtatatctgcccaatttttcttttgtcgaaagtactctgccataggtgttgagcctttcctcactgtttgaatcagtgtgcgagtgtcatccattttttacatgaagtaagctccatataggctatccaaggcatgccacatatctgcagctaaggcaggccccattaccttagttgcaatgctctcaatcatagagctataaagccatcccataagaagttgatcattaatgatccaatgttcaaactcggggttaacctgagtttcttccttgatttctccatcagcagtggtgacttgtactagtaaaaattccaagggacatggctgtgtgtcaaggagatgaccatgtaatatatggccacgaacgattgtggaaaccatggttttccacatagtataattgtttctgtctagcttcaagctgaagggttgattcatggttgtaagttgctgaggataaggatggacattttgtgacggtaatggttgtgtgttatttctgttggttgttgaaccatgtacaacaaatccttcagaggctattgtgggagctggagtgtcatttctagggttttggggggtcgacatggcagaggccttttgcttgctctgataccaagttaagaatagggtattcactatttgattaattctcagctcattttcaatatgagtcagagtaaatgcatttatagaaaatttggtacaagataagtacaaaggaaatacatccaacgactctttacagttgtaaacaatacaaaggaaatattctaacagaaatgatttcgtaatgattgcaatgataaggacaggtaagaaaatgtgacacctcagcaatccaaaaataacacacgagtgataattcagcagtaaagagaaaaggaattggctgcaatcgtgtgcagcagtagcagctgcaatttggtgagggcataatgctaatacagcacattggcaaaagatgctattccttaacatttttaattaattttattgtttttgaatttgaatgaatttttatttaaaattattacgaaatgtaaatctttaacacattggaaaagtgaaactataattgcattttaaagaggttgtcaactctctctttcttttgtgttttggctttcaatcttctccatatttctgtttctctctgtgcatatatacaatgtatatatacccacattaattatatcaaactattgtcatataaagatgtgctagagtactagagacatgggagtgactgaatcttggttagtgtaaaagtatccaaaattagtagcaaatgtcgttgaagctaaatgagagaataaatacttagatacaagctcaaaaacacaaacagagttgagttaacctttatcttgacttgaataatattattcacccatgttttcatcctaatgaagaagaagaacaacaacaagtatatattatatattcttatattttgtactcatctaataattggtttagtctaaatctctaaattaaccttagccatagggtttaattggtgtttttttggttgaaaacacagaacagtacacacaagagaataaattaagagtttcatctcatggaagctaattataaagtgagagtgaccatttgtattcataaatgagagaagaaagtaataaatgtagagggagataaagaataaatggattgcgcattgtctttgttcgatttaccaatgcctatttttatggttgttgaacgaaaaaaaattattaataattgtagacgctaaaatctacaatgattggaatgagcgtttgtgggcaccgacaacctgcggaacaaagacaaaggatgaccatgaaaccttaggacaccggggtggtgccggtcgaaggcactctgacgatcaagttaataaacttatagtgcgaagtagaaaagaaaataagaaatataaataaatacttcatgtgtctatggttatgcgatgatcgtcggtcaaaccttgctcaccggaatgagaaagagtacgtcagatcgtcgagaaatgataagttttgtcgtaaaattatagaaagtgagcgaatatttgtatatccttcgatcctcccctcagtcccagtgtgggcctctttattatttaaggaaaacgactacctcttgaaacgtggtccatccctagagaaacggtcttcctccacttctccagggatgagctgttgggaatattttaccagatctagatttactaacaagtatgttgaattaacatcc

SEQ ID NO: 300119 - DNA, 1801 bp, Cannabis indica
gtataatattgaaaaaaaccccaattatatattgcaacatcagttgacattcacactaaggtcctaaaccttaacaaaattcaagcattgcatgaacttaataggtatgtgaaatggaggttaacaaatgctagaatgagataggatccttaggaataaacacttagttttatgggtttagaagttcctaattggatgaaggtggaatttattggaattaaatccaactaaaaatattttaaataaaaaaaaaaatagttacaaccaaatcttacttgcactaccaagaacctaacaaactaattacaacagaatccacactatacaaaacaactaacaaaaagaattaaaagttggaggctcgatcttatacatgcatgccatctcagcaatctgcaccaacctcctccaaacaacttctcctctagaattagaagctccttattcaaattttgagttgatctaattttttgagagaatcctataattactttgagtctcaagataggaattcagagttgagaaaaagtaaaaaaagtgagttacaagtaaaagaaagagagcgttgagagaaagtacaaagagaagaaagagcatgtagtgtttcgagtcttaccagttgctctatagttggaagctccattgtttatactgaaacttggattgaattagtgcaagggcaaattcattcatgaggcaagttcaaagatgaagtatcccatcaacttagggggaacctctatatattcttgtgtttgattttttatcttcttctccttctagcatttgcataattcatcaccattcacactattaattttgcttcgcatgctaacatagatctactttcttgttgataagaatagaaccaaatttggttttgtttatttgttcatgtgtgaatttaaagatatacttagttatttttcagaccaaacatttgtttgttaaaatatcaaaattggccttgtgatatgtttttgtgtagggttattctcgaaattttccaacctaaataaataactaaagttgaaaaagtaatgtggtattttgggtataaatatattaaaaatttttataaataaaattatatatatatttaagcaatgcgcggtaaaaatctctttatgttttaatttttatacacttaacttccttattttttttgtggcaaaacccccttaagtttatttttctttaccaatttgatacgtcagttaaatattactgttaaatatcaactgaatgacaactgtatacacatgtgtatatgcaacagtaaaaccttgaagtcgatacagtagtaatccaattggtatttaacggtaatatctaactgacaccttaaatttgtaaagaaaagtaaacttaaaggggttttgctactaaaagaaaaataaaagagttaagtgtataaaaattaaaacataaggaataataatgaatcctcattaaacgcaaatttctgaaaagaagagcaaatattcaaatttaaatacgttaaggagtctcaagctatcaaactctgtatcatcaagagaaagagtaaatttagtcaaattatgaattatgaaattagcataccggccgattataacgagtaagcaattaagcctctactaaattaaataaatttataaaaagtgattataatttttcattaaatcggtaatcttttatatcaataaagagattatttcatattcaataaaaaattataaaaatacgatttatgcgaatttataaatattattatagattataatttggagaattacaccatatactatttttttaattt

SEQ ID NO: 300120 - DNA, 1702 bp, Cannabis indica
taaagttttatttaaatagctttcattttttattttaatcgattcactgctaatcgtgatctagttttcattcaggtatgggagtttgatcaagctcatcaaagatggcttccagttgcagaattggctttggatggcaacaagggtgatcaggtctactctgttgcctgggcaccaaatattggcaggtacaacaaagtgggataaaattacgtattacaggcaattaaatattctgttgcatgtgcttatggaacaaatgaattcagaaagtgcattgtccctaatactgatttctgttttcggtaatactcaggccatatgagataattgctgttgcaacccacgaggggattgcgctatggcatcttggattgacccctgacacaaatggaagactctcggtggagcaagttgcattgctctccggccatggaggcgaggtattaatactaccaatgccactttctttgactgagttcacttactgatatcatgacgattttaatgtagtacaaagcattctgttatttcaatttcaagagagagattcttgagatattggcaaaccaagcttcatgtatagcaatgtttgttttacagtcttaaaatggtggtaactgactgtacatgcggtcttctttttgtgatcaggtatgggagatggaatgggatatgagcggaatgaccttggcaaccaccggaaacgatggagttgttaggttgtggcaatcaaatttgagtggtgtttggcatgaacaggctacatttgaacccaccaattagtgtattgagttttctttctccttgacttcttgttgttgtggtgtctacatataagcctagttgtatacatatcaagttttgtttcttgacaatcgtattatgagcaaattgattgttaagaattgttacatttatttgagtaatattggtattgatgtctttttattacaaaattctcccttcttggagctaactttgtatcaacaaaacatgaattagtattacttgtactcttataggtacaaaatgcttaattatgattagggtaatatttcttcctaaaatttttaactctagacatttatcattttgttattgttattaattgacttggtatttgattggcttatggttataacttacactagatatttgcagcataaatacttcaagttttgagtttgtaaaataatatacttagtcgcataaatatctaatattattaaattgtaatttccgtgtagttttgtgaatatggacttgttagtgtcgtaaatttataatttagaatttaggtctcagagcatttttagtagtattctctattttttagttaaaaaactaaaatagagaattatttttattgttattactctaatgttctctactttaattagtatttgattaaaatattattaaaaaagtttattaaaaaagttaggagctccttacatatctattctttattatagagagttattttttttttattggttgtagtttattttttcaagtttcactccctaatttaactaaggagtgtgttttttttttttttatttttgacaaaatggatctcagttcaaattaaaccatagaaaaagataacgtgggaatccaacgagggggatctccctccccttaaaagttacagtcggcaagtatagagtctcttgtcttcttagctagactatcc

SEQ ID NO: 300121 - DNA, 2218 bp, Cannabis indica
ataatataattcctcaattattcataattatttaattaggattttgctaatccatttcttaatttcgggtattacaccttctctttgacagacttaggccatgttcactattttctcggagtgaaaatttatagggatgctccaggaatctatttgagccaaagtaagtatattacttatcttctaataagacttcatatagaatgagctaaaagttgtcccaaccccacaagttcaacctccaaactaagtcttatagctgggaacccttaaaagatactaccctatataaaagactttgggtgccttataatacttaaatttaacaaggctaaatgttgctttcatcatcaacgagtaagttcattcatactccaaaaatgacatactgggaggcttacaaaatactacttaaagcatcttcgaggtaccttagtttaaaagatggactgaagctacaagcattagatactatgtgttaacaagggtataatgatggagattgggcaagctatgttgatgatatgagattaactaggggtatgtgatgtttttgggaagcaatttagtattttgatgatctgttaaaaagcaaaagattattgctcgctccaatatattgaaagcgaatttcgagctctagcaaatatagctgctaaagtttgatggatcacctccttctgtctgaacttcaagtgcctcttactcagactccaattctttggattgacaaccaaagtgctactgctctagcttccaattcggtgtttcatgccagatgtaaacatattgagattgacctacactttgttagtgatcaaatccttgctagacaactttcaacgcattatgtgctattattaaatcaaattgttgatgctcttttaaagcctctcactactgattgctttaactacctgaaaagaaatggctacctcaccctttcgtttgagggatgttaactaataaacttttgtattgttcattattagttaagtgatagttaaagttagtaatgtttagttaatttaattagctttctgtaatgtaaattcttgtatcttcaatcattataaataaaagtctctaacctaaccaattggttaagcttctctagcattttctttctctaagccctacatttctctcttgtaaattctctccgacattgttaagcttctacaatactaagcaacctacgtacacaaaaaataaacaaaaaataaatgtttaaaaatgttgttaataagattattatattacacttccaaacacgtgaaaacttgtcatgagtaattgtaatacattttattagttactatagtttgaaatacatttatcaaattttagttatttttgtgtacgtaataataatattttaaaattttactttgtatctggtccctattataaaaaacattgtttatttcaaaactaaatatagtataatatatatggatatatagtatataatatatatggatataattgcaagaggggacaatgagtgattttgtcacaaatatatattatatatttttatttttaaactaaatatgattgtgtatacaaacaagagtaacatggaagacaagtagacaacgatgattttaaaagactaatacaaacgacaaggatttgaaaagacccacaacaatgatgagccacattactagttgaattaatttcacaaaagaacctattacttgtaatcattgtgctatcttatcttcaagtttagatagttagtacactaattatccaaacattagtggatatatattgcattttaatcattcattctaaaggtcttagaagtttaaaggtataatgtgagaagttattattaactatatattttgtaatatcaagttattgttaatcattttgtttattattattatttcttttattttattttttgagaaaaattacctcaaaaaacacatcatgtaaaacagaggactaaaaatattattaataaatgaccaatcataatataatttccaatacaaaaagaatcattagcaccattaaaagaaaaaacaaatatagcactagcatcaatttgccaaagccaacaacattaaatacaccattttgtttgttgttgtgacagtcagtagtcctgtgatccgtaaggagaaacactgggtaagctgtgcaatcccacaacgtctggggaaggtcaagtgggatgattctgagactgtgtagg

SEQ ID NO: 300122 - DNA, 1195 bp, Cannabis indica
cattatattatctatgaataatcttgtcagaagaatcatccacgattattaattcatcaagtgttggtctttgatgatgctttaactcttgtaccttattggtctcttttgctttaccccaaagcaccacatatagcccaataatcacagtaaaaccacctatcaggctaaccaataataaaccaaacattaattaattaattaattcctaataatatttgtttaagtaaagagttgtaataccactatgtcatattaaaaaaatattataaatattttgcaataataataataataattattattatatatgtaccttcctatatataactcttcatgtagaaatgaagttgcaatgatggttgtaataacagtggccagtggattaaagattgctgaaaaaactggacctctttgtgagacacaccatgtttgaagggtaaaagataagctagcaacaataccctaaattaatcattaattaattaatgttataacacatcatatttaattaaatgaagattaataatgaatttaaataattaattatatatatacttacagcgtatatacaactgccaatttcaagatgtgaagtgagaagccatgcttctgattttgtatgatcaatagagactgcaaatatagctgattgaattgttgctaagaaacacatccaaagagttgtataagaatggtctggacatattgttgagattggaacctgcataaacatatagggaattttgataatttatgcatgggaaaattaattctttaaacctaattatgtatttcaaaaatttaaaaataggttcactttacattaaacttaaaaatactacccttctcatttttcaaaccccacttctctctctctctctcaaaatcccaacccacggcgcaccaccccatagacccccaccaattcacgacgcacccccaccgacccactgcatacccatgattttagaatctcagatctctaatttgtgcaaggtctgataggttctgatggagtctaatgaaactgtgagtttgtgaggtaggcgtcgtaggtacgatagggcgggtccgacattgggtccgatgtggtccgattttgggatccaattttgttcgatgtggggttcgacggtatccgatgtgtagtctgatgagggggagtctgattgtgttttgtgtatttttttgg

SEQ ID NO: 300123 - DNA, 2337 bp, Cannabis indica
tctgcatcttggtcatacatctttttgatcaccccactcagatatccgagtgttatagatgttaagtagccattaatgggctgctaggaatactttcctctgcccaggtataagaaatgtggaacacgtgtcatccatttttattgccatgtcaaggtgcaaaaaacaggataacatttgcccccaagtctattcgagaccttcctaattgcacgtggacttcacttagactggagtcttatccagatgggtgacacatgtcttcgataataaatgttgatccgatgtgactctgactaggggtctcttcgatatctgaccatttaatgcttattgatggctatacctcaaatcattgtttcatatctgagcacgcttgacggttatactccctgcaatgagtgtataacgtctacttttgggaggaaacacaaacatttgaattttgaaatgattaattattttttagattggttataaatagttctaggaacctttggtgaccttttagccattttatttcttaaaaactagagcgaaatattgtcaactgagttttctcccaagttcttcgaggaattgataggaacttcttgacgacaccatctgagcagaggaagaaagcttcaaatcagtgagtaagttcctcattcctttcttttatacatttgcaatgaaatgcatacatgatttatgaattttgctgtgaatttcacctgttgttgaactgttctaggttaaccgtagaataactaggtttagggtttggaaatttcattcatgtctaaccataacacttgattatctgaatgcacttgaaatttagccttaaaatgttcatttccactcgtctataagattttatcaaaaatcagattccatttaatgtttcaaacttctagaattgaaaattcaatttctgggtggaaccttcgcttttcattctcaatcaggcttcgtcagcatatacaatctatttctcattcattactctggccaactcttattttcttgtctcccaccatttgtagatgaaccctggtgagttttggggaggcaagcatcatatcgaccaagacttgcttcaactccgatacgaagatcacccccatctcgatactagcccatcctcgtctagtgatgatcattcaaattgtagcttcaaagattgggaagtaagtagcaagcatttcctcaaagcccaaggtgcaagatcacttctatcccaaccaaattcattgtgagggatacagccgtttcatctaggaacttaagaaaggttggagacattctcttcctatcagctagacgtatagggtccatccgagtgtggttgacaccttgcctgagggctacccaatcccaactgctgagggcaaacctattgccaattttgttgtgatcattggaaggcctacttttgatataacaccgtccaaacgaaggatgattgaacgaaccaaacaaactgttaggaaaccttcctctaccgaccctcatatttcctgtctagctactctggccagggcggaacaggctcgtcctactgttgaggaggaagaaactgttggggacattaaagtccaggaggtgaaggaccagggcaagctttatcctgctactccttctaaggccaaaggggatgaggaagagggggtagctcaggtgctgccttttggcaattacaatgagtatggagaacctatgtctaaagaaaatgatgtcctggaagttggccgggactatgtcgaggaggagtacattgaggcttgtcccatgagaaggaggggtccgaagggagatcgatggatttctttgccatccatcctaaccatgaaaatattgactaatttttttgagaatggtctcttaggaaatgtcaaatgcttccttccctcccccaatcaacttgctaacgaccctagaaagggttattgcgcatggttgggagcccataccaaaaagggtgcaatgctacctttgttcccgtacttcaagaagatggccaaatattatcacattagtctgacccaattcacacccaagtgcctctgtatctatctccacatttgtgttatacgcctcgcaaggatggagtgagccatcccctcatgataccaactagctattcaacctgaagtcaagcaccaagaaaaataggttggggtatttttaattctcttatatcaaggagtcgtggctgatgggtaccacagataccgtggtgacaaaaataggtggcttcgtggaggactactattttgtcaaggggatggacaatatgttggaaatattttaccaggatctagatttactaccaagtatgtttcattaaca

SEQ ID NO: 300124 - DNA, 6262 bp, Cannabis indica
aaatgaggcatttgaacttctagacgcgatgaaaggaaccaatgttgaacttgatacgatagcactagtgagcatactttcagcagcagctagtttgtctgccttaaataaaggaaaagaaatccatggcttctttgttagaaagggtttttccccagagggacctgtttctcgctcattagtagagatgtatgccagctgtgggaatttggagtacgctattaaggtatatgacagcgttaaaattatagatttagtcctgtggactaccatgattaatgcatatggaatgtatggtcatggcaagaaagcgattgatttattcaggaagatggaggacgaaggattagttcctgaccatatcacctttctggcacttctatacgcatgtagtcattcgggttttatcgaagaaggtcgaagttattttaattccatgggaagggattatcatttagagccatggccagagcattatgcttgcttcgttgatcttcttggtcgtgccaactgcttggaagaggcctacgagtttgtaaatagcattgaaggtaaacctactgccgaggtgtggtgtgctctcctcggggcttgcagggtttactctaacaaagaattaggagaaattgcagccaggaagctcttagaattggaccccgagaatccaggaaaatatgtgctgatatctaatgttcttgctgccagtggaaagtggaaagatgtacatgaattgagaatgaggatgaaaggaagtgggttgaagaaaaatcctggatgtagttggattgaagttaaaaacaaggtccatacatttagtgccagagataaatcacatccagagtctgttaagatatacaaaaaattagatcaagttactaagactttgcaaagggaagcaggttatgtggctcaaaccaagttagttttgcacaatgtagaggaagaagagaaagttgagattcttcatggacatagtgaaagattagctattgcatatggtttgattagtactcccaatggaactcctattagaatcacaaagaaccttcgtgtttgtagtgattgtcatactttcagcaaactagtgtcgaaattctttgagcgtgaacttgttgtgagggatgcaaatagatttcatcattttaagaaaggattctgttcttgtaatgatttttggtgatatatccacacaaaaagaaaagaaaaagagataacacatgttctgggattcattgcttacgttgatcattggaataatttttgcttggaataatttaacattgtatatatatatatgtgtttgcttagaataatttttaaacaatttttggtacttttatgttgatggacgtttgctcagttgagattgcttggatttactacatgatttgatgatcttattcttactatgttatggagtatatttcaggtagctacggctgaagacatctacaataacaatattaataataataacaactctatcttttgtttgatgcaaaccaaagatatatctatatatctatatataattattctcattgtttgttcttttctttactactttagctcttttctgcaacttttttttttctaatgttttttcacattactctgtataaaattaattatgatagtaaactaattaattttattttcttatatatttttgtagctgcattatgtaatcacagcaatccaataaatcatctgatttcaggtatttacagaatcctttccatttttttttacttgaatgatctgtttttttcatctttttgctgcatattttagtgttatactttttatcaatatatgagatacctcagtgggtatattattatcacagatgtaattcttgtgttataacatgtatattagtatttccttttggctaacaactcacttaatcaataatttataatcaatattcttgtgccatttatgacttgattgtattgggtgcatttaaagatgtagggttatgatatttgcttaggtaaaatctatatctgcattgcctttaagtgtttttgcctctttgtgttatggaaatgaacaactgaaagtggtatcagaagaaaccacagccggagtctcggatcgaaagcatagagttttcttttttcttatttagaggaaaaaaaatactaaagaaaatgccaaggaatataggtttcttcttactcggtcaacgtagtttcattttcaacccaagaactcgattactacattcactaccatcaaattccactgacccaattggagaaacatccattttgattctaaacatcatcaattttcgaaggcaaaagccgacaaatgaaatcgagaaagctcttgaacgatgtgcttcgagttgacagaagatttagttttgaatgtactccatagacaccattcagattggcaaccagcttatgtattcttcaattgggtctctaaaagatctgatcttttaatggggtctgagccatacaacaagattcttgacattcttggtaaaatgagacgttttgaggaattacaccaagtgttcaatgaaatatctgaaagaaaaggtcttgtgaatgaagtcacttatgggtttttgcttaatagatatgctgcagcacatatggtggatgaagccattggtgtgttcaagaggaggaaagatttcgggttcggattcgagcttgatttgttagcatttcaaacacttttgatgtggttgtgtaggtataaacatgttgaagtagcagagaatttgttttactcttttagtaaacaacatgagcttgtttattcagatattaagacatggaatattgttcttaatggatggtgtgttagagggaatgttcatgaagccaagaggttttggagtgatttacttgcttctggatgtcccccctgatctttttacttgtgggattttcattaatgctttgaccaagaaagggaagctaggtacagcattgaagttgttcagagcaatgtggggttataagagatgtaatccagatgttacaatatgtaattctatcattaatgcactttgtttcaagaaaaggattcctgaggctttgcaggttttcgaagaaatgaaggagcgaggttgtgaaccgaatgctgcaacatacaacactttgattaagtatctttgtaatgttcggcgaatggagaaggtttatgagtttgtcgatgaaatggaacggaaacaaggcgattgtttgccgaaccatgttacttatagcttcttgcttaagtctttgaaaagagcagaagaggttcctgatcttttggagagaatggaaaggaatggttgtagcttgattggtgatacttataatttgttgttgaagttgtatatggattgggattgtcaagaaagagttgaacatacttggaatgagatggaaagacatggtttggggcctgatcaaaggtcttatatagttatgattcatggctattgtgataaagggagaagagacgacgccctgcgctattaccgggagatgaaatcgaagggtttgaaattggaaccaagaacagagaaattagttgattctatgaatttaaattgtgatgaaaagaaattagctgcataagttgcacgagttaagaatcatgacaattaagttttgtttctttcttttgatgtatcatacaatgtaattgtattttgttgaactaatgaaagacacttctgagtgttgccatgttgttgatatctgatttgaacagttgctaaagctaaattaaatcattgatgacagtcttcagtagattcaaattgctgatattaaaatcaccaaaatttgcctcaaagacaagaaactaaatttcaagagagaagagaagatggggatgcaaactatgtgcacaatacacaaaaaggatcataatgtatattaattaaacataaacaataatctctcccatctggtttctgtttctagacagttgtttcagaagcaggagtgtaccaaccatggtgaatctctacagccttctttctcctcgctaatcgggactttctgcgagctccggtgtttctgtgcaatgttcccaccttgacagctttgtcaatgacggaatatgcatctgcgatgagcttctcgaccgtaataacttcttcggcctgagcatctggcttcttctttagtgtttctaaagcttccaaaacctgcaaaagacatcacaagaaagaccattcaagctgggtaaggcaaatcaactaagccaatttattatcaaaatcttcacccctcttgagtatttcatgaacataccaaatgatgattacataaaagattatcattcctacttaccaaatgattaactctatactgtgctaacttcaagaatcccccaaaacagctatgcctagtagtagtagtttactaagtatatattagtttggctaattaggatttttgcccctaaactttaaaatgtatcaaattgttctctaaacttttttagccgctaaaaatttctcatgaactattgagattattagatttaaggatatttgttcaatttcattcaattttactaattcagtaattacttatatactaaatcatgctcttcgagctttgacatgtaccaaatcatactccctaaactttcatacatgttagacttttcgtgcaaaaattaaacaaaggtccttaaatccaacaatctcaatattttagggagatttttaacgactttaaaagttcaaagaacataatttagtacctattaaagttcgagaagaaaaatcctaattatttaatatacataaatatattaataagcattactactcactcacacctcaacattgtgagatagaacacacacaagtcttcttaattaaatttatcaaaattgaagactattgaaaagactaatctaacaacaaagattctattctaccttcttcattcgagttctgatttcagatttacgagctttgttataaactctccttttctccgattgacgaactctcttagcagcagaatcagctttttttggttggagcagcctcacaaacaatcgaacgacgaataatcattgggtattgaattgagctcatggacaagcaccctgacaagtttaacaacaaccccatttttcaaagcttaaatctttccaaccccaaaacacaaaataccaaaaagaaactaactttatgtattttctgggcaaccaaacaacacaaagaaaaataaagatcttacctttggagaagtaatggtgggaaattgaagaggagaaactgagggaggttgaattggaaggattgagggaaagggaagtgaacttggaaggaagggccatggcgaaacatgaagatgaagagtgaagagaggttgccatttgctttctttctctttctttcctatctttttctttctatcatcttttattgtgtattgttttgttatccacactggtttggtacaaaggtctcttttgtatttgaaattactcttttacccctggttaaatgttgcaatcgaaatcaacaaaaggccaccccaaaacccttatggtaaaattgtagggtaaatatcattcactctatattttgtaaaagttagggattgaattttttattttattaaatgacaaattagaatacctatttttaaaataattttaaataatactctgaactgatttttttgtaataataacatgacataaatgtgttatgacaaaactgcttacgttttttacatctattcgtactagaaattatcttcaagttgattatataaaaaaattgttcaaaattaagtttaatgtcctatttatactattttttaaaaaaaataaaggaattatttgtcatttaaaaaaacagaaagttcaatcggtaacttttacaaaacacaggatccaaaatgatagtaacccaataaaataaaaccttaacagaaaattaaacaaaaaaattgtataatacacaatagcattgctaacctaatacaaattgtaggatttcatgttgtgaaaagtgattgtttaaatgttgttaatgtatcaatcgtaggtgtaataattcggtagatgcaattatattttagggatgtctcattttgttttctaaaactcaagaggggaataaagtagttcattcactgggaaactcagtttacaagatgagagttctcatttttctttagatgttattgatcgttctaatgctcaattaataagaaagaatttgctcttaaattaataaaaatttcttcttttcaaaaaaaaaaaa

SEQ ID NO: 300125 - DNA, 5609 bp, Cannabis indica
ttgctccgggcaacaaacatgcaagaaccatttcaccaaatatgtgtccggatagcccaaattaactgatgttttacaggcttgaatttatttatttttgtcaaaactgcttgtaacgattttaccaatattgtgactttagcaaaaattattattaaaaaaatatgattttcttattcaaaacttaaacataagttaattcttaataacattatagacaattttatgaaaggtttatttagaatgcagtgtgtagagaaagagttacttaaattaaatcaataaacatactctaaagatgtgaaaaggatataatcttcgaaaaaaagcatttctcatatatataagaaccaaggaacaataaatcggagggtggggagttgttgttgaaactatttcattaaagggattccataaagcttcaaactttacccttaacattcagcatcattaaatcccatcatctgagaatccagacatattcccccactgaattatgggttaatatgtgtgtatatatataaacaaatttacatacatatactctgtgtttataagtcaatgtccagatggggaagctattctctccccacttgctctcttatttgggataacaacaaatcgtaatcatcattcactaactggtacctgaaaatattactggtgcaaaaagcatctcatcctcagcatgacatgtttggagaaaagtgttcacctgaaaatcccacaatttcggttctgagcatttggagtgatattgagaaatgggctaatttcaatctcatattctatgttaaatggaatatggaaatatattacgtatcattcaaaacatcaacaaattagttgcaatttgttggttttggtattgaagtggaacgtttaatgggaattcttgttcctaattgattttgtattttaagatgaaaataaaacaagtgaaaagcatgattcacaactgaccttaaaaatttgaaatgctgagaatagatgctcttgctgaaacaatttaacagctcaacgggaagtcgaacttgcagcacaactagctggtgtgttgctttcattcatcaagctttctccacgagtgtctgcattgctccggttggtttctgtattagaacggttggccaagttagtagcaacagcaccttgaccggttgaatcatttctctggtttcaagacgctccatcatcctagagatgttagcaattcctgcatttacttcacttcgaacttccgaaccaacatcggatatagaatttcctcgagagaacagcctctctttccaccctcttgtgctctttgaaaatgattctttgtatctaatacacaacaagccaaacgtacagataggaatgagataaaaaaccacaaaacccaatcaagtatagctagtatgaaaatggcttctacatatatcatacctcattgacatagcattgaattttgatttcagagaatcagaaaatgactggagttctgatggtcctgctccatcttgatttggtagtgaggaatgactaacagagttccaacagaagatgagaagtaatcacctaaacagaaacatgtattttctctacaagcacataaataataaaatgtaaatgtataggctaccggttcataagcgaaattccttgacgatttgttggaagtaaattggatccagatgctgaagaagaattttgatcagtttgagcataaggtaagtgtggattctgcggtgaatgttcatctcgaccagattgaagaggggtagatggaatagctactgaaactgcagttggttccgggtcctcttctaaagcagaaccagaagaaggtatgctaggatgagtggaaaacaccaagtattgcggacgaccatgagaagatgatcgacccctctggctttcccttctacgaatgtggcgggcccttcccatcgcagcagcagcagccaagtgctggattattctctcttcaagttcagcatcatttgcaccaacaggtaactgttcatatggagcaattaatataagataaatttaatagacaaacaaattcagtagcaaagaagaaaaaggtagtcagagaacgaacatgctgcaactcaaaatcaccaagggtgggatgatgaaatatagtgccatttcttgatggagcggctctgaagtttctctctcgttctactgcctcaagtaattcttgactgtcaatatgcacatcggataagtcattgaaggttattgatggcgtgtcaacacacaaagaaaaagaaatagaaaaacctgtcgggatctttcaagctaatgggttgccaacacatgggacactgggaacttctctggcacctagaagattaagctgagtgtcagatttcaagtctattcacccaataattgctcaaccaggttaaacttatacgcgattttcacaacatagaaattatcgatgaacaaaggatgactcatagatagttcaaaaacgaataataaataggaacattgaattaccattcaagaatgcactggaggtgaaactcgtgcttgcaaatagtcacctgtaggccaaggacaagaggttaattgccttatcttatacataagtaaaaataatagcaggacagaaattcttttgtagagtaatatgtaattagatatataaccacaataggcattagcttgcacgaattaggaaaaacaaagtacaattacaagatgtattaccgaggacggttcactttcgcaaaattcctccaggcatatgctgcaagtgtcctcacagggatcttgtactcccccatcaacaaatgcagcaggtgatgtcaaatgactctcaacattctttcctacttccatctcctgaaccttcaaaaagaaaatgcaatatacatcaacagatataattgacagaattttcagacactgaaattgacgataatccataaactttatagaattcaaaacagtgtagattgaagaaaaagcaaaagaaaaaggaacccattttaaaagctaaatcccaacttcagccctgaaatctagaaaccaaaacccaccaaaaacaagaaagttagatcctatttgtaataatgagatcaactaaaacccctcataattgtttgctcagtttaataattgattcatagaggcctacaacataatatgttttcttctatcttattagttaccctcaaaagttttttgacagtcagcagtataccaagcaagtcaggatttaaaccttcaaatatcttgattgcttgcagcttgttcaccataaacttaaaaacaataaaaaggttttcattttaggtacgcatatcttaattgatgttattcaagaaaaccttgaagaacagaaggttgagaacaaaatggcaatcattattttatttcacacagaaacagaaacagtttctatgtagcgaattcccaattaccaaaaaaaaaaatacaacaaaagcagtaaacttttaggaaagtccaatcacaaccagtaaatataagaaaaccccagatgagaaaatggtctaaataatccaaaattagtatatacaaaaacgaaattaatcaaatcaaagaacttcaaaattcagagctaccatctagctaaaagagaaagattcttatgtattacagcgcgaaagctaaatacaataattcatggacttacctcaataaaaaaaatgattaaaatgtgtgtatggtccagaaaattgatcaagaagaccagagaacggccatgaattgaatcagatcaagctctggcctcccaattagaaaacaacccaactagcgatccataccaaataccaagatgaaactcccagaattcaatgatgaaaagagagagagcaaaaaggagagagagagaggagagagaaagataatgataaatgataatggaagaaaaagatgaggaatattacatgtccacctccacctttaattttttttaatattattttctattattatgtctttattgttttactttgatactgttattagttttattaagcttttcttttttaaaatttatagtcatgactcatttatgctttatttatttattttttgcttgttgggaaaataaatttaaaacccccttcacttttgctaaaaacaaaagaatatcaaagaaaggatcttgcttctttttttcttcttcttctttaaatagcttccataatcatgaattatttatagtatgttttgagtgccaattttaccttttttttatattagattattttaataatttgtatttcttagctggaagggcattcaatcattgtttaacattcaaaagattcacaaaaaatcctccttatttagaatagtggtaatcatatttaatttaataaaaagatctcttttttgtcctactctatagtggtcatgacaatcaacggcatccttcttaaataaataaattaataataactcattaattctcaatcatgaccaaatttaccaaaaatcaatgaaataattcatgcactatcgcaaacttaaatgcttgatctgatctactactaaatcaaagaaccaaacccaagaaaaagcccatgtcccaaatcttgtttggtgtgaaagaaatttttgtataattttatcatttctgattttgataaaatgggtcacacatggaagaatgtgaaagatgggtcaactaaaattttaattggaccctatttaggctgctttcaattccaccatcaatggcccttttttccattctacaattaaaactctctcgagtttcagagaaactgtttatatgactaaccaaatattgactaataattatgtaacttattcaataaaatagtcccttaaatatgtcaatttttttttttgaatgaccttaaatatgtcaattcattaatcacgttcaccgtagcttcaagccgctgataaattttgtaattagatttgtcaatgtatttatacaacttcgttcaatatttgtcttaatggaggaacagttagtagctttgtctttgagtgtggcataagacgaaaaaaattatcctcttatctcgttatttgggttgctaatatcctctagagtattctcgagaatacttttcgaggttgaaagagcttatctatgcagtaagatctaaaagaattcaatctatgagattgcaatttaagattatgcaaaagctaactttatcattgggctttgatatatttatatacagggtgacacaaagaagaacagggcaacagaaaaaataagagaaaggcaagaaaattaaagttgttacaagagtcggttaatacaaacaaataacggtattaactaactaagggcagtttagtaatagtagtagttgtatcagaggtgtgcataaatcaaccaattcaacgacaaacgatcaatccaattacaaacgaccgatccaattataatcgaccgccaaacatgagatatccagttgtgatcgaatcaaattggatgttatttttgaatattccattggatcggatgttggatgagatatctaaagattcaatacatctaacattcaatcaaactaattagtattttcatttagtttggatgagtaattagattttatattgttatacgtaaaaatatatat

SEQ ID NO: 300126 - DNA, 4653 bp, Cannabis indica
tttgtttattaactaattcctttttccatttatcaccacgtattttccttcaggcaaagttatgtagatataccaattgtcatgtggctccatgttgatgactacaaatgttgtctttcttttcggttcattttatagaagttttgatgtaacagctcttatcatttcatgttctcttaaatatcattatgtttacaccatttttgtttcttttttgagataacattatgtttgcactttgaacaagcactcgcatgcatcattttgtttgtgtttttcaaataatcttttgaggcatgaggcatctatgtacacattagattagagcaccaagttcattagtgtttgttttctattttgaactaacgatatgcgctcacatattgttacacacttgtggcaattcactttaacctggtggaacaatctcattaaaatgacttaccattaagtatgtataacgttttggtgtaaattacgtgcgcatatataattattctactatttatcggtcctagtataagaggtagtgaacccgtatttgttcattaaattgttcttcataattcttttattttttctgacacactcaagacttaccttgtcttttctctaaaacaaaggaagtcataccttgtcaagtggagagtacttcgcaaataattaaatttatacaaaaaaaaaaaatagtatactcaaatgaacactaattgaatggtggtatatgaaacaataaatttgcagccagaaagtgttgggagcaagaaaagatgggataccactaccactggtgaataagaccatgatgtacttaagaagccgacactcaagcggagctgcagcatcgtccacaggtctttcttctttgctatttatggcccttgcagccactaatgcactgccacttttgctatcatggccaatttataactctttgtgactaacattattggcctggacacattacttccaggcagataaacattacttaaagctcatgatgaacattggtaccactgccgtttatactttgttcaactgccctttatggctcttcctaagagctttcttctggttataaggtaaagagcttataggcttcacaattgtcaccacaaacatttgtgtatataatttttatgttctttttttttgttcacatacgtataggagagtcataattttatatctaaatgacttttacatcaaagttgtagttttgttggaaagcattgagatttcattttcacatattgaggaactatataaagtttacatgtttaaatccttgaaggccgaaagattcacatttgttattgcaggattgagttttgcatagaaatgcataagggtacagggtactttattgaatacttaaaaaccataagatgctcactctgttaaatatcatagataattatgaagttttctttgttatcactctatattgtagagtttaaggggttgtttggcttcacaacttaaaaactgttcgacaaaaattttgtaaaaacaattttttaagaactgagtttaaaaaaaactagaaaacagaaaacatcaaaatgtttttttcaattttcaaaaataattttattttgtctaacatattatattttacattttttgctcacatactcggatcttagacccaaacaaaacccgaactcggacccaagtgggttcatgttataatatggtgttaaaatattggttttttatagtaagaaaaaatttaaaaatagttttaaaaaatttgtaccaaacactattaaatttttaaaatgacgaaaaattgttttttattctcacttttgaaaacataatttaaaaaactaaaaattgaaaacacagccaaacaagctctaagggcctgtttgacttaaaaattcttttctgttttgaaataacttttaaaaaccaattatagcatttgaccaaattttttaaatacagttttttaaaattgagttttaaaaaactaaaaagaaaatagaaaatattaaaatgttgtcttttatttttaaaaataattttaattttttgtctaacatattctttattacatttttatgcatatattcggattctaaacctacctagattaggactcagactcagacttgaactcttaacctcgaacctcgaacaccgaagcccgcacctggaccttaatccggatcccaccccaccccaccccaccctaccttagactcggactcagagtccaaaccctaactcaaggtcttttcgggtctaagtttggggttgagttccaaggtttgggtccgggttagggtctatgggttcatgtcgttatatggtgtagaatattgaatttcttttttaataaaaaaaatctgaaaataattttaaaaaacatgagtcaaacaccattaaatatttaaaaatgacaaaatttaattttttattctcacttttaaaacacattttttaaaactaaaaacatagcaaaacaacccctaatcgattaatagttcttaaaattaaaagaattgttctttttttagttgcatttatagattatgttgaaatggtgccaacaatatagaaaatattttttcaaatcagggatttcgctcattggaatatcattttttagttctttagtcatttgaaagtgagaattaattatagtaaaaactcctaaacaacaaataaatatgcaataactaaatatagtacatatcatatcaaaatttgcaccacatgatcgtacgtttttcctacaatttgagtacgaaacaattttatttatattaccatttacccctatatattgttttttcttttttgaacaagagaaggaatctttcattcaaaacagaaacacaatacaaacaaaagccagcagccgaagctaccgatgtaaaagaaaaattaccaactttcaaggacagcccttacatattgatcaccttttttacaagtgcctttgttaaaccccatcaccctagccttgacaacactcttagcttctcttgctaattgctttagcattgttacaaacataatcaaagatacagcagtttctgttctttcacagtagataaaagacagcagaaataatagcatttagcacaacattcttcaaaccaatagtagcttttgaactccactaatgaagctcagagaagtccttaggccaagtatgagtttcaggagcagactcaaaaacataacacaaggttgagggtattatcacgatcctgtttaaatggtcctgagttagaagtgttttggaacaattaatttgttccaaacagcaaaggcataatcaactttagcagctacaatcaaaaaagtatagaatttattcaccttaaattttccattccaaacaacttgatttaagtgcctttattagtcaatccatggagcttcaacaatttcttgaaataccaactcgtatcttgttctagaggaatcgaccaaatgtcctgttcctttaggtaaatagcattgacccattttacctaaagattatcttgtttgctagcaatagaccacataattttgccatcatagctacattccacttctttccctcttagaaactaatgccaccaaatttttgggagaggcaaactttctcccaagacgggagatgaaacttacttctatttccatttacaccccataaaaaatccctttaacttttatcaatagatgcagtaattttctaaggcaaaataattacatagtggacaataaattacaaaattacatcaattattccctcaaatcatgggattttgattacaaatcacgctaagtaaatgagatttttaactataatttacacagttgcatgtatcccacttttgttaggctgagatgaatgcacatttaaggatatatggtaagccttatctcgtggggatacctcgctagaaatggagtcgggttaactttgatgcgagcagttgctggccatcagactttccgagactaatattgtttcaactctgacaactatatattctggtgtcgagataatcttcctcgcatgcatgccatcttacagcgagatagatgcctcgctatttgtcatctttattcaccatactgtttatacttagtttgtataccatgtaatatacgctaagtgtttttatcgttatcgtttctctttcacgcaccgaggttgaagcctcatcgtgcacacttgtactctcatggtttctcgtcgatacataagttagcagttcgtacgtttttgtctcgcagaccattcagacaaccgagttataaacatactctacaaattatgttactaacgagttgttccatgccaagtgtacttacgattgcgtgtttgagccatttgttcttctcagctcgacacgtgtcttcctctgatgtgctcaccgaattttgagtataacactttgtatggtctaattaataaattacataaatgataattttatttagtaattaatattaattattaaataaatagttttgacatttgtaggattgaattgaaaaatatggtattattgaaagaagaataagtggttgaaaaagtggcaaaattgtaactagaaagtgatccattatagtggacgacacttgagtatttttgcccaatttttttgtttttttttaatccatataattcaaccc

SEQ ID NO: 300127 - DNA, 2600 bp, Cannabis indica
tttttttaaaaaaatatggtatatttatttgtaaggaataaaatatctcatatattatatgcatatacaaatatataagaagaagagacatttatatccattacatttttatttaatatatatgtgtgtgtgattgatatagtttggtcttaaattataaattgtagtattaaaattgaataaaataaaagggtaattcgataatttttaatttaccataaacaatattaaatattttatttaaaaaaaacacaaacaataattgagatgataaaggaaataactaataataattaagtagtgtgaattattaaaatgtgggctttgccatggaaatccaagcccaatatcatcttcctataggcccaagctaatttgtaccaaactaaatgttagttctgggctgagcatggactaatctggttaatttttaaattatttttttggagttttttacaaaaatacaagattttggacaaaaatttataatttaactgctatatggaattttttttttccaaaaatactatttttttttataaaacaaccgtaaaacaacaaaacagaacaattaaaacaatagtggaataactaaaaaataatcgtagaacaacagtaaaaacttaatacagactttagaaaaaattgccccacagtaaaaaagttgaaaatttcagtatgtggtgtaaaaattccttatttttttattgttgacaaattaacctttttataatttaaatttagttgaaaagtatcatttttgtattttatttttaaataccaacatttgtaaattattctaactgactaacttttgttagagtgctttcttgatctagtattaaaaagccttttacatacctaaaagagattaactaaatcaaatgagtatttagtatatattaaaataaactgttgcattttaatctttattgtcaaaaatgtcactttgttgcataggttggtatttaatttgttgaactttttagttttaactatctaaatttctcaaatgatttgaatttgaaaagggactgatttatgaaattacttgttttttactttgcatttgtttttttttttttaataattcgttgataattaaattagatatttaggactcgtttggtaggggtgggtatcattcaatccaatctaattaaaccgaactgatccaattcaatccaattacaaatagttggatattcaattacaatttgattggattggatgataaaagttagattctaattggattggatcagttattggatgtcaatcttaaaattcaattaaaaaccgatccaatccaattacatttatatatgttaaaaaactatttatagaataaataatattaaaaaatataatatttatttattcgattttttgtgcgtgttaaatttgtaacacttggttgttttgtgtatttattttaatgatgttttgttctattttattacttaaaaatattgttgtttttattatttaaaatttttgattacattacacttgtaacgataatatgcttatgaagtattaaacttaaataaaaggtgatacttagtttttatgtatttttcttcatgtttttaagttaatattaaaaaaccgattcaatccaattagtaatttgattggattggattggattttgaggtctaattggattggatcagatgatgatttttcaaactcactctggacctcgtccgggtccagagtttgggttcaagtgagggtctaggtctgggtttgggttcgagattctgatccaggttcgagtccgaggttggggtccagtccaagttcaggatcggggtcgaggttcccaacactagactctttgtaaatattataatacaagctaatacaggcaatttgttatgtattaattaatacaattcacaattgtattgaaatttctggtcatattaattaacacaattcaatgttttatccaaacataatattattcattatttattatgatacaatccttatccttacacgatctactaaacgagcccttaattattttgttattagttattaagggctcttattgtattgtgttggattatattgcattgtattgtattagtattatttaatacaatactatgttcggtattgacttgtattaatagattgtgtatattttcaatacactcgacccccaacaccaactacgggtccgggtctgggtccaggtccgagtctgggtctggtccgggttcaggtatgagtctcgggtccgagtccaggtccgagttcgagtccgggtttgggttcgggttcgagtctgggttcgtgtctatgtttgggttcgggtctatgtttgggttcgggtccgggttcggggtctaggttttgggttcggggtttgagtccggggtccgggtctgagttcgggtcccgatctaggttcgggttccggatctcaggtctggttcgggttcgagtctgggttcaggttcgatattggtgttgactccgaatcttttgtaaatattataatacaagctaatacgaaccatttggtatgtattaaataatacaacatacattgtgttaaaaaatttggtcgtaataattaa

SEQ ID NO: 300128 - DNA, 1966 bp, Cannabis indica
atgtcgtaactaagtaaaatacatatacatttttttctcgattttttttttcaggggggcgactgcccccctcgctacaatgtgggtccgcccctggtagtaaagaagtctttgtaaaatatatattatctccctagattttttttttttcattctttatgcgttattctttttcttgtcatgtttacagtcaataaattaaattagtaatttgtcaaaaaaaaattcaaaaaaattaaattaagaaattaatgtatagtacttcattggttttggaaatacatttattatacataatagtaactttccgacaaaatcatattattattttgaaaaggacttttttctttcttccccttttttaagtgaaatttgagatatctgttatgattaatttttcactcaacaattatatagctggagttgaaaaccagccgatgaattgatgattccaacagttgaaaataatttacatatgaaaactatttggcctttatatttaacattatttgctcagtttctactcaaaaaattgatatgcagctttccacgattgataaggtcggaattattttccacgattttgatgagagattgagtaatcctaatgaaattatttaatcaccaaaaaaaaatgtataggaaggaatggaatgcttattccaatgattaattaatcgttgttgtcagcagaatgagttgccgtgaatttgaaaaagaacacaaccactttgtagacttttgtttccttattacataccgtttatcattatatatatattttatagggtctcctattttataaacgtgcggtttgttttaataaattccatggaatgtggattttaagtaaagaaaaaaaaaaacaaaaggaaaaatctctagtacttggagactacccaattttttttaatgtattcctcgtaattaagatgaattaaacacttgttattaataaatagaaatgtattttcttaaaaatataaataaataaaaagaaatatgtaattgtcccacattaagtaatttgtaatgtttatattacaatttagtagttatcaaattttttaattaaataaatatttagagtgattttatcaaaaatatgtatatttatacataaaaatagttttattaatataaaaaaaaaatggtcattattactttctccgcaaaaatgaactaaatatccattgtttataatttttataaatttaaagtaggaaaagagaaacaagtattacaacttttaaacgtttatatcattcctttacaaaaagcaaattcttgtttgcattgttttttatttttaaaaaaaatattatgaaataaatatatattgtatttactttatatatattaaaagaaaaaaaaagaattttataaggtggttagtttacaattaggcttagcacatgaacttgtaaggttattttaaaattcaattttgtattttattaataaaccatgtaagtctctattaaaaaataaaccaaaaaagaaaatataaatgattttagattatttgtttattttaagctaaaaggttatattttttttcctattggattacagaaaatgattagtattgaaatataaatagaaaatctatgttacagaaagaaacaagtaaaataaagaaacttctttcatggttcttctaccagtgtgtctgtgtgtatatgtatagctccattaccttctcctttctttaatttctcttattactttgtcatgcagttgagctagacaatttaacgaacaccttccaaacttttaactgaactttacctaatcgatatactactttctccgaccacaagatcactgatttccggcatgaaactcccgcaaaatccaaaacccaactcattgccggcgacccttttgggtaaattgttagataaattaacaattaacccaaaatctatttgtatataacataaaacacaataataagatataa

SEQ ID NO: 300129 - DNA, 2102 bp, Cannabis indica
cacatatttcttctatattatgctgtttttaataaatcaattttcattaggtcttaacttttacatttattctactttctaatattttttggccctggcaaatttattttgagataaccccaattttttttttccgtcttcgctgagcaaattttttgaatctgcccctaataaccacccataaatattctaattataatattcacagtcaactatatacataaatcattcatgacatatacatataatcaagttcgattaaaatacagatcatcatcattcttctactcaaaaaatcttatacaattacaaaaaatctcttcagtttttcttttgctaggccccttatatattctcataataattttatatagttatagaaattccagctatagataaatttgattttaacaaaaaaaaattaaaaaatctatttttttctttttaggaaacagaaaaatatacttttatctcaaataagcaacatcaaaaagtttggagtcattattagaaaggtcaatagttagaggtaaaaaagggtatttgtaatttttatttttttgagttgtatgatgaaaagttactggttacgaattatatgagtaaaaaaaagtgcctatattaccatagcatggctatggctatggctacaataagatttaatagcatccatgtttaaccactttagctagctttgattaaaagaattgaaaaggagttaggagtcttactcatgagtcatgcccaataattggtttaagattaaattaatatgcaaatcctcttaactttaaaactctttttaattaggggaaagaaaagttaactagtctcttaaaactcttaaattaaccgttggattactacaagaggatatattatgatggatacattagcatcataacaattaagtacaattaaatataaatgacataaataagagaaaatttggtggttttgtaggaccatttcaaaagggtcgactcacactttcatatcaaatagaataattatagtagtagtgtcatctatgttttagtagaaaaaatataatttattttattgtatatgacaatttatatatagtagatattctattttaaaaaatttgtttgataatttataatatcaaaaataaatttaaaatagtcaattacacatataaaaaataaggatattggcggttaaaccacttaaactttacattttgtaacatttaaccataaaaaccaaaattttggtggcaaaagtacctactgaactcttattccgttttgctctatacccatccattcaaaagttacaattaagtaccacggtggactgtccacgtgtacacacttgtacatgtgacaaatttttagtagtccacgtaattttaattattaaaatattttaaaaaattaaaaattaataaaaaaaataacataaattgtaacacaaaatatatttttattttattttttttctttttcttttctcttttatttttacttttttatttttttttctttctttctttctttctttctttcttcttcttcttcttaaataacctaaaactaataaccctaaccctaattgcatctccttcatcctctttctctctctcgattttactcaatccattttttctcccaagcttgaagatgagtcccaaacatgcttccatcggagtacaaattcgttgaggttgttcgagctttaatggtggccgaggaggaggttaacagagagaacgagaacgagagagaggagagggtctgagagcgagagagaagaaaggagagggtctgaaagcgagagagaagagaggagagggtctaagagcgagagagaagaattttaatggtggcctaggtcgcgtgagaacgagagagaggagagggtctgagagcgagagagagaagagaggagagggtctgaaagtgagagagaagagaggagagagtctggaaagagagagagaagagatggagagggtctaaggagcgagagagaagagttttaagtggtggcctggtcgcgcgagaaacgagagagaggagagggtctgagagcgagagagaaagagaggagagggattgagagcgagagagaag

SEQ ID NO: 300130 - DNA, 4414 bp, Cannabis indica
tgatatttatttttttattattattattattttaaaaaccaatatcaaaattacatacccagatcaatatcgagatatgaattcaaattttgtgtattctttagattgaaattgaataattcgaacattaacattctaaagaaacaacattaatgcaactattataattgtgagatcgtagtgataagcattttttgtatgatacatgatttaaattggtcgagaaactctagttcaacttctgtaaattgaatttatgataattagttttctagaatttgaattaattttcaaggttaagtttccgattaatttttttttttttttgcagaatttttaattaattaatctaagttgatttactgtttgagattttgtttttctcgggttgattcgtcaaaattaatggtgtttttttatcgttagagttgttgcgtcgttacaaatcgaggattattgttgtataggttcgtattcttgatgcgattagaatttgtgagaaaaatatatttttgtaatgcaatatatttggaccatataaaagttgaatatgcatgtctaatgtatttttgtaatttttttcctgagtatataacagaagattttcttaaaaagattggatgtggtaacatttaccataactaaagttctttgtttttttacacatgcctctcccgttttaaacataaagttcctataaaacaattatccttgcaaattaataactatgatcaagtccattttattaatggttatttaaattctaatgggatttttaaatggactgaattgtcatctttatatcaacctaaagaatatttttattataagtagtagaaataatgggaaactcaaaacttaaaatagtagtgaagtgacgtggtggaatgcaaatgcgtgtcataatgaatcaacgggttttcatggggccgaaatcggctaacaaggcataaagacaagaagaaacttcaacttaaaattgaaatccaacgtctctttgaatcgtagaaacaattatgtaacattttcaagtttataaatatgtaatatatatatttatataatatatagattattctaacttaaggattatgtacacacacacaaacaaagaagaagacaaaacaaaaatcaattgttttatatatattttacataaaacaattgaccgttgatcctaaagagtgtcttgtgtttcagttcctacttttcccaatattctattgtagcaaaatggattacttaaaaggagaaattaaagaaggtttagtaaaagaacgaacataacaactgtaatgaactaaaggacaagcatacaagtttgacaaggatgatttatataataagataatgcaaattgtacttataaaaatcacagaagaataagctagctaaattgaggaggcaggaacatcctccaagtggcagcaagctagatttcattcactttaccgtttttattgtccacaatatagaaataaacaagcagaagcagccaaatagttcatgcaattaactaaaggttatatttctaagaactttggcaaatccaacaatcaagaagtgtaagaaaaagttttgttattaatgatgaaaagaatcatacttggatagtgatcagaattccatggacgcggtcgctctgccttccatgatcgtttcctcgggctttttgccaactgggtctctgctagaatcattgatttatgtatgcagcgaagttggttcgatggaagagtttccaattccacaagttaggaatatctcaacaatgataagaaggatcaagcttctctcttctttgtttgaggagattaaagaaaccaatcgtccactccctccatcttcaattctctgtcttactgaacttttctcagtgattcgaagagtgaagttcctgattcaaggctgcaaaaatggaagctctctttggggactcatgcagacagagcttatctctaaccagtttcatgtcttggtcaaagagttggtaagtacactcgatatcttgcctcttagtctcctcaacatttcagctgacatcaaggagcaaattgagttacttcacaggcaagcaagtagagtagagatgtttattgacattagagatctccaaagaagagaggagcttctccaactgatggcaagcaataatgagaagaacacttgcagaaaagggttactagatttcggtagagcgggagagattttcaacagcattggtctcaaaaccccagaagattatgaggaagagatttcgaaactagaggcagaagtcaaaaaacaagccggtaccggtggactaatagtggtgtccaatcttaacaacttgatatcttttgtttcgtattgccagtccatgattttcagggatcaagaacatgagaaaaccaaacaagaccttcttaagaagaaactgttgtgttcatccacggctaagagctacaatagctcttcatcatctcaatctattaatatcccagatgaatttcgatgccccatttcactagacttgattaaagaccctgtgatcgtggcctcgggacacacttacgatcgaaactcgattgctcaatggatcgattcagggcaccacacatgccccaagagtggacaaaggcttattcacatggccctaatacccaactacgcactaaagtctctaatggaacaatggagccaagaaaacgaagtaccattagacgagacacaagtgtcgtttctctcgtgcatagagagaaatgatagcaaaagaggagggcatgtcgtggagaaagctgccgttgatcatatatcagccgttaaagccgccgcggatgccatcaaaatgacggcagaattcttagtcggaaaactagccacaggatcacacgagatccaacggcaggcggcttacgagctccgtttgctggccaaaaccagcatggacaatcggagaatcatcaccgaggccggagctatcccattcctcgtgatgcttttgagctcaaacgatccgagaattcaggaaaacgcagtcacagctctcctaaacctttcgatcttcaacaacaacaaggttctgataatggcggccggggcaatcgacaacgtcattaacgtcttggaatcgggaaagaccatggaagctagggagaacgctgcggcggcgatcttcagcttgtcgatgatcgacgactgcaaggttgaaatcggagctcgaccgagagcgattccggcattagtagggcttcttagagagggaagtcccgccgggaaaaaggacgcggcgacggccatcataaacctggccgtttacaatgcaaataagctagcgattgtggctgccggagcgatccctttgctgatcgacctgttaatggatgagaaagccgccataaccgacgatgctttggctgttctggcttcgcttttggggtgttcagaaggagtagaagaaatcaggaagagtaaaatccttgtaccaattctaatagaccttctgaggtttgggtctccgaaagggaaggagaattcaataacactgctattggggctgtgtaaagatggtggagaagaggtggccaaacgtcttctgataaaccctagaagcattccatgtcttcatggcttggccactgatgggtccttgaaagcaagaagaaaagccgatgctttgcttagattactcaataggtcttgctttcagtctcacagtcaagtcagattgtgacaaaaccaagagagaaagacttgtatatttgtggacaaaacaaaacaaaaaccataaccatacttttttttttataaaatgattttgtttgtgtgatgaaatttgtgggttcgtttcaaattttgaatctaaacaacaaagaataactgaaatgttctttcattgcttgaatactctatataataatacattttacatgagttgtatataattagacgatgagagatttggttcaacttgtgtttaaccaatcgaatctcaacaaattttgacctttatgagggtgagtgagatacgatccacgccatctgcgaaccaggattcacgtctgggggttgagaattggtgattattaacttcaaaattctactaattccaactcaatgtgcgagccctttatcttgtacttccagtaccagcttccactttctaccatgttcttatcaataggttctaattgaactgccatacctgtttttacaatgaaataatggatgagagtgagaaaatgtagtagtcccatatgaaaggtaaattttctgacagtataatggcagtttggaataaaaacataacagttaaccgtcgctgaaaaaagtttaaaacctgaattacctgttgtgatctttaatttgtacccatttggaacttcaaatatatgatctccctgaatgcattaaaaaaaaaattagaagaatctaa

SEQ ID NO: 300131 - DNA, 2176 bp, Cannabis indica
aacgaccaaaaaagttcagggggcacgatttagtacatttcaaagttctgggggaaaaattactaattagcctataaattattgggttcaacaatagagaatagaagatagattttattaggagtagtccgaaaaggtcctttaatatctaatgttcatatcagaatattataggaagattacacggatgaagaggtaaaagttgtcccttttggaattctcgataacaaaatctcgaggccagatggttacaacagttatttttctaagataattgagaattcataggaggaaaggtatgtcaagcgatcaaatcattccttaattctagtaagctttttaagaaaattaattcaactacattaactttgatccccaaaagtaagtgttctgtctctgtcatggattttagactgattacgtgttataatgttatttataagattgtcaccaaaattatttactcgaggatggtattgtcgaatatcattgcccaaaattaaaatagttttgttcaggggcgatatatagcctataatataatagtttgtcaggatttggtatgggaggggaaatgcaaagtcacaatgtatgatcaagttaaacttgaagaaagcatatgacacaattaatagaattgaattttatcgaggagatgttatatgcttttaaattcctaggggagtttactcgtttagtcatgatctgtgttcaaacaccgagatttagtatcatgtttaatggtacgttatatggatacttaaaagctaaatgagatttgagataagggaattcatgtgtctttattattatttgtgcttggaatggaatatctttctaaacaatgatgagaattggtatgaaaaaatatttcaaattccatgatagatgttagaagttccaactaaatcacatgtgctttgcaaatgatgttttactattctgtcatgagaatttcaagtctatatatacttactttaagggctgaaactttttttccaagcttcaggcttacaaccaagtgaagaaaagacatccatttattgttgcaacatgaaaaaagaagaggtacaaagggtgatacatgtgtcgcggttcaagagaagcaatcttccttttaagtacctataaattcctatttgtccaaagagaataccatctgttgaatgtcaggtgattattgaaaagatggttcaaaaaattcgtgtttagagttctaggaacctctcctatgtgggaagagcaacacttgttatttcagttcttatagccatccactcctattgggcacagataatgataattcccaagaaggtcttgcatagagttaattctatttgtaggaactactaatgtcaaggaatggtagatattaatggttcgagaagtgtgacttgggatgacatgtgcagatcaaagagtgaaggggggctgggatttagaaacattactaaatggaatgaggcaaccataggcaaatatgtatgggcagttgcaacgaaacaggacacactttgagttcgatgggttcatgcaatatacattaacacagaggattcaaagccccaagtacaagcagttggtattagaaacaggttgtcaaagtaaaagaggaatacaagctacttaatatggtccattcattcgtataaaatcaaagatgggtactctcattttctcaactcatctaaaagtctattggtgtaaggaagtgtggaatataatttcaatgccgaagcatagatttattttatggctatcagtgctggacaaattacaagtaaaagagagattgcttcgctttaacatagttcaagatgatcaatgcttgttgtgtggtatgagcaaagaaacaagagaccacttgttctttgaatgtcaattgagtgatcttggttaaactaatataaaagaatagttgggatgaaaaaattcagccgacctctattgtaataccctggaattaggaaatggattagcaaaatcctaactagataattatgtataattgaggaattatattattatatagttcaatatatgtgaagttatatgaattttattatgttaagaccccgttggtgagccaggggcattttagtaattataacccgagaagggtaaaatgatgaaattaatttaattatgtgcttaatagaactatattattatatag

SEQ ID NO: 300132 - DNA, 6691 bp, Cannabis indica
ctccatacttataaacagagttcccaaggctatgtcattgtgttgttgtttctatctccttattgtgaaaaagtttcacactctttttctattggagactattaatatattttgtataagttaattgtagaatgtaatagattgaagaaaaactttcccacataccatatttgtccaaatttgatagattttgagtcattaaatccaatggttatggatgaaacattcatactcattacataccccatttctgactcccaaaataagaaaagtgacaaaatgtgagttccaattggtatgacaacttagtcatattcaaatatagtataaaaattacatgtgtatagtgtgtccacccctatgaaattaatgtaaattaataagaagagaggtttatatctatttatccaatctcaatgaaagattattaaaacattatcctctaaaagccaagaaagaaagtcaaaaatatcagagagcaaaagtgtttaaaaaacaagtggagagccactaattataccactcaaatacaaacaatcatcttctctctctctacatatatataaaaaaaatactaattacaacctcttaatcaatcaatatctttttcaaatattagaatatttttttcataacagtattcattatagttaatagtataattttgtaaatttttaaaaaattccgaataatttacaatgtcaaaaatatagttcgcgatatcttaatttacctacgcttgttaaaaaaacttcaaacgtattttcgacactataaattattagaaaattttcaaaaatttataagaataatattgtaagcataccgaaaaatattaaaaaaaaaaactccaaaatatattttctaacataaaaattaacttaaaaattataatagaagattcacggcaacactacctataaataaatataagctcttaaaatgaaattaaaataataattagtatttataagtataaacatggtaataaaaaaagtgggtttttcatatagactcatctgcagcgcataggacgctgtgtggaccatatgaaagaagaaaataaggaaatgggtcccaaattaaatggtaatgatttaggaaactcacactttggagcagagactcatgaccattttttccttttcaaacttaataatttcctaattttttttattaattttcattgttttttaagctgccaaaagtgcagactttttactcttctcttactacaaatatatatatagacaatggccaggattcccttgtctatggacatatggttgttgtttccttcctactactttctctttctttctgagctttaaacttttgttcagctcttcatacgtatattccaaatcatagactgtttattagcttactagggttgttgtttttgtttttggctttttgggttctcattgttcagtcaaaatctcataccaaacaactatattggtcattatcaaaggagtggcttctctttcagccatttgggttttaaattttattctcagaaactcgaattgtgatgtgggttatggcgtttcaggctttcttttcggttgcttaacgagaatttgggaaagaagttaccaggtttggaaaattttgcatctttttgtttatacccagttgggatttttgttaactctgtttggttcctgagaaaaatggtattgaccaaaaagaatgggattcccaactgaggcaatgtcactaatttttttgctttgtttagttgaagtgaagtgagagctttagcttttttccttttgagaaaactaacaagcatataggacataagaatggctttttcattcacctgaattgtcttttagggaagaaaagaaaattcccacctgtgttttatctaggcaaatccaaaaggaagattgaaattttatagcttttggtgttttttaaggattagttgttatttactttatgtgggtttcattcaatttttatacaatttccagtgtattagtgaagactcagacaaaatactctttttatgcagtggttacagaagtatggaataacattgtttttatttatatatttaatttattttttttcttccttttaataattgatatgttgatttccttctgagatggttgcagaaacgtggccagcactacctgttttatgttgcttatttcttatataatctttcataaaatagtgttgaaagctcccaaaatagcggtttttggtattttatttattagctttttgtggttactcaaaccacgcagacaagcatggtgcctgttatgttcagtttatgtttctaacatatttataaatatagtctcattagtttctggatttgagtttcaattagggaaaacaggcttttaaattttgaggttaatgcttggttatgccattttcccacctttgctttgattcatctcatcttgttctttgatgagtattaagttgaccagctttactttcttaggataaattattctcttagtagtaatcatgggcaccatggcaacatctactctgcccattcctagagaagcatcgaatttcgatgaggtttctatgcaccaaagcttgctattttcagacagtcttcaggtaaaattcctctgaatttgaacaatcaagttttcatggaagtttaggcattccctttagcctaaagtttgattctttaatgtcgtttttttgttattttcaggatttgaagaatttgagatcacagttatactcagctgctgagtattttgaactttcttattcaaatgatgaccaaaaacagatgtgagtaattttgttcatggtactgcttttgttttcaatagtttttttccttactctgtggttgttatttaagtagttagagatagtaaaagaaattattggctctattttgtgcagagtggtagaaactttaaaagattatgccattaaagcactagtaaatacagtggatcatttgggttcagtgagttataaggttaatgatctgtttgatgaaaaggtggatgaagtttctggaacagaacttcgagtatcctgcattgaacaagtgagttctgatcaattctctatagctaattgtgaaaactttgcagcatttgtctaattagtatgcaaatcttcctaaacaaaaattgtgagtttgtatttttgtgtcgtgttttagaggctacgaacatgccaagagtatatcgatcatgagggtgttactcaacaatccctggtgataaacactccaaagtaccacaaacggtacattttgccaggcaattactgaactctagctcttttctgttcgttaatagtactattcgaacaccattttggtaatatttcttgtcggtttttcagttggtgagaccatgcacggtgccaatcacgccaaatcaaaataccaaggatgcagcctagacgatgaagatgattggcatcaatttagaaacggtagtgcgttttctatctctatttttgtttcatttcgtgtaagttggggggttgaagttaatgttgctcggtttttttgtaatctgattgtgtttatgaagctgttcgagctacaattcgagaaacaccaacaagcacagccaggtaaaactgaatttcgattaaactgatcactcaacttgtttaaatttacttcactatgatgagcattgttgtgatgatacactgtcttgtttcaacgcagtaaagggcgctccccgtctcctgcactacaaacttctcaaaaaccagcagttttttcttttacttctaccatgcctaagaaagatttaggtttgtgttcttgtttgaatcaatattctcttgttctctttatcatctaaacctactccattaataatccgaaactgatctttgcttgttaatcagataagcgaacggtttctcctcaccggtttccacttctacgttctggatctctttctactagtaggtctgtgacaccaaattcaagccgaccaattactcccaactcaagccggccaactacaccgaattcttcgaatgcaagaagacgggtaagattggatagtcacagttcagaaattattgaatgttttctactctcattttctgacttggtgtttattgttttagtacccttcggagcctcgtaaatctgcttcaatgcgattacatgctgataaggaaaatggcaaagatgttgaactaaatcccagcaaaagtaaacgccttctcaaggcattgcttagccggcgcaagtcgaagaaagacgagacattatacacttacttagatgaatactgagaaaatagtttggcaacagaaaatgaaagccaaagcaaagcagggaatgactgtagagctttacccttccatacacatctagtcctttatttatgatgtatcattttataattattttcagtaatatgctttcatttgttgaatctatatgtatgtttagaagaagcatattcataattgtaagtcaaaatcaatcttgaatgaatgcaattgttaatttgttatctttggattctttacccaatttagaaaaacctactcactttaaagtacagtcaaacctcaaaaattttcaaacataaaagctagttgacattttctactaaatcccaactgccaattcttgaaaattgtatttaaaagtggtcaattcattgttcatttataccaacccatatcattaaaatctcttaaaaagaaacaattattataagggtagtttaggtttaggtttctttcactttcttgttcttgaagacatttgtgtcgactattaacttcaaatatattagtgaataaatactttttgtctttacaaacctaaactatttattaggtagctaatgataagagaaacataatagagtaacaaattagccaaaaaccaacaatacatttgatactgaaatccatgctttataaaacagaacagacagaaacaacaatatttgaagaaatcttcatcacaattccattccttttccgaattcttcaatagtttttgtggcgaggataaggacatcaacaaacgcgctatatgatgctcgaagaaatcttgcttcgactgcctcaaaatgcctgtatcatacagaatatcgaagatgtgaactacttttttttcgggttggtacaaagtaggagacaaactcgacaaataccaaaacaccatctaagtaaatgattatgaatggtcacatgaaatcctaaatttggtgacaaactctttgttattatacgaacaaaacatgctagattttcgctacaagttaactaatcgaaacattctaaacctctccctgaaagttatattaaagcagacaacatcatgtattagttaagaatggtgtgaaacttttttcttttctaaattcactacagaagttgcttacactgaaagctttccatcagataccgacatctgccttttgactttgtccggctgcaactgcaatcagccaaagagttcaatcaaaggtcaaattactgtctcaaagatgaaatgaacactaaaatgaattacctccttatcaactgctattgtagcatagactattgaagcattctcctcagacccgaaatcaacttctaggtcactgcaaattaagtttatttcataacaaaagcaaaactcaatgcaaatattcaaccagaatggaaaatgagaacaactaacatgaactactcatttgaaataacaaagaaaattcaaattacaatcaattttagaatttagctaagtaattatttcaaattactcctaaatgcttgataaaagatgaactaaccaaataaattcccaagcatttggggctatagccattgtacaccaatcctaaacaaaaaaatgaaaaaaagttaattattcgaaataacttataataattaaaccaacccaacaaacatcaatggcgattctataaaataaataagttggaagaacaagatttgtggcggaaaattgcctccaaatgaatactgacactgaaataaatctgtaagagaaaggatttaattatggaaatgaagtttaagttgatatgggcaatgaagtaacaagtaagtctttggtaatcttattaatgaagccatggccactcaactcaatcttctgtttccagtaatcttcatacagacatttcatcgaacaccatatatctattaactaaaacgaattcatacaataaaaatgaaaagaaaaagtatagaggagagatatttaccgcagtggaagattggaagaacggcgagttggggagtgaggcgcacggtgggggacggtgagttaaggagatgagagaatggaagtttgagttcagtcagaggaaagtagggctgagcatttaacccggtgggccgaccaacccggtcaacccaactcgaaaatgggccgatcaacccgtttatttgtgagccgaaattatagggaaatttacaaaaatactggaatttgggttaacttttacaaaaatactgtcacgcggaaatcttttcaaaaatactgtgtttttataaaacaccagtaaaacacacaagagattaactcaaaacaacagtagaacaccagtaaaacactagtagaacactagtgaaaacttaataaagtatactgcagtatgaaacttataaaaaaatacagaaaaaagtaaaaaatactgcctggcagtatttttgtaaaaaaatgacaaaa

SEQ ID NO: 300133 - DNA, 994 bp, Cannabis indica
ttttattttgggcccccgaaaaagtgtgggccctaggcacgggcctagccagcctatacctagggccgaccctgctagcaatagtatgagcaactcaatttgctgatcatttaataagaggtaacttaacatgacagcacaataactcacatcaatagccgtggtgcttattataagtagtgctttttagcaattctccttaataatgcattgtactgtatgccacgtgtcttacaattagaagtttcttattttcacacgttaattaagtattctgttctgtttaaatcaaatcaaattatatatcacattaattaattcatgctgttaatttgtttgttttcccgacaaactgtatctaacttttttagatccaaataatgtgtttaattcgatcattgatcactgatcagcgccaattacaaaaacaaaataattaattagtatctaattaataaaagtaaacctagctagatggacgtgagtcacatcgcttgatcttataattagcttatgattaatttctctaatgcgcctagtttaatatataatattatataattaatataggattagacacattaatatgccccattcattctacttttcctttttaatattaattatgaactttgattaattagtcaatatatccttaaatttgaccaaccaaaaaataaaaacaagaatggaaaaaataaagataagcaaaaatgaccacacacatatatatatatatatatatatatatagaaatggtataaggggcatatacaaattaatatcagattttatagaatttgatttaataaataataattaatcacaacatacatatattgatacgatgttgggtactataatacctaatagtaataatatatacaagattaactctagacatatagtaggtctgtgcctaaagctaatctaagtcaaaggcctcaaaaaataaaaacaaaaatgaaaaaaaaaatatagataaaatactttt

SEQ ID NO: 300134 - DNA, 2428 bp, Cannabis indica
ttctagtgtaactctatttagttataacctcccaattagaatgtaatttacttggttctaagtgtaatcttggatagagattctactgtatatacttctgcgtcaattttaacaatttaattatatgaagaaaaaaatgttcttctttttctttatttttaaaaaatattcttgttaattttttttttttgacgtaatgttttcgatcataaatcataaataaagttgtatatgtatacatagctaaggactaaaagatcaattacaaaaaacagttgagaaagctgttagaacagctagaatctaacaattttaacttactaattgacatgactaattgatataatacacactgtaaaactctcccttaagatggagtgtagatatttgtcacacccaacttgaacattagagtttggaattaaatgggcaatgaagctttggtgatcatgatgtctgtgatggtatgttgaaatggaacatgtgagagtttgaagcggttattgttgacttgttcttgaaatttttctcaaataatatgacaattaatgtcaacatgctttgttcgttcttgaaagacagcattctcagagatgtggatcacaacttgaatgtcccaatagcgtgtggcaggttgatagtgttggatgccaaagttagctagtaagttgagaggccaaagaaattcacaactggtgttagccattctcttatactcagcttctacatatgatttggaaatagtaattcacttttttaatttccatgagatatttttccaggaatgtgcaaaaaccagtaatggatcttcttgtataagggcaagtaccccaattagtatgacgaaatgcatgtaattgaaggaattgtgatgttaatgcttcatttggtggtggtgaagatgaatggaacaataatatccttggcttggagtacctttgagataaaggatgcatagagtagtttttatgtgaggttttcaagggtcacataagtattgagtgagcatattgatcgcatatgagataacaggcctggtaatgatcaagtagatgagcttgtcaattaagcttttataagaagtaggatccaagataggaggaccggtatctttgcaaggcaactagtttaattgagaatctgcaatatataaggcctttgggagagaaaattcccagatttgggatctcccagtctctatactaaaaaaattgtaaatgacctaaatctttgaacttcatatgagaatttagataagctttaaaagcattcattaaagcattcactacaaagtccttgttggtagcgatgacaatgccatctacatagactagtactgcatagaaagcattgtagtagtccttaaaataaagattgatcaaaagcaaattgatagaaagaaagcaaggttaagttaggttttacaaaccactgtcgagtggcattttttaagccataaaggctttgtttagctttcatacaatattgggataaagctccccctcatgtgtataacccttatgaatggtcatatagattacttcttctactaagtcacgaaaagcattgttaatgtctaatttatgtaatgaccattttaatggccactagtgcaaataatagttttagggtgttgaattttgtaacaaatacaaatatctcaacataatttatgccaagttgttgagcatactgtttttctacaaaatgtgccttctatggatcaatgtcaccattggactagtattttattctgtagacacaattttgttaccaatgatatgatggccaagaggtaaggaagcaatgatccgtgttttaattcttttgagagctaaaaattcatcatccatagctcgaggccattataaaagttttgtagcttgaatatatgtaacaccctactaacctaggcagactacaataattattaaatgtcatgtattgtccattgctagccaaaggatttattaaaagatttgattaattaaaacttttaaataaacataaactttaatatataactataaatatataaagaatttacatattctgagatatcgttttttttttcaaatacaacaacatattacatatacaaaaggtgtgacccagtgactaacaaaatttgagcatttgtcgtcccgaacaccagaatactctaggcctaaccaatcatattattgactcaaaaatctggatgagacttctaagtcacacatgctcattagattggcaagaatgaaaaagtggttaagtaattgtaataaagacaacaaatttacaatagttcactccctgtatcgtgacagtaatggagttatgtctacttcaagtttttatttctcatgagatggtaatttcaaaaaaacgacttgcgtcagaagctttaatttttaaaaagagaagctctaaccttgtgggtagt

SEQ ID NO: 300135 - DNA, 1478 bp, Cannabis indica
tatgtgagttattacgtgaatttatgtaaaaaatacaaaaaaaattattttaaaattaatgtaaaataaaaataaaaaaaactcctttttatggaaacggtaaaattatttaaaattttgtgcgatataattacaacctacaacatcatttatatattacattaattataactttttcgagtattgaaaatgccgctaaagcgaaaaggaaacttattaatctatctctcacgacctgagaaacttattcgcaataagtatggctttgttgatctttatggggaagatgatgatacaaatgtggctaactcttcccagatccttgctccgtgtgctcttcactccatgaaggttggccttcgtgccggtatgtcttttattcccctccagtcgaacaccatttgtggagattgttaacgcagattgtttttgaaaatctgcattattaattgccccctcaaaaagtactttttttaaaaaaaaaaaaaaaatctattaatttggtttaaaataatatgcgttaacatagatgatgagtctttgcaatcttcggctaggaaggttcgttcgtcatgtctccctataagacttactaccaggaaagcttaagctagtctcactaacttaatattgcctagtgacttgggaaaggattgcaattttaacttacctattgctagtggcgctatgttggctgtccccctgtggaggatggtggttcatatcatccacaagagccatgagagatttcgcttagaattatagagggttggggcagacttctacaattctggaacttaaagccctcattcagtagtggaatcctgactttgtgttcttgtctgaagtgcaagtggaagtttcttctctagtacgtacccttaaacaatttaacttttattttcatattaatgttccggttgttggtattgtgggtcagcttttacttgtttggaaagagggctttgtctttgagaatattcgggtttccaagaatcaaatttttagttttatctactcggatctgttccatcacccctagttatcctcatgtgtttatgccccctgtactttcatgagaaacaacgattttggaatgagcttttgggtcttggatcgagctcgatttggggatccttggcttattattttgggatgttaattttgttctctcgggttcagatagaaaaggttcccatggaagggactctttcattcagattattttgagtttaatcaaaaacaacgagttgtttgaattacctattaaaggtaataatttgacttgggataatcattagaacgactctgagcatgtgaaatcagcactagataaggggctggtcaattccgaatggcttaatattttttcaaaagaaattaggtaaatatttaaatttgaaaagtggttatagatatttcaaaattgttgagacattctctcaagtagttgtgtaacaccctaactaccttaggcg

SEQ ID NO: 300136 - DNA, 2443 bp, Cannabis indica
ttcggtcaaccacccaacaactttcgcttgattgagacctttgtctgatgcaacattcggccaaccacccaacaatcttcgtctgatgatgtaagtgatagtgtaagaggtattttggtaattaaaagcacataaaatgtataaatattgtcaacactttttggaaatatctttgcaaataaagtattaatttatattttccatgtaataattcttttaattttttattaaaaaaatatagcattaatgtcattgtgtgaaatcaatgtaaatttcaagaatatcaatctaaatttttcatctcatcaaacattctacaaaatactactattggagatgctctaaggattacgcgtgtacagttgtcacaaattagaagacagttcataatatgtccggtgtttccaaatgtactctaatatttccctttacagattacaccgtcaaccgacctctacataatatgtgtatatataccactgtctttctcacatatctctattcatccaccttctctctctaaaaccactaaaaaaaaaaaaaaaatggctcgctctaccttccttgtgttcttcatcactttcgcaattggatcttcatctgttttcgctcaatctccattatcggcgccgaccggttcgcctaccaagtctccgccgactgtttcatcaccgcctctagctactcctccatccaaaacttcagtcccgtctccgtctccgtctccggctcccacggcgtctcagccagcctcgtcccctgcatcggctccatcaatctccacaccaccgacctcatctccaaccagctctccaccagctccaccgacttctggtccttcagccgcagtttcccccagttcttccatcggaaaccctccgtctgaggcaccgctccctccttcaccatctaatagtcacagcagaatctctggtgctggatttgtagccgcgatcatcttagctatatcagtttcgaatctgatggtgtgagtttttcgctgttccgcctcctgagatgcagattctaagttttttcgatcgttttcgaaacttagcagagtcgtagtttttttaatttttagtataaaatctctagattagtatgatattttggaggagaattaatacagttatcatttgtgattaggtgatgattaattattattaataatagaattaagtcatatgtttttccttataatttgttcgttaatgtaatatttatttacaatataatattaaataaccatatataataatcaattaaataataattattattacccttcaaaagaggcaaagaaatcgaaagccaaagtaagtagaacaaaggtggtggtgtgagtagttattctttgttagttgttaagcctattatatttttggaaaaatctgtagtattcctacacgtgtgtttcagtttaagttttttaatgagcttgtgccgatatattttaaattggtattttgtgattggttagtaatattttttaaatgtttttatattaaattatataaaatattatatttaattgtaataagtatatactaatatcttttagtattttttatctattggcattatttaagactactacaattgtgtttcagtaacagtaaatataatttatttgtttcgacattatttaagaccaaaccaccactacttgaagttagctcaagtaagggtgtgtggaggcttatgtgatcgaattatacttaaaaaaaatgaggaagacattatttaagtatttgtaaagttttaaaaatttctaacaaaagtgaagaaacttttttaataataaaaaaatcagtaatacatttaattaaatatttaaatttattttccgagtaaatatttaaatttatttttattactgtaaatttttttaaaaattaaaattaattaatttttttttaaatactgaactaaataaaattttaccaaaacactcattttaaaagctgtagtatagtctttttctgtttaatttgttttcctaagaatatttaactattttataagaaatttaaataaagaaaaaacattttagttaatcggtttggttcctattcccttcttgggttgggtgaaggaaaagtaaaaagaaatgtggtttttgttttatgaacaagtgtcacgtggtgacagctgttgaagaagaggcatgttcgcgttacataaacacccatgtgattctgctttgggccacacacgccaacattgagataattacaccactcaaaatttcaatttagtgaacttttttttttgtaagttttataactgtgtagttatattttgattgatgttatattgttagtttttagttatgctgtccttatttttagttgtctttagttgtcctgttttgtgttttactgttattttataaaaatataatatttttaaaaaaaatttttgtgtgacagtatttttg

SEQ ID NO: 300137 - DNA, 3863 bp, Cannabis indica
tctttgtttttttatgctgctttgtggcctacatgcactactatctccttaatgattaattaagactcgtaaaaagggacttattattatttgtcttcaagtggatgtgtaagcatattttagtactctaactttgggatatgatttttgaattttctttatgtcatgcttgttatagtctctaataaataaaagggagggtagtttctagttcggcatttagatggcaagaaatgattattgactagtcaagcttatgttaccaagaaagtacttaaaaagagtccgtagaaataaaagatacaagttttattactgacttgaattaattaaagtagagagtggcactactggcaatggttgtgctatatagctaataattttttgctttaattagcggtcattattatgagttgcttctttagttgtgtacatatatgtaacataagataactattacatatagagacacaatagtattatttgctagtaataagtgatcaaccctaaagttataatagtcagtattaatctgttcattattttggcagcatgggatttaaaattaattaaatgcgagtaatgtaaagtgtaacttgtgtaataattgtttcaactttaaagagatgtgggttcaaattcaatgactttaggctgggccagacatgagacatgtatacgattcgttttgggctgtagacacaaaagagtttttttctttgtcagaatgtcagagagttgagagagagagagtagtggtggtctaaaccaagtgattactgaccttacgaaattattttaaagggttttggtaccctagttgttatattgctaacctttttggtggtcaccaccatcaaacactgcactggccaggcctaaagaagagggcaggcactattggccactgcccactgtgaaatgttttcctccgaccgcttctgcttgtatgtttcaatctaacatcttccttttttgctggtaatgcatgccaattttgaaatcagatcttatttataatataaaacaaaaccattcattggtggtgccattaccttacgtacttttaccatatatcttttagtggggttaaatttgtgtgggggccatggtgatgaaaaatcaagaaaaaaaagtcttaagtgacgaaatttgagtcgaaaggctgacatagtattcttggtcgtgaatttgatagaagagaaatactaagagtacttttacaccatgtaatgtgtgcttccttaattagacagacacatttaacagcataccacatttatttaacagtataccccatatcgatctttcatcataatttgttacttattagtaactgttcttctatcgagagatttttatgtattgtgctttgaagctttcacatgaatttggtaaagtactagtgcatgcatatattccatggcaagtagtgaattagaattgcttagcagagaaagtgaaaaaaataattcgaatctcactcctagaaaaaactctccaaaatttcacttttcttatctaaccatgaaacaaacaagtacgttaaagtactaattttttatacatataataataaaaaattatttttatttaatcgtttcaaacaaacaatttgatttaatttgttgtgtgattcacatgtggactaaaggcattgaacatatttttaaaaattttgctcaactccgttagctctcattcctattgggctaattaggatttgtcctagctactccaaaaatactaaatttgaaaccaattcattttagagagataattagaattgtagagagagagagagtgatttgagggatagggatgtaaaaagaaactagttatatgtttgatcctactcactcatgacactactataattataggctttagaggcagtttttaacccttttcaaagtcgatttggtgaaatttgctactaacattgattaaggcaatgctgtaaggtcaaatataaccgatcacatagtatacactatgacttcggttatttaataataactgactccataatgtaatcagaattgacagcattaggtaaataccgacgtcataatgtgtaaaaattatttattttctaattttaagcaaattaaaaaaattacaattatattacacaaatattttaaaattaattcaagtgttaacaagttaatatgtctaattaaacatataaaaattacaaaataaccttaaaaaaataagttagggaagaaaaattcttatatatttcatcatcaatcgtctaagccttcgtgaattactagccagtaattgttctatcgactgtcgctctaacggtaataattcaatttctgtatcgtatgtcttcttttcctcaaacaactaaaaaaaaaaaaaagtaaatagttatattagtgtatatattattgtttgttaatataatagatacgataattaataatgaaaacttacagctttttgattgtttaaataacggttagggtttgcacgcgcgacaatgtcactcatgtattttaatacataaaactacattctcaccctcaatttagatttcaatattacaagtaagtgtcgtttccttcttagactttaggattctattttttctcctgcttgatgtattctaatacctttttttgcatctgttagactgccttccttagtcgcccttaacccctaagctggaagagaggagagccatctacaaatccttctcacccaaggagttgaagtagagggacttgtgaccactaagagcttacgagaagtaggcctcattacttcacatcaagacgtggactatctttctacgacgaaccaagtttaggagtctctctgaggtgattcgaatgaggttaaggaagctatcacaatcatcactgctaaggaggccataaaggcagtaaaagctgatgagcaatggctggcgaattggacaattcccaaaaagcctaagcgagactgaagaactcactatcagattcaaggaggtagtatagaatgagggtgcctcgggagcgaacacctccagtagtggtgaaacacccttttacataattagggctcccactctaactaacttagatgttgttgatcagtgtgaatttgatccatacttcttaaatttagatcgttgtaaattcccttgcaataaatacatagataaagtagattagaattgtagcgagagagagagagagtgatttgagggatagggatgtaaaaagaaactagttatatgtttgatcctagtctctcatgtcactactataattataggcttgacatggagtttttaatcctttttagcgtcggttttggtgaaatttgctactgacactaatttaggcaacgttgtagggtcaaatataactgatgacatattgtacactatgacatcgattatttaataataactgactccatagtgtaatcagaattgatagtattgggtaaaataccgacatcatagtgtgtaagaattaatttatttttttaattgtaaaacttattataaatttagaaatttactttatttcaattaaatatttattaatttcaaaatattatttaaattaattttattactggctaatatatttaaattaattttagaagcaattaaaaaattacaattatattatataaatatttaaaaattagttcaagtgttaacaagttaatatatctaattgaacatataaaaattacaagttaacttaaaaaaataagttagggaagaattttttttatacatttcatcatcaatcgtctaagccttcgtgaactaccgccagtaattgttctatccactgtcgctttaacggtaacaattcaatttttgcatcgtatgtcttctt

SEQ ID NO: 300138 - DNA, 1209 bp, Cannabis indica
catcaagcaatccacgctcagaaaccctaatctcaccctcattcccattcctgtcctcttctttcaactcaaaccttaaattccccaactcaacctcaaactttccagctgtacctttcttctcatcatcaagattaaagaggttatacaaactattccgcgccctaacatcgcaagacctacgtctggtagggtcagaagggttagcaaagacctcagacttgggtccattgcatgatttactacgacgaagctctgatccagaagaagaagcagcaccagcaccagcaccagaaccagcttggtttcgagtgggagtgtcgttgttaacaaaggattcaataccaaccaagcgttctctgaggcatgaagcacaaaacccagtaatgggtatgctaggatgacggtgacaagtggaaagacgtctagactgagcctgagcaagagccaatggttgaagtgggatgacagccatgactactactaaggctgaacatcgattgatttggttggattatgtaaaaatggtgttgcaacatccaacaaataaatctgcataaattaaacctaattaattcatctcaaaaactaccaaacccaaatctcagaattccatacagtttctaattaggttttgccatttcagcttaaacacaactcaagctcactaaactaaaataaaaatcaaatttttacgagtgttggggatcacaaaacgacagttattaatgtttaagcgcataaatcagagagaatattgattgagtgagttatggaagaaaagagagaaaatgttggttagtagtaatacctacctgttggagtgtgagaacaggaaatggagaagaggaggccggcgtcggtggaggccgtgagaagggaaggtcaggggttgggattggtgaccgtgatggtgagagagggtagggtagggtagtctgaaacttttaggtcatctttgtttcacaccacttgcccactaatccattaaaatcaccactcctatgtttctttccttccattttcagcttttacaaatactcttcacatttcctaagatcatctccaatgaaccctaaaacactaaatatagtgtagtttcacactatatttattctaatggaacactaacgctatacttataaatagtttgtctatactattccaccaaatttaataagacactgtagactacacttattttttttt

SEQ ID NO: 300139 - DNA, 859 bp, Cannabis indica
tgttaaattttaatttatgctaatatattatatatttaggtttctatataattcaatactatataattttacataaaaatattgtataaaatataatataatataatactatacaatacaatgtaatacagtgtaccaaacgaactttattatatgtcatgtacacataattataaatatttttaataatcaagatagaacaatgaatatgactaattcaggatagggcaagagtaaaagtgtaattagaatttcaacaaattgtcaacttatgcagctctaaatatgttaattaagttttcaaattggggttttttaataggattcttttggtacattattaaattatattttatgtaaaattatatataatattaatttttataagtatataaatatatagaattttagtataaaattgaacatacaattatataaaaatattttatataactcaatttaatataaaccaatacaatacaatttaatcaatttaatacggagtatcaaatgacacattttttaattcctataaattatttcccgaacatcctctaaactctatataatattgtcgactactatcatattttatggaagcactcaatttatttctttttttggttttattctttcatttagtattttttttttctttactttccgttaaaataaattggtggtgtttaataattttttggattttttgatacagaatgaaactggtatgatactacaaatacgatactaaaaaaatagagttaaagcaagatagtaagagcatgtttggtattgttttctgtttttattttcaaaaaattatttttagaattgaaaataaaaaatagtttttgaagtt

SEQ ID NO: 300140 - DNA, 3874 bp, Cannabis indica
tctgatttttaatgtttcacaacaattgcattacagttaaataaacattttgctaacaatatatatttcgtctgattgaaaccttcgtctaatgtaaccttcggccaaccacccagcaaccacccaaaaacttttgtctgattgaaaccttcatctaatgcaaccttcggccaactacctagcaactaccctgcaactatcgtctgattgaaacctccgtctgatgtaattaccgcgcaaccacgcagcaatcaccttgcaactatcatcttattgtgtaagtgactgatgatagtgtaagtggtattttggtaattaaaatcacataaaaagtataaatgttgtatttaccttatggatgtatttttgtaaataaaattaaaattttttttatgtaataattctttagttaaattagtttaacaattaattaaaaggttgagatttcaaaacccaacaacttgagctggtcctggatagattatatataatatgagttgtgtcttacatccttgttcgtaggttaacacaattcaaccaatgattcccccaagttaagattttctaagttgtcgttttcgacagaaacatattcttatgtttttctttaacatttgttttatataattaagtgcatttggatcttccaaacagctggagtagctcagttggttagagcgtgtggctgttaaccacaaggtcggaggttcgaccccttcctctagcgaatttgaagtttttatttctttatttttttataaagcaacaaaatataaaaaaaaaaaaaaacattattaaatttatgcaaagggtttttcaattaagctttttttggattggttttcacctttcactgaggaaacattgtatcgctccatgcccatctgtttgtttctattcatggcaaatttttccttttcctatgtttcttgaattgtaatatcgactaagtctttcattgaaattgtgtacaatgatattatatttattttaaggcacaaaacggccaaacataaagaaaacaaaccaaagaattaaagttaactaactatgttcacaacataactgttgagatgaaatttatcttaaatgcaaataagagatttatcacttattggaagtgtaatgggaaaaagaattatgaaaacaacatcagtattttcctctccacgaatgccacttcaatttcacttggaaccacaaaggaggcaagccaagtacccctcttgataacctgggatcaaagacatcaaaatgcgcttgactcaaagaatccaacagaacttgagcaggcaccgcgggcagcagcaccggacgagcctcagcaggcacttttccagccaactcacgggccttctgtaaatgaacattagctatagaagccatgtcaaacaccgcgctacatagattttctcgagaatccaaatgtagttctatttgacctccctgtttagacaataaaccatgcttggctgctacctcggtgggtatgtaagaaaagtggcggttgcgcctagcgtggtaaggtagtgacttgatcagcaaaagaaggccactcgctttgccaacgtgcgaggctgcatgatcagcaatagtggaccttataccaccagcttgaagtgtagtgtaaagaatagttgaggcagtgtcctctgcatactgctccaactctttaattttttcggggatttcagtgctctctctcctggcatcattaattcgagcttccactgatcgttttaaccaccctttggtgattttgttctcatgtataactgaggagagagcctgagctgtagggtgttcaatagcctttttagcatagattttgtctatggcttcttgccaccacaagaggcgcataaggccgatcttcggatcagaagcaacatccatagctctggcagtttcgatgttgaaagcacgaattgcaaaagcagccttcctcatgttgaggggaagttccagaaggcaaaggtagtgatggtaatcatagcttcttacttgttgtacacaatacgagaacgatgcccgcaagctactagatgtgaaaccaccaccgctcatctaatttctagggcaattctacctgtaaggagaacacattgatcgattttgtaagatttagtctagttaaccaagctttaatgtaaactataatattatgctcacaaaccaaatacaaattctaaaccttatacacattcgcaaaagattgagttttctctaattttgaccctcaatttattttagaattaaaaaacggtttaatttaagaacaaccctcaacttaatcagctcatacctcaacggtctagaaaaataatgcaagttttaatttaacatgtatgatatacataaaaagccaatctttgtttagttgttctgattacatgttactatacacaatcaacaatcaaactcttcaattactttgtcaaagctcaaaatacattaaatttaacaattataatgcaaatcccagtaacagaaaacaaaaacccatattttctcacagcaaattaatcaaacagatacaagacatgtattttctcctactattttactacagttacattacaatcgataaataaagcataggccagtactggataaactgaacgaaacaaatgtgcctaagtaaagaaattgaacccatctaagatcttcaaagaaaagaaagggaaaaaaaaactctcaagaaatgaaagccaaaatacctcttaaaaccaacaaagagggtaaagagaagcttgattcgaaaaatagaatgtcttggctgggggcaccgtcgacttgaggaggtgagagacgccgtcgtcgaggtgtgtgctgctgcagctgagagcgggggagagaggttgagatcggctggaatggaagagggaaagagtgatgatctattggactagaaatattgggcttaggaataaaaacgcaatgggctacctaagaccatctctgtatttggtaaattttgtgttttgaaaaataaaatgattttttttttatgatatttagccctatttttagggttgtgtgacaaacataagtttttttttaatgataaaatcaccttaaggttgggtaggtattaacttttttttttttgaacatgttaggtaggtattaattaaggatatgcataaatttatctaatttacaaatgatggatctaattataaccgagttaaatattagatatctaattgtgatgggatttagatattatttttgaatattcaattgagcaattttcataaatatgagaattgagggtatggtttacttttttatggcataaataaataacactataggattataggttttttaattttttgacatttatatgaatttttttatgccatatttttgtaaaaaaaagtagaaattccatatgtgtaaaacaacaataagttttgctagaaaagtcaccggcaccgaaaaagtcgccgaaaaaatcacggtcatcggaaaagtcgtcagaaaagtcgctggaaaaatcaccggaaagtcaacagaaaagtcaacgtcgccggaatagtcaccaaagtaaatgtctcagatataactaaaaatataactagttgtacgaataaaaattaataactcaaaccggttataattgaaatataatcggttatgtaacataataaataaatacaaataacataaaataaatcaaaccagttataattaaaatataaacggttccaaaacagaattataatgaataaaaataaataacacgaaataactcaaacatgttataactaaaataaaactggttatagaacataatgaatacaaacaagtaacacgcaataactcaaaccgattacaattaaaaacaaagaagaaatcagttctt

SEQ ID NO: 300141 - DNA, 6038 bp, Cannabis indica
aaaagtttaaaaaaaaaaaaaaaaaaaaaagtccattttttttaaaaaataataatcatatcaatgccgatctgaaaattaagcaattatctgtttatattattgaatgaatattcatggttataaatctatgaccaagtcataactagaattactgtcccttttaataaataattctattatggtgaaaacatcattctaaagctatacacccaatattttgtgcatgcattgcgcatacaacttctgttgcatacactaagtttataggtaacaacaccataaaacaaacaagtcatgagttgtcacaatcggtgccacgcaattacatctgaccgcatcaccacatgcaagagctccacgtgtagaaggcttaagatttgccatgtgtaaaggtcatataattacaaatgtccgaatttgtgataaataaaaaaggtctaaccattttatatatgtaacaccattctcacaagtaaactacaaaataaccttaagaatggcgtcgaatcttagaccagtgttggcttatatagttatttatgtaaaggacgtagcgaaatccgtaacgttctacgaaaaagctttcggtttcagtgttcgccgcttggacaaatcccacaggtatatattaaatatatatatgtatttatttaattatcaatcaataatgggttagtttttaaataattactaggtggggagagctagagagtggtcagagcaccatagcctttactccgctacatcagcatgaaacagatgaggtgacaggatcggtccaaaccgcagccgggtctcacggtgagagacagcctgtcgaggtttgctttgccttctcggacgttgatgctgcttacaaagtatgtatccatatatgtgcgtttgcgttagtgtactaattggggtttgggatcttcttataatatactgagtttgattttatttttatttgtagtcccaacatgggagatgggacttaagtgcaacttcgttaagaaaacaacaatatattattgaaaaattcttttattattgcatctgttttggtatctagcacaattttaaaaaaatttaaaaaatttaacaaccgacaaaaaatggggtttaaaataagtttatttcttcactagtttataaaataaaatttgaacctgaatgaggtcttaacttattttaaatctctgaaaatttatttaaatattttaaataactacaccataaataactattaaaaaaaatttaactagaaaaaaaaatctgaaacaattaagggcgcatggttcaccccttttaaaggagggtgttgtagaaacactgtattattaggttatgttttgaatgtgataaatattattgtaataatgcagaaagcaatagagaacggcgccgtatcagtgagcgagccagaagaaaaggaatggggccaaaaagtcgggtacgtaagagatatcaatgggattgttgtccgaatggggagtcacgttcaatcacccaagcatgactgattcatttcaatagcaccctctttatgtatatctgtaatgtctttagtcaaaaataaagtcttcttcgaggctttttcccgtcgtacttgaaactgtaccttgtgttgtgtacctgtggatatacctttactggataaaggtcgagtctctttaatgagtttgcgactctaattaaatacagagctttaacttccactaggtaatactgtaataaattacatacgaagcaacgtcaaagaggaatgggatgaaaattaggcccattggtaacaatatttggtaaagatcaaatgaatgtggacaatgaagggtacacactaataggttttaagatgaattgaatatggacttaaaatgtgaaacacaaaaccccactttgcctatcacggccggttgtttcaaaattgacatctgatcgagaaagtacttcaaacatctaaagattctaaacaaaagcggtcaaaaacagagaatgggtttatgacaagaacacttcgttgccaagcactaatgaaaacgctttgaatacaaagatgtctccagtcatagcaaatactgtgacataaagagaaaaaagaaaaacaaatgtaaaaataaaataacaaaataggtaaagaaaaagtaaaagagattgatgccagaattcaatggcatgctacatggaccaaccccaaggcaaggcagtagtcaccaagccaattaattagtacaagcttttagcccccaagcaagaataggaaacgccttgaatggtgaatcacaacatttcttgcgactttctcacacatcggctgacctttttcttgaactcctctctcctatctctccattccttctgcaacacaccaaaagccaacaacaatcttagaactcttccacttttacatatgcattgtgcctttcaaaaaaaattgaacacttctagagcaaaaaaaaaacagactgaaacatttgagcattgattgctttgaagaatttttaactattttctcaacttgtccagtagtagttaagaaaatgagtagataaatcacatagcaaaagcattcaaagggaaaacatggaaagacttaccgctgcttcaacattggcaggagactcgtcattcggactggaaagcattgatattatacttaaaactatgctttcaacctgcagggacaaaatttacacattgacaatgttataaaaatgttaacggaacctcaggacccttctttaaccaccatgacttcatgaggacatctataaaaaatttaaggctgtaaagtcacagacgagaaatatagaacttgtaatcaatcattaatctgtaataggaagactttgactatttgcagaaagggagacaagtaacctaaattttacaatgatagcatgaaaccacagagcccagcctcccgttacaaaatttcatccagaaagctttaaagcccctttgatcctttccttggggggaagatatgaggcttgaaagacgttgaagctatgtgattagcatataatgatttgcaactctgaaaaactttactagccccgtattcatcttcatagtaggcaaagttaacttttgttcatagtaagcaaataacctatatggtccaaagacgaaaaattcaacaattgtagtcctatacttctattttctttttcaagcaaagacatgtcattgatactttgcaagagatccatattcaggatcagcactcccttgcaccagctaaagaccaaccaggacttcactgcgataacttccataacaagatcatctcacaataacattacaaaactcaagtaacagcaaagtgctactgagctcttgtgagaaaaccataattaaatgaagtaaggattagctaatgtttctaaatgtccaacaatttatccattgaaattgcaacacaaatgcaaaacagctacaattttaatggcaatcaagaatcacttagaagctggacttgaaaactaaaaattgcacaaggtcctaaaagctaaactctaaacaaaaccgatgaaaaagatatagatgcatattactttcacactagaaacaaactgtcacaataccatattgccaaactccatgttctttaccattgcaaatattcaatgcagaatcttctcttttcaaaacaatgaacaagaataaattccacacatcacttagaggtgacaccccttcccaccagttctacttaattaaatggctattctctatgattaacaattgacaacagttggtggtctaaaggtatgcaagcaacaaaatgagcacacattatgcttccacgattagactcttcacatctgatctccctacccatgaaggtcacaacttcaatttacatctggtctccctacccatgcaggtcaccgcttcaattcctcaactcatagcattatctctctcgtctcattgtctttatcattactgtctactgtttaatcatttgtcaaatgattagcaagaaactctgtaacccaaaaggcccaaacttcctcacgcatagctagttggaactttcgtgtctgattatggagttcgggttacttataataaacgagaatcttcatactctcattcacaacaaatctataacagtttagacattgcacaactacctataactataagatgatgatacatagatcatctttaagacatcacataccgtatgaacaggcgtccaacgttcacttgcaagctcatatccatttggatcatcgccaggaggatgaagaatcgatatgcaaacacgtccatcaggataaactggaaatgaaaaagtgaaaaacgctctcaatatcatgttaagaatatcaaacaagtggaaattagggagcataacaaaccatttggatgccaaatctccgaagtaaacttcactgatggaggactgttcgggtagttagagggaaaactcataatagcattgaaaaatcctccatcgctgcaataagatataaaacaatcagtataacgtcatgtcatccattgctttgaatgatacaaaaattttaagcaagaatgttttctagataaacataacttgcctcagaacataagagaacatatagttcaggcttacaaactcaaaactaaattaataaaacagcaataaggaaagaagccaaagtttacatccacccgagccctcaaaaacagtaaacaaaacagaacaaaaatcaacaagtcaaattactagtaagataagccgaaaaagatgaaccagcataacaagaactggtagtaagcgatatttaagttaatcacttagcacctgcctaagaaaatgagtaactcgccatggagcagaattcggaaagccatttaaaaaagttccaattttaagaatatcatcaccttctaggatcacaaataaagaaagtaagttgtttctttcgctagtatacaccaagaatatattccaaaatgaaaactgcaaactttcccaccgtctctaagtcttatccctaaaatcagtttccgataaatctttatcataagtaacataaagttaacccgaacccaaaaaaccagcttgaaaattggttgttcaaagctccagaccgaccgatcatcgtttttcttacacctttaatctagaagggcatccccacaaactgagaaaattttcttttcttgaaatatccggacagcacaatccaattctaaagatcaactaacttcaagaagaaataaacaaatttcacccaaggatccaaacatccacaaacagtcgcaggcagacaatatagaaaccgaaaaaccccaaaaattgatcaagaaaaaaaaaacgaaatttttgagttggcaaaaatcttttaaaaagaaaacgtactaaagcgtatcgggaggtccaataattgtaacgctccattcaaatatattcgtctcgtctaccagaccggccgaaaacccatccactggattcttgcaaagatctgcaaacccaaatacacagattaacctccaaaagttaaaaaattaacatcaattaagatcacatctcaagacgaatcgaaatccagtaaccctatccgaatcaatgagaaagaaatttgaaaagaaaaataactcaaataacctttgagctgtttcagaaggaggaggcttgcctgtgaggccatgaaagatagacaaatggtaaagctgtagggagacgaagagagagctcggagctctcagctattgcaagggggagagaaaaagagctctttaaagccgacactaaagtatatttatagacagaaagaaggttcggaacgtagactcactcattattactgtgtgggaaacgagtccggcgaaagttgtagctatgatatggtgccgatgcaaattttaaaaccgatttctgtgaccaattgtatttggacacgtagaaaatgaaacgttaaggtaaatgttaaaagactttcttgattagtgtccactgttggagcccgaacagtcagatcagatacatctgttaaaatttacttactgctaccttgctattttgttttttttttttttgtaaaatagaa

SEQ ID NO: 300142 - DNA, 3190 bp, Cannabis indica
aaatataataaatttttttaaaaaaagtagagttttggtgaggtattttaaagaaattaatgtatgatgtaatgtaaaagtgtgctgtaaaataaagaaagtaaagttttaataatgtattttaaatgataaagtagataaaatatgggaattgctctacagacttgttaaatgaagcaacccattttcaaaaaaaaaaaaaaatagtccatacgttacaaaaagaaaagataataagaaataatttgttttccaaatatagaaccaatttaatgtaacctgccaggctgccatataaattatacagaatacactatgttttcaagaacaaaaattgaactaaaactcatgtcgatgataaggtaggttgttaaattggtcctcatccctttccattcatatttggaaaccaaatagaatattctgttaccaaattttgcaccaatattataaggcatatagaatattctgttaccaaattttgcattaatattataaggcatatacaatgttctgtttccaaattttgcaccagaattataacgcttgaacattaatattttctttctgaacaaaaaataaagaaaaaatattacaaagcaaaccttgccatatggagtccaacactattgcaatgtgaaatgactataaaactagacgcataaaactgaaactcatatcaacttttttacatatttactagcctttgagttttattactatggctactagaaattctaaaaccattattgttacagctatgtctattgtaacatttactctaattttgtttgctggttcagtccaaggacttgaagaaaaatctattgagtttgataaacaactcaatcttatcaataagcctccactcaagagttttaaggtatattcaagggtcttaattctagaactccaaaagggtattttcaatttttatgttgattttattccaaactaatgtgtgattgttcttaataatccatgaacagactcaacatggttatattatcgattgtattgatatctacaaacaacttgcttttgaccatccattgctcaagaatcacaccattcaggtcaactatctttattttgcaagattttttcttttttctttttgtaagtacttaataaactttagagttgatttgaggttggttataatttacagatgaagcctaaaactattccaaaagaaaatggaagagatgaagaagcttcaagtactaaactctacaaatctccaatcaacatgcctaagaacataaagtgtccagcaggatcagtacccatcaaaagggccacaaggaaagatcttttaattgcagaatcttttaagtctatgggactaaatcatcaaacaaatactactcagcacactaatatagttgaccctaaaggccattatgtaagaacattgagtactatatataattatatgaagctttcttgatagaattattaatcttcaatcactaataagtttgttaatagtttcttaattgtgttgatgtagtttgcagtggttgtgtatcgagaccatgtttatggcgcatcatcacgaataaacatatggaaaccgaatattaatgatggtcagcttagtattggcactacatgggttgtaactggtcctaaagaagataccaatagtatacaagctggatgggcagtaagtacatatgtttcaactttaaaattctctctctcctctgatttaaactgggattgtcaaagaaattgtcatagtggcctaagcattttgggggtcttgagaaaaaaattgaaatggggcattttgtaaatgaaatttgttgtgctaaaataaattttaggcctttttgtaaatttttcagaagattggatgataaacacaataccatcttgacttttttgttgttatcacacttttcaggttcataaacttctatctccaagtgatgcgacactgtataccttttggactgtaagttttgagaaaggtgaaacaaaataaaaccacttatccataacactaacttctcaaatattattttggttttgaaaaatgatgcagggagatggttaccaaaagacaggatgttacaatgttctctgcccaggatttgtacaagttagcactcaaatcgccctcggccaagttttaacaccttcaactcacaacggtgctcaaaccgatatgctaatcagcatatacctggtgaaataacagcacccatacatctctatatctattccatgatgataattcatgtttaaaaaaaagactaacttctcttgtgttcttaatttactcatcgatatcaggatcgccccacagggaattggtggctgatgtatgaaaaggaacctgttggttattggccaaaggatatcatacccaggttgggtgaaggtgcaactgctgtgtcatggggaggagagatttatagccctgtaggcacggttagtcctgcaatgggtagtggtgaattaccaaaccaaggctttggaaaatcagcttatataatgaggattaaagttgacaaagattacaaccatccccaatttcttgatcctaaaaaagattccctttcaactttagttacacaacctaaatgttacaatgcccagtatggtttccaagctgctgcagcttggggatactatagtttttttgggggacctgagaattgtttgctatgaatagagtaaaatactctttttataattttatttttttctttgcttgtaggaatcaataattaaaagttatttgatactagattttattatgcctttttgggtagatgatgcgagttgaaaatgacataaatttgtataaaaaatttgtgtgtgaggaactcataatcataagtatttattaggaaaatttttatatatatatacataatatatattttaataacataaataactttcatcaattaaatacaattatataacgtgacacgtaatatataccgtatataaaaaaaaaaaattatttaccgtaatcaaaaatacaaattagccacttcgcactaaaaacatactatattctccattaattataatagcaagactttgaattagtgcatgaaacaccaatcaaaatgaaaacttataaagttacttcttgtaaaataataaatcacaaatcgaaaactattttccaccaaaaaaaatccattaatgattaaaaaaaaag

SEQ ID NO: 300143 - DNA, 1434 bp, Cannabis indica
tgaaggaaatatatattgccagtattaatgtccatatcaaagaacactccataactgtgaaccaagtatacctagtactataatcatcataagttcataactaatattatcagtggtcagcttgttcttacctctacaaaaagctgcacaaactccagaatatgcaagagcgaagacaatgtcatgtgcagaaactatctcaatgattttcgctctctttgatagcaacggaaattcagataagaattgccccttgggatcatgagtatcatattcatcctgatgaagaaaaaaatatataaaacctatgatcctaaaagagttatagcacttctagaaaaaattcattaagcaagccaattgttggaaaggcatatagtacaaaattaatatatctcttgcttttggtatttgaagtagaatgacttgtggtgttcttgattaatgcaaccaattagagcaaataagttgcactaatcataaaatttattctccagcttcacatagtagtactcagaatctaaagttagtacaacgggtaagagaaaaaagggcatgtaaaaccagatgttatgtccttaatcattcacggagataaaaagtaaacatcaggaaatatttttcccgttgcctttctccaacaatagatgccgatcgtttcatttaagaaatatttcttgttctcacaaattgattcttcgggttatggtggcaatctgaaaactataggatcttcataataataagaatcaaactggaaaaataatattttatacacaaatagacatgggtttcgatggattttagactggttattttttatggcaaacaaattccagtggaaaaagaattcacctaaaaaaaatagtacgaaatcattcttaatactagaagaactagttagtttggtgcataatgaaaagtaaatcaacatacagtgaggcgcatattacggaacctctcgagggcattgctggtgctaaaagcacgatcacgcttggagcaaatctcacgcctttgcagcttcttcacacagtttacgaatccatcggcgcggggtctcttgttagctgaaacacggcgaaccgagcacggtcgaggacttgctgaaatcctcctcccaacttccatttgtttccttaacaaaatttcagaaaattggtggaatgcgagtgagattgggaatggagtgtatggacttgacaacaaccctaacccccttcccgccctcctaaacaactctcagcatacacaccaacaaatcctaataaacaaacaattatgaaaactaaaaaccaaattgaatatagaatatatgttaaatttaacgattaggtttgatttcccgttaacaaataaatcaaataattaaactaaaaaattaaacaatcttttaaatattaataatctctttttaaattaaaaaaatcatct

SEQ ID NO: 300144 - DNA, 4653 bp, Cannabis indica
gaccactttctgttctgatgatgagtgtcaaaaacaacacccaagtaatgctctcttttgattacatattgttgtttcatttctgtgctatgtgcctagtaaattgtttataaaattaaatataatattttctctgtcaaatataggtgctcattaattgtcgaaacaacaaaaagcttctcggacgggtaagagcttttgacaggcactgcaacatggttctcgaaaatgttaaagaaatgtggaccgaggtaattcttgtttcataattgttcatttatcatctcattatgttccaattccctcaaacgtctctttttcattgtcaggtaccgaagactgggaaaggcaagaagaaggcacagccagtaaacaaagacagattcatcagcaaaatgtttttacgcggagactcagttatcatagtgcttaggaatcccaagtgaggtggataacttgtttttgaacttagccgccctgcgtatggttactactaattttcattaatgactttaagaccatagatcttgttctgaaagtgtcttgaaaaagggcttgttgccatccttgtagttagtttgtatggcatcttcttgatttgtacattttgttcaagtattgaataccagagtttttgggtgactactgttttcaccattttcggtagccattgacttagttcttggaagctttctctagaagaagaaattgcatcattcatggctcaaaatttcattaagaatcatcccaagtttccctctgatgtgatatttcaagatatatgaaactgtgatagattgataatatgataattagagtaatggtaacaacaaattaaaatgtgaggggtcaacctaaaagtattgaaaattagagtgttatgtatctttttttgagtgtagtgtaatggtatttaaagtgtaatgtgtcaatactctaattcattaacttatagttaatattaccgataacactactcaaaatccgaatttggattatttttgagtgtctattttttggtatagtgtaatgggattgcatatcaattaatagtttaagggtctgcatgcatatcaatgttggaatttatgttctttcattttttaactccatcaccactagggtttgggttcgaacctatttcctttcctttttttctactcctccctcactactaagctggctagccttggtagcttttgtctaatttctttaataaacagttcatgtcgagcttaccacggtacgaaactagcctataaaatttcaacaagtcacatgtcaagtagattaatgagtttacgcatttaaacaatcgtcaaccaacccacatctgggacagaacgttgtcttgacccaatacccttagagccttccatcttgggcaaactcatacaagcaaagctggcaaaaactagagagtagagagcagaatccaacctctcaataacatgtgaagttttgaattgatgctgtttgaaagaaatcattagttcactccactgtgacaatgagatttttctaattggagtatccagctttgatactccctctagtatataatttgaggcatcagcgtgagctctcagctaggagtctttcatttgtagactgatcaccataattttgtggagtttcttaatcttaacagattttattttactctattttgagcttcattggtcgaatgatttgttgtggttacaaatgtctgctatacttgtggacttatagcttgtaaaacagtgtccaaaattttaactgatttatgtgaagaagttgatttgattacattgatctattaaataatcaggctatatgaaagtgatgttgccagtgcagcgttgaattgcttctaatttcccaaccctttccaaaacaaactttattgtagtgtaattcttacactccataacactaaaaatgagtatattctctattttttaatttttttttttttataaatttatcttatctttatttatatcaaaaaccaacccgcatctttcacttggattgggctcgagatgcatatcaactttcttaaacaatattcatttattaacgggttacactatatttaaattttatttttttatacaattattaaacgaatcgtgtttaaataagtatatacttgtaatacacagatattaccatctcatgttattaaatgataaaaaaatttatgatccaaaataatattttcgtgaatataattatcaataaaagagtataaagaaaattcgagagaaaagaccttaatattatctctcatctcatattatttaaataatgtaaaattttatgacctaaattaatattttaacgaatataattataaatataagagtaaaagaatttttttttataaaagaccttaatattatcccttgctcaattttatttaagattccaaatttcaaacttcgatctcaatattttgtcaacattgagacaatgaaattgtaaaaattaccataaattaagaaaaagataatacatacagtatggattatgagcatcataattccaatctttttttagttattttttttccagttaaaattaacacccttaaatttagataatattaacttgacaaaaaccaaaaaccaagaaccaaacttttcaaattataaaaatttcttttacaatttgtaaacatagcatcaagaagagcttcaaaaactaaaaaccattgtcatatattaacagcgttgatatttttccaaacattcttagctatcaaactcgactaataataaaaatataagtagaaataaataatcagacataagtatcgatcaatgattttctcatttcatccacaatagcaccaggttgtccctccctcaacttgaagacactctctataacagagagttcagttgcagttgtgtccgagccacagaaggccgtccagtcattcaccgtcatgcccgctgcaatcacttcactccctcggttaaccgtcccagcaactaaagggacttgaagaagagttgaaagttcatccaagtcttcaacagatgtatgggggtgaacctgtttagacagaacacagcagaatttttagttgttttgatcgaaaaaaagtaatgaaagccttcaatttacaaaatatttaagcccgggaagagtttgattttgttttcctccttaccaagccacctctgttggagaaggtgcagtagcttccgactagtatgttcccggcaattgtctgcctgaaaacttctactccaagaacatctgctatcatctcttcggtttcctaacaaagttttggcacaaattaagaactgaaatggtacatttgggaatatgttattttaaactaattttactacaaagaaactataattcagacttttgaaacttttatatttaaacatcagaaatatacacaacacatattgaaactaagaatgtattctaatatctacaagcatagaatttactaaatctaaaactattttttcagagataaaagatttgagtaatacaaagacaataatagcaaacaatatatacatataaatatatgtttataccttgtcaagatcagtgtgtgtgagagccacatggtcattacatgctatacaatttccaagagcagataatttctcttcaatgcgttgaacaacaacttgatcaggtagactgttccttaagtgttgaagctctataataataacaatacaaagattaattaaaaactatagaaacataatcattgaagtttatgttatgaactttgcatacataatcatataataacatattaatcattgaagtttatgttatgaatatgcaaatgtttatacatgtatagttatatataccttggtcagtggtattatgaggtaccaaaagcccatttttgttacctgtaaaagatcaaatctttgatataagatactattaaaaaacacgaaaccaaacatttttactcactaatttttgattagaaagaggattaagggaacgaaccagcacaaaggcgaccgatgattcgagtgccggaaatagaggtcttcaccacaggaatcacaccagcaaactccgattcaaaagtgctgttgttaacaaattcatcgctttcagtttcaattattttcatatatacgaatcaaaacacagtaatagcaaacttcaatcatacctgtagaaattctcagagcctccaatagcaaccaaacagtaagcatttgtgagcttagagaacactccaacttcgcacgagttctcgaattgaagaccttcaagttcaacagttttgttagcaaacaaaatcaaaatgaaaatcttattacaaacaaaggacaaaaacaaaaagctactcacgaatggccatgttgtatgttggagcttgatcacaggattgggttaacgaaatggtgttttagggtttaaagagttttttctttgagtggatgaaagttagggttttgaattgaaaagatttgggaatgaatttgatttgattatataaaggagaaaactagatttttctattcctactgtaatgaggtccatggaaaaaatatttaacctttgactaatttttgcataaattaatatttttttttaagtgtaaataaatatttaaatttaatttttaatattaataatatctaaattataatt

SEQ ID NO: 300145 - DNA, 3239 bp, Cannabis indica
agagagagagagagagagctaaagctagaagaaatctgctaaatgttgccatttcattaacagctatagctaatatgtttctgcttgggagcagttagttcattgtaatagaaaatgcacaagaataggggttccattaatacatctcagtctctaaccttcaaaaattatgtgaaacttatgtgtctcacaaatcatatctcacgttccattttccattaccatcagcattgaatgtccaattgttttcccttatctggaaatatggaagctgaaaataaaagaaacaaaaaaattattatcctaaaatccacaaaaaaaaagtaataaagtatatcatggtttttaatatctcttccagaaagatgaaatgaaaaggtaaaaaaaacaaatcttccatcccaagagattaatggcagaataatttttttcgggtgccaggatcaaacatactcaacaatttcagattctcaatgatctaaagctggagcgccatatgaaagtctacaacaaatacaagttagataaacagtacatacctgctcaagcacttcataaccaaatttgatcctaacatcttgctccttctgaaagttcaaaatggcccaagacaattcagcagctcctgttgacctcttctgccagaatattagtaccaattggaataagaacaaactatgttatccactgtcgttgtgtcttataaagtatgtaaccaaattcaaagctcagagctcatacaaacctctttgaattctttgtcaaagtcacagcgtcccttaacattaaacctaacttcgccattagttgtcacagggaatgacttcttaccacgaacaacataccgtactttctcgcgcttatcgtatttcattcctcctccaaaacttgctgagaactaaaattgaaaacctttacttagtactacatatctcagatagataatgaaaatgacaattagataaacaatgctcagcaaccaaaattgagagcatacatctggatagaagcgtctcaacaacgcactgaaatggctcagaactccaagtcgggtatcaagctctccatgaaactaaaacagaatgaggaagaaaataaggggttaaacaggtctgtgccagttgaaaaatcaaatgtacttcaacagccatattcacatagatgaagttattactatgctaagaagctagggcaggtttactaatccctaaagaaaatatcgattcctcattctcaattgtctcaaatgagtaacacataagtgaatgaatatgagagaagcgaaagggatacacacctcattttctatttcccttttaggacttgtttagtacaccatattagttcatattgtattgtattatattaaattatattgtacatcatcatatttttacataatattatgttaaattttaatttatataaaaatattatataattatgtcgataaaaattaataccacattacataaaaataagatataaaatacaattcaatataatactatgtaatattttgtaccaaacgaacccttaagatccaaaatagtcaaaacataacaacaacaaccctaaaggattggccaggagccatgggtaaactagccaaagtgttagtgttacaggattataaacaaagcatgcgtacaccagattacaggtagatgagttccaaaactgatttcctaatctctaataaaaataacggactcccttattcggaattttagctaattgagcgaattccaaagtttgtgtctcaatttcaaaatggtatgggtgtatacaaaagtaaatgaataaggggacagaaataaattagtaaaaacacaacgaaatctatacatgattagtcatgtgtaaaatactgaagctttggtgtaacagggttatcatcaaatcatactgaacagtccatccaagcttaggcaagagtagcaagaagagaaatagtagtgtacctgtagatgggttttggggtcgatgagaaacttctgcttagcatggattctcaaagctggtttggaatctgcagcatatctaagagaggtctccatttgggggataggtgaaatctgatactcgcaaaccctagccggaattagaggagaccgtcactcactagtttactactctctctcttgtctctactcaaagtcaagactcaaaagtaccaaactgttatccagccatacttggattaccgaaggaagaaaaatcacgggtcgtttcttctcatacgacaagtcgttttaggcatcaacgatatacgttaaaaaccctttcttttatcatcagctgccagcttgcttgcgtatatttgcacaaatggcccatgataatgacataattgctaaaagggactattggtgtctaatacatttcttggtgttatacggctataagtttaattaagtattagatctcatatcgctaaccaatcgtgcgtaccactggtgctcaatagtagtgctcgaagctttaatctatcttatttatctatataaatataaggaggtgttattgggataaattttctcttccctgcaagaaatgtgtatactgaaaagaaatagcggtatcaaaaaggatttcgtaataatagataaagaaatttcacagtattaaaaaaggcatttcgcatatttagtaaaattgcgttgtgaaccagaaatgtgtgaatacgcattaattgacgtaaatacaacgatcaagcattcaaaatgcaactattgccctattattattagggcaatagttatagaaaatgttacatgtattttgtaactatagcaattattattattattaggcctattattatttgtaaggtttcacctattgccctataaataggtgaaccctccctcccccctattcaaagggagcggggctagtttaaataaagaaataaaataatggtacattttttaagctcccgaactattataattttgtcttttttattatattattacatactcacatctcatttatattatattctttgagtactcacatatttattattgggtattcaaacgacttttgagtacttgcacaatttggcgttgtctaaatttgtccaacaccccatagtcactaaaattttgtaggttttagggtcttagtaagggataataatcctaggatgatgatgaagtaaaatacaagagttaagttgatactagccaaagagttcccccctttggctagttatagtattttatatgggg

SEQ ID NO: 300146 - DNA, 751 bp, Cannabis indica
ttttttaaaaaaaaattatttgagaaattctatgtgattctttgataagagattatagactcaaatatgtcgaaaaaatatagcattatcaaccaaaagttttaaagtcgacataaattgacacattgcaacaacgatacaattaaatcaaccaaaacaatgtggcaatcccgcaaaaataggtacttagacattaaattaataaaatagccatgtacgtcttcaatggcaacgaagacgatcatgataacactcctaacaatggcctcgtcctgcctcctttggaggagatgcactaaaaaggtttcgctcgccgcgaatggcgccaacgaaggattgatgaaccctaatgacaacgaataactctctctatgtaacaatcgacgattacagacgctattctcacaactttggaggaaaattttgtttcaccgctcctcgcctcatcatcaaatctcttcccttgtccctaagtttcaaagttaggtatgggttttatttgggtcaatcaaaaattatcttccccccatctattatcaactctgaatttggatgtgtgacactaacacacattggtacagtgttagatgcgacattagaatacttttgctttgttttggagtacttttataattatttattgcagtgatttaaaatatgtatatttaatagggtaaatagtggcataagtactcaaaattttatgtttgtaagcggcataaactaatgtataagtacccaatgtttgtaa

SEQ ID NO: 300147 - DNA, 5160 bp, Cannabis indica
aaaaaaaaaattgtaaacaacatattataaatattaattcaaattattttttatttaatttaatatatttttctattaatttatttcaattctgaacaattctgaatattatatagcaaatgtgccataaatataatttgacgtaattataaagtttgaaagtttgtttagttaggtaattacagagtaattatgtaaggtagtcatgttaaaatttgcaacttctaactcaaagatacaccattaatacacaatagacaaataatggtaattttgcaaaccaatcattcaaaaatatattatgttaattgataactaaagaaaatatggtatttcagcaaaaaaaaaaaaatatataaggtaaataaagtaatttacaccaatttaaatgaggcgggaaaaatagttggtttagagatgacaaaaaatacatataatatagcaactaactttcaaaaaatagaaaatcctaaaaaccttcccatccacacctctttttatcaaaataggccaaaattaacaataacgtacaaagtaacaaaacttcattgatcaaaaataagaaaccctctcttttcttcctttcctatttatcctacaccctccatttctgttgaaagtggcctaaaatcctaaggcagagagaaaccaccctttctctgccttagcattatcttttgcttgtttggtggcttttccatccatatggcatttcaagatttcgacgaaatcaccgaacggcgaagagccgccagggaacaaaggttccgaaaaagggtcatcaccggtgtagttaccagcttcatactcttggctataattgcagccgcagctgcagcctttgtggtctactctcgagccgagcatggtagctccaaccgcgccacgtctaactctgcttccggctcccctaaagaaaacaagccggagccaactgtgtcggaagccgaacacaaagtagtgaaactcatttgcaacgccactgactataaggataaatgtgagaatgctctaattcaggggatgaagaattattccaccaccttgtctcatcatcgaaccgaaggttatctcaataccgcgattttgtcagcgaaaaatgagcttcgacaggctttcaataaaactaaatccttcaaattcaataacccagatgaggaaaaggcgtttgaagattgcaaagttcttatggatgatgccatggaagagcttgaggcttcaatgtctactgttaaggaaaatggtacatttaccaataaaacaccccagttgaagagttggttaagcgccgttatatcttaccaacagacttgcatcgatggattccctgaagggaagaccaagactgatatgaaaaagcttttcgaggcttctaaggagtttacaagcaattctcttgccctgatttcagaggtgacttcgcttctttccacgtttcaggctgttggaacagcccgtaatcttaaagaaacagaacagaactcgctagtttctttggacaaggatggatttcccaactggattggtcacgaggatcggaggattttgaaggtgaagggtgatatgcctaccccaaatgtgactgtgtcgaaaaatggaacgggagactttaaaaccatcaatgacgctttggcagccattccttctaaatacgaaggaaggtatatatatacatatatcagaactaatcttccaatcttgaaatcccattttggcaaatgtattgtgtcctcactacatggttatgttaatataaatgcaggtatgtcatatatgttcaagaaggaatttacgatgagacagtgattatcaccaagaagatggtaaacgttacaatgtatggtgatggatcacaaaagagcatcatcactgggagaaaaaattttgtagatggagttaggacattccaaacagctacatttggtaaagccatataataacttgatcacattcattttggggacaaatgagtataataagaactaaaatgttgttacattattacattacatgtgtggtggtattgcagttgttttaggagaaggtttcatgggaaaagcaatggggttcagaaacacagcaggaccagaaaaacatcaggcagtggcagctcgagtccaagccgaccgtgccatcttcgccaactgtcgtttcgaagggtaccaagacacattatacacacaagctcatcgccaattctacaggagctgcgtggttgccggcacaattgatttcatcttcggggacgcggcggtggtcttccagaactgcatgttggtcgtgcgtttgcctatggctaaccagaagaacattgtcactgcccaaggcagagttgacaacaacaaactacaggaatagtcatccataactgtcgcattatggcagacaagaagcttgagccagagaaagcaaaggtcaaaacttaccttgggaggccatggaaggagtactctagaaccgttgtaatggagtctaccattgaagatttgattcatccagatgggtggttgccgtgggaaggtgaatttgctctcaaaactctgtattatgcagagtataacaacaaagggcctggagcaaaggttactaacagagtcaattgggctggttacaatgtcattgataagatagaggctcaaaagtttacagtagagaatttcttgcaagggaatgattggctcaatattaaaggaatccctgttcgttacactctttacacttaaattaataataattaagctttctaatttttttttttcatttttctttttccttttttttaaatggattttggtcataatccattcttataatgtcagttttagtgtgggatttctgttcatattttaagtttttgttgaaaatagattttgtttcactcaatattgtcttgtcctacgctttaaaaaaattatgttatactatctcaaaattaattgataataataaatgttgtaattttatattcttaataagtaatatagagttcccacatcattaatcttgtccttacattttggaaggcttattaagtatttcattattttgtagattgagaaaaattaaaataattatgttggtgagatgtttttgataacccgtgtggactatactgcataaaataaacattaatattatgggattttttatatttcaaaataattttttttatttatacagaattcacagagcatttaagattaatctaaatcccaatttaaattcatatagcaacttatatagacatagatgatattattataacataatataaaataatattttatgatattattataaaataatatagtgattctcccaatatgttttggctacaggtacgtggatgatattttaacttccaagatatacgtcaattattcagactcatttcagggaattttagtgtgcaaatagatgattaaataaattaaatgaccaattttcttgcattattattaatttgattagggcttttgtgtccttaaacttttatcattcatgttttccttttgttttttacgcattttgaccttgcttgtcataacataaatccatatgagttatttattctcagaaaaaaaaagaaaaagaacagtaagtactaaactccaattagttcacgagcaacaataatgtgaaagtgagcagagatctgtcttcactattggccttaatacatcaaaactacacaccattttacacaattaaaataatatataattaatcttaagattccctgaaatacacagaaaaattacacaaatgaaaaccgggcaaagccattgtttttatatataatataacaccaatattgatccacagataattgaccaagcatagagagatggcttcatacagttgttatttcacaaaagttttggtactactattcttgattatgagctatttttcttctctaacaagttgtaaatcttcaacttcaaggttaccacacaacactataacagaagaagatttagtttctgccacgtgtaagaaaaccctttactttcaactttgtgtatcttccttaagatcagaccctcaaagtcaaacctcggatctaagaggtcttgctgtcattgctttgaatctcagcatagaaaacggagtcaaagccctttcttacatcaataatctaatgtctgaggctgcttataaaggctctcaattagcgtccactggtctcagtgactgtgtagatgtgtactctgatgccatccaaaatctacaggactctgttcaagctctaaacgacatgtcgtttgaaactgtgcagtcttttgtgtctgctgcaatgacagattctgagatttgtgaagatggtttcaaggaggtgaatggcttgagttctcctctcactgaacaaaaccaccatttctctcagctctgtagcaacttcttagcgattactactcttcttcattgaattttatacaatgtagtttttctctcttggtttttctttatctactttgtttaatttaattttaattttagtttttttttttatttaatttttcgttttgagtttagcgtaatctaaagtaatataaataatttataaaagaaaaaaacaaaatcaagaggccattaatttaaaaaatatttggtgaaaaaaataaatcttgaagcttattatatattattatatcgtctcatagctaattaaccaatttattaggagggatgataactcacaagatgatggaaagttttgaaagtatggtggcttttcgtaacatttttttaattagttttctgtttttaaaattaaaaagtaaaaatatttttcaaaaatatgttctataaaattgttttcactttttaattttttaattgagaatcaaaattttcaaaaaaaaaaagtcacttttaatatttttttaaatatttcttttcttaatcaatattttagactccgacgagacccgaacacaaatcctcccccacggccctggtgctgaacccggcctcgaactcaaacccgaacccgaatccgacttcagacctagacccgacttaaataaaatcaaaaaataaaaatgaaatgaatttgacagaatacacttttgttttctgtttttaaattaaaaaacaaagtggttacagaacacatttttatttttcaaaaacaaaatttttaaatacaaaaat

SEQ ID NO: 300148 - DNA, 1187 bp, Cannabis indica
actaaaaaaataattaatatttaacaccatactacgatatgaatttagccccaccccaaattagtcctcaaccctggtctcaggcaacacagacgtagacccgccagatcccaagttcgaccctagactttaaaccccatactctgcacctcaaaccctagattgaaacccccaatctcaatcccacatctcggccaaacccagactcataaatatgatagacaaaaaaataaaagttatttttttttaaaaaaaaacacaacattttaatattatttaatttttaattttttaaaactgtttttaaaaaatttcacccatacaatttttctaatttagttacaaagataaacacccctttatttgtagctatagacttttcatactatgcatatcttcgcgtagtcttgtgctactttctctctcgcactaagcatggtagcaaacacttcttggactgaaaattcacccatcaccctctttctctattacttaagagctcgtttggagcgtcgtattaaatcgtattgtattgtattatattatattgaattggagatatatatatatcatatttttatactaaaatattgcataaaatactaaaatattatatatttaagtgcctataaaagttaataccatatatagttttacataaaaatattgtataaaatacaattcaatataatacggtgtaatatggcgtaccaaacgaaccctaaatgaaataagaattaaaacttttaaataaaagttattcacatgctaaatcctttctttccttcctctctcatactcagtcttatacccaaatgtatttatcttatcgagcatttctattgggcaccagtggtgtctagcacccttaagatgtgttgtcttacgattggatagtgatactccctaaaagctattatattaaactatatgggacccgatacttagttagaccaatatcgatattgacacgtaggagagtgcttgacacaccactagtgtcttttagcatttctcttatctttagagcatttttattagccactagtggtgtctatcaccttttcgatatgttactttggctagcgatactccttaaaaactattatattaaactatgtaggacccgatacttagttgaaccaatagcgataccgacatataggagggtgctaggcaccactgat

SEQ ID NO: 300149 - DNA, 1850 bp, Cannabis indica
aaaaataaataaaaaggaaatatttcaatttaataataataattacctttttcaataaactttgctttggtggttttctcactaaaataaaataataaataaactttgttggtgatccttttaattaaaatcaaatacaaaaaatttattttccaaatgcacaaaacaaaagcacaacatccaatccttttcaaataaaacatattaattaattttttttgttaataatgtcacaaatttttattaatttatttatgtatttaactttaattcaatattctatgttgcatatatatttttttaatttccttaaatgatgtttgacttctaataattattatgtagaataataaataatatatattctttagtgctctttcctttgtcttacaaattgtataagattctaagatttatttatttatttattttcttttcctttcttaattctgaatatttttattaatttatattttaagtcactagtttttgtgcctaactaaaaaagctaaaaaactaataataataatataaaaattaattaaagtgtttggtactggaaacggtgtcgtataaagaagcagcggaatttgaggaatctaaaagcttcaccgacacacacttttcctaacattatgccacgtgtactctaaattctcaattctttacctaaaacaattcatctttattgttatatttaatattatatttatttctttttatccaatctctcagtaataaataacaactaacaatattaaatttatatataaatatttatagatatggttgtggaaatagtgggaattaaacggccagaacccagaattgatattatcaacaactttttttaatttatttaattaatttttaatattttgactgtttcttctccatagctaaaaaggtgttgtgtggtccttcaacatatatttgtgtgaatgatataaacatatttttagtgagaaaaaaatggaataaaaagaattattattttttaaataagacagaaaaaatattattatatggcaaacaaacaaaggcctcgaaaatataatttttgatgagaaaattgtgtgcttagctggatgagtatgggaataatggatatactctgtgactgtcacttcatacaacgaaagaaaactatgtaaatcaaatttctttttttaaaaaaaaataaaaatataaaattaccaataaataaagatagtgaagtgagatttgagagtgtgttgtagtgtataggtgtaggcccaacccaaaagtctttgaagattttaaagatcacttttaattcaacaaaagggcctatgatgttatgtaggtggggagcttcattaggcccacatatatttcccctaattaattatcataatattacatgcaaataatttttaaaaaaaaaatctaaaaaatatatctcttctttaagagcactcacaatagtttttttaaaattaatttttctttaaaataaagaagagaagaggtggaaaagtgcaaaaataatgctccatcaagtgatgtattttaaaaaatcatataaagaatgtaataggtaaagaaggactattcctcctttaaacatattttaataatatataaatagtattttattcttgttttgttttgttatgtgtattatatacatttatattaacaaatatatattatttaataattataaaaaaaatgggctttttcattttacactttaatatatatatatatttttttttttgtatttttacagaattctacatcgaaacccctattgtcaactagcgctgcaacctaaattacaacaaaaaatcgtatagaaacctctattgcaactagcactgcaa

SEQ ID NO: 300150 - DNA, 1096 bp, Cannabis indica
taatttttagtcacaataaaaaattacttgtgactaataaactatatatagtatttagatgcaagttgtcactaatttaattttagtcataaaaagaattgtgactaaaaacacatctagtcacaataagttataatttttgtgactaatacatttagtcataacataaaaatgttaattataattagtcacaagtttttaacatttagttacaaattttattgtaactaaaagtaagattttttgtagttatagaacatttgtgagttacataaacaatacacaattgttattattgttgtcttaataaagtatagatcaataatcttgatgcggttttattttttcaaaacaaatcataacaatcagactaaatacatgagtattaaatgttaagtaaattgtttatgaataataaatagaaaaaaaaatgaataccaaatttatagtagtttattatggatggtaattataagccaatctattttgattttattattttcaatgcttacgaaaagttcttcgagctatgctctccaaaagtttagtgtctatttcaagtgatgtgttacaagcaattggtcatggtagctatttatatgtacataacattgttgttattctccattattgaagatatttacaaacaaaataaactttcaaaagtaaatattttattgacttaatattagttacaatatttataataatattcataaataaataatgatctaaagttgaatttaactatccatgatataaaagaaataattaaattattcgtcttttcacgcgattttaaaaatcttctaaaaactttctccatcttgagaagtgttgaatcaagatcgaatgctcccttgatatactcgttttgtacttgagcccttcactctactctagggcacgagtatgcttaaaaattctccttcaatcggagcccttccacatagttgtaaggctctaaattggttttgatattgagtctattatccaaacaagccttctatgttctttttagtgctcggaattgtaaagattattgtaaagcccgcttagtaatttggaaattatcagttaattgtgattaattatg

SEQ ID NO: 300151 - DNA, 4222 bp, Cannabis indica
tttgtgatcatataatataaaaatggcataaaaatcaatgaaaaattgatgtttattttatttttatccaattaggatttttactcttaaattttaactgtactaaatcatgttgtttgaatttttttggctattaaaaattttccctcaactattgaaattgttagatttaatgacttatttaattttattcaattttactgtttaggtattaaatcatgctccctatattttaatgctccccatattttgatatgtagcaaatcatggcctcaaactttaatatatactaaatcatgataattaacttttatccatttttattaaaattagaaaaaatacataaatttaacaatcaatagtttaagcagtatttttaacatcatcaaagttgaggggcataatccatctaagggcttctctgctgattgcacaaacacgcgaagacaccagtaaatggcagttaataatattttgaaataataaatttaatttctaatttcacaagtctcatctttctctctcgactctctctctcttgctatcgctcctttcaatttcttatcacccaaaccatcaccattgctgtcaagttctcctcggcatgggtaagtacatcccctaaccttcactgcatttgattttccgtttttgtatgtttaatcgttgattcattggtaaatatatggatctatccttattttctttgttaattttgtcactagaaccatgattatagtgatctagactagaagtgcctctatttctacatacattctgatttagtcaattttttttatcaaagttcttatgattggtgattgatgctacaaattacaacaaaggaaatcaaagttattcaataaaacaaaattctactttattggccatgctctgtacctttaggttttatatattctactttatttactgtttttagatattttatatggtatttatgttaatttgagatttaaaatttgaaagttgttatttgataagttatattatgaaatattgtttgtatttacaatccagaaagatactgcgttacagtgaaagaacaattaaggaagtaagaagaaagaatcacaattctcgtcggatgttgacacctggagcctcaagaaagaaaaaagagagagaagctttctactctttcaaaccctcgactcatcctctctctgtttcggcttcggctcaggctcaggccgcagctaagaggcagcaaccagtatcaaagccggaggagccggcctcatcgaaccggctcttagccggatacatggcttacgagtttttgactaaggggacgctgttcggtcagaagttcgatccggctagagcggaggcggttcctgtgggaggcggcgcagcggagtggaagagtcagaaggcaggaggaggaaaagaggggagtttgaagaaggagcaccagagttacgctgaggttgcgagcattttgaagagcgatggggcccacattccggatgttgtcaacccgacccaactggctcggtggattcagatgtaactaaattgtgtacgtatcgacgtagggaaacaattggatgagactgtagacgtggcgtcttcttattggttgatgcgttttagttattttttaaaattttttgttaaaaagaaaaagtccaggtagatcctctgtggtggagctagtggttattaaaaagaaaaagttgatgatgaaaatgtgaaaatgaattagatgatataaatgtttctgatcagtcagtcactctatttttgtttgtatgttttgttttcttttttgtcataattttatgaagaatgatttatgcttaaaagttaaaagtattaatgtgattgtttcagttatatattaagatctatataaaacccaaatgaatcaagtggtgtcgtttagatacatatatagtatatagtacgattggaaactggagtatgtttataaagaggtagaaatattgtgtttgacatgatcaatcttgctttgttgcacaacttactggacatatagtagatctttttgtgaaaggaatttcatgctggatccaggggtatgatctgtttgtttctttgacatttctattgaacaattttatcttttgatgctaacataaaattacttctttcttctagctcatgtacgtgtgatacaaaacgaataacgactctaatctttcttctacaatataataagttcggagctttcttcctttcaagtacttttgtaaaatatggtttttagtttctagctgttttatcaatttgtaagctagacttctataattaattcattttcactaatctgtcaaacaattgctgatatatggggtgatcttgtttgccccttagctggttattattgtacacgaaaataattagcaaggcaaactatcattcttctttcaaatggatttgatctttctggtttgtttacagaatccacactccctgccttgtcgatcatgtcaagattggctgctcaacatttcaggttggatgtgaaaaaggacagagtctctgaaaatggaaggtagagaaggacgaatttcaagtcaccctgagatatatgaatttacactctcctttcacctgattaggtaagcaaaatgaacaaattgagatacatataagacaagctttaaatgaaattgttgtttgggcatggcaaggtgaacaaaagcagtaagaatgataacaacaccatcaacatttagaacttgtgttttgtcttgttttgtttaattgatttgatgtgtttttggtattttgtacataattaaggtggaaagcatttaactgtgtatctctaaagtaaagttgtttttcaacaccggacaagggctaggaccagagtaccaaaaaggtgattttcaaattcactattcaatgtatcatacttgatccctttttgtgcaaaatagttttggaaatgactttttttttagatggtaaaaagtctacatgataattggaatctttttcgtttttatgcaggtttgttaaacttcataggaaacctcatatttgttgggagaaaaaatagacacaacttcataatcttacgaggcatagataatggtcactattagtgctctacaatcttatgagaggtgacagcttcattttatagatctatattttaactaggatagttcatccaatatatgcgagcaaatatgacttgcaggtgcaaaagaagctcattcaatttcattacattttgaaattttagcactaatcagtgcttgcataatgttcatttcttataagtgaaggcccattttaccttatgagccttttttaaatctttactcatttattttcagtattttatagtgttttaatcaaggtttgaatcattgtccaattcttgatgatgaattagttcgcaatcgaattcgcattcccaggccatctttgttattatgggatttgtttttagatgaaacgaagtaatctaaaaaatcatctttaatatatataacatttattaggaaatctaatatataagttgctttttattgtattttctctcagtcttatgtaggtcatgaacatagctagtgatgcaagacttggatgcttggatgttataaagaaaaagcacttgagaattattattgttctagttacacattgtattgtatttttaaggaatgcatgtattaagattttttttttaaaggaaggaataaaccccattgaaaaggcacaaagccaatagagtcacagacattgaaaaataaagcaatacgaagtagagaattagtagtctgactacgttgtgaaaaaaagagaagcacttttaatatctgtacaattgtaccatactcaataaacattttatcattacttgagatagcttgcaccaagcggagacaatcaaagaacattgtaaaccttaaataaccaagcctgagacaaagaagaagatcttgcaataaagtcactgcatctgccagcctgattaatcaacaccgccccaagcccaacccaatcattcagtcttcatttatccacaaatatagattgacatcactcaacaccaaatcagtatttgagtttccatgagaaggattactcgcgcgtggaacacttagtaccacatccggagaccgaaagaatttgagaggctgtttgactttataatttaaaaattgttttctagttttttaaaactgtaaaacagtttttaaaaactattaggagt

SEQ ID NO: 300152 - DNA, 3406 bp, Cannabis indica
ctgtttgggtttataaactaaaagttttgagcagttttcgttcttagatttgaattgagattggagattgttgtgtaatgtggcttaatagcacctgaattgtttatgtctcgttggtttggttttgtttcaaatgttttatatgtttttgatatagcacttgtaatcatggtattcctccgccacaagtgaggctatctatatataacgggggaggggtcagtcttagacaaaggcctctttctcttttttttaaaaaaaaaactagtatcctattagaataagacaagtcagctctaagctaaataaaactgccagcgagataaaactggaggcttatcacaatatagcatataagccctttatttaaaaatttgaatgttcatgcttgagacgggtaacaaattgattaaatggtttgttcttacgagtaatgttcaagaccctactatgttctgctcactaaatattttagtgtaaagcgggaactattttcgaactttggctagctaaggagtccagggctttcttggtacaaaaataaattttcgcattgtatttagatagtggataaagatagcctcacaccaatacatgtctacggtaccatgatgatagctgattctttcatcagaagttatttactcaattactttacactgcactgcaagcaattttttttcccttcacattggattatggttgtttcatagtcccgctatctcttattttggtttttatgattggatgagttgtttagcttcggaagtgttccatgagagatctagcaaattgtgtaatggaagttagctttcatgttggatttttcttacttgaggtttgactcttatggactctggttttcattataagttgtgattcttgcagataaaagggatctttgtttttctttacgagaaattgaagctcaaacaaatcctacaaccgcctattattgcttctgtaagcttgtttggctctgttgtaattgaaattattgctgtatgttttcttcttaaataatttatcttcgatttctaagtggcatttaatttgccacagattctggccatgattcttggagcaataccatttttgaagggaatgatatttaccactgatgctccatttttcttctttactgatagctgtattattctcgggtacgattagctcaaatcctacaaaagattattatattgtaaactaaccaacagaaacttattttcggtctttcattttatgcattgtctgttaaattttgcgtgttgatttggttcaattgtgtctgctaattataaatttacacaaataactatctgaagaacagctattttggaatttcttaaatgcatcttcttttatcgatgttgtacttcaagtctatcactatgagaaaagttggtaaaagatgtttgtaccatgtttttgttgacaaaacgtatcaaaacgggagctataatacttacttttctgcatcggcaacttctatacacatgatatcttaatgtttaacctagacaaattaaagccattgttgttaaattctagtttggacacacatttttaatacatgctgttcttgaaagtcctttcatttgtgctttctttattataagctaaaatgttcacatgaactggtttttggtttcctaaaaagtaattaataggcattactaaactttttgatttacaattgcacatgcacatgcatgaataatgatatgtatatttgtatgcatgactatattatttgtgcttaaattaatagttataccctttatgtttggaatttttattagatattaaatacactctaacagtggtgttattattattagggaggcgatggttccttgcattctgttggcattaggtggaaaccttgtagatggtaaagttgactttttgtattattttattgtgttaagaagctttctgggttcccaatggtcatacgagttcattaataaacatacagcattctgccatatatggtttttcttaatagacactgagtccactgctcctccacagtaaagcttggagggaagaaaactgatgttctgttaatgatatttatttcaattagtatgttacctgttgatgaaactctatatcttgcttgtaggaccgggaagttcaaaacttggtctacgaacaactgctgcaattatctttgcacgtttagttttggtgcctcctgtaggacttggcattgtaatgttggctgataagcttggtttccttcctgctggagataagatgtttcgatttgttttactcctccaacattcaatgccttcatctatccttgctggtgagacccttgttcaatttgcataaaatagtatatttctaacatgacacatttctaaataaaggaaagttttcaagtgtatgtggtaaagcaggcgacaaggtgtatgtaattcgaatgaattacgtgatgctttattttttagagccataaactttccaatttatagttaaacatctaatgaaatagcagcggttttacttgtatgattttatttttttctgttaggtgctgttgcaaatttaagaggttgtggaagggaggcagcggcagtcttgttctggattcatatttttgctgtattttcaatggctgcatggattgttttgtttctcaaaattctattttaaaacatcagcaaagaagtctgccagtttcccatgtaaattgaaatatgagtggaaaatttggaaacttgaaaatccatttttccaatggaaagccatattttgattgtatacccttgccagtgagtctcggagaaggtatagggtagccaactggccatgcttacaggatgggcatcaaagcatgaagatcttttggtcttattattggaattactatggttatcatattttttatttattgaggtcatgtttatatgttacgcttccaattttcaaatttattcgatcaataattatgtagtaaaaatattgtaagaaaagcttgtcgcaatctatattgcgagtgtacaaacattcaaaatcttattttagttcaatttgtacgttgcaaggtagattctgaaaagtttcatctgcatgtagataacataaatataagtatctattctatataaagtgtgcctatataactaaatttcttggtttatgagaaattcatgggtgactttttatttatatttaataaaataataaaatattatttatatataataaaataaaaataaaacaaatctcattaatatttgaactgatatttgtaatttgtttctgatttaatttatatatatatctattttatataaaatgtagttatataacagaattcttaatttttgggtgactttattctaattactatttaacaattttgaatgcctaagctaacgtaacgtct

SEQ ID NO: 300153 - DNA, 1434 bp, Cannabis indica
ttttttttttttttttgctggaaccaagttttccattatttgattgctttaaacaagccgttttgaacccactatctctatctatataaatatatatgactaatatagctatagcttaccaacatttacatatatatgtgcatgttacattaatgcaccactatgtatttacatgctaaaagcattattgactagaatcaattgatgtttaagagctgacagttgtaataaacatatatgttgtgaaaacacgcagtaaaaaaaaaaggcaagaacagtgataatcgatgtaacagtagcaaaataattgaatttagaactaggaaaaaagtaaacataaaagtagtaaagatagagaagttactggatggttcgaacaaaggtaacaataagttatcttgactactctacagccagaaacaagcctcaagggctcgcgaacttattgattggtcaaatagaaattatatcaagaactataaaaaacagttcagtacactcataaagctttgcttcaatttacataagagatcttaccataagtggactagaatattagacacactaatctctttgtacaaccctccatttaatctctttttttctctctcaactctattcctatttctctctctcttttctaagttttggtatcgagctcgaatggttgaaaaacctattttatagttgcaacctcttggttatgctgtaacagacataaataatgtcataacagaatgttagttaattctgatatgactatagttgtttgagtcttggttgagctagaaaataggattagttctcttaggacctcttaagtatattgtcaaacataacaatcatccactttgacaatacacttatgtttggagccttgtaatagaagagagttgttttggtcttgtcaagcctcaacaactaagtatggttagcatgtttagacaaagtctaaactttgctaatggaacatactttgtcaacatgtttgctggattttctttggtactaatcttcttcacttgaacgtctgccaaagtctcctttggcaattacatcaccgatgaattgaagctttatgtctatgtgttttgaccttttacgaaacataagattcttcgtgtattgtagtttgattgtcatacgagttagattatttttagtattttagattaaatttagtatatttttaatttagttatactcttgtttggagtaattctacgctttttatcttttatttctacagatttaaaatagaagaagattagaaaatatcaaaggaataagatgaaaaaaagataaaaaatctcacaaaaagattatacataaaatagagaaaattgtgcaagaaaataaagctaaaacttcaagcctgaattcgactatattttgattagattttggaaaaagtcaaaacataaaagttctaga

SEQ ID NO: 300154 - DNA, 1104 bp, Cannabis indica
ccacattcaatgtgaagtaaattttatcactgattatcacgctaatataaattcagtacactgataaatcatgggactaaagattttgaaacatataatcacaagtactttctactatgatgacatcacaataattatgaataactatatgttctgaatttaaaagaatttatacattaaatatataatcatgaaagtaaccatgtcaatgtaaattcagtgcactgataaatcatgggactaaagactttgaaacatataatcacaattactttccactatgatgacattactgttattatgaataactatatgttttggatttaataaaatttatacattaaatatataatcatgaaagtaatcatgtgaaccatgcaacataaaataatttctgatcattaattaattattaaatctgattatattgaaatgagtttttatttagggcataaaatcctaacagttccaggattggctcattagggacgtcactcatgccacaacactctactataaagtcagttagtgcttgccctttgatcgacaactgaggctagtattggatgtcaaattggttaagttccatagcccatttagtagcttgccggatgactctggcttctatagcacttggcggagaggatggttggtcaacaccttaatggcatgggcttggaagtagggtctcagcttcctggagtcaatcaataagcgaaagattaatttctcaattatatgatacctagactttgcacccaacagtcttttacttatgtaatacactggcacctagactcacccttcctctcgcactaatgcagtactaacgacatgatcaaacactaccaagtaaaggtacaactcttctccttctactggatttgataagaccagagtcttagttaagtgctcctttagtttctggaaggcttcatcatactcttcagtccatttgaattttttatttcctcgcaacacattgaagaatgggatgcatttatctatggattttgaaatgaacctgctgagagtcgcgatccttctagtgaaacttgttggaatttattttaccaagatcttaggtctactcacaagtatgtt

SEQ ID NO: 300155 - DNA, 4807 bp, Cannabis indica
atttttgacaaaaaatcaattcatggtcctatttgtactattttagaaaatacagggtccattttgtcatttaacaaaatacagggtccaattgataacttttgtaaaacagaaggtccaaaatagtatttacccaatattttattactttttcacttaaatatttttaaaaattattaaaataatattatgttattatttaatatattaattattttttttactttataataaaatactcaaatagtaatcacattaaaatatgctaaaaatatattcctatcatcaaacattctttaaaacattctattaaaaatgttcttataaagtgacaccctccaaattagtagcagacccaaaatttaattgtaagggacataaacaaatttctaataaaaatatcacagtaccaaaaaaaaaaatgtgtattaacaaaatataaatattaaataccaactcattctatttgatatttaaaaaaatatatactcaatatcttaaaatatttaacaaagtaaatcagctattcaactcataaatttaaagttgtcctctacaagttttcatattttgaaaacgataaatgatagacttattggtaatagtattgaatacattcttttctagacacagtctagctatcatttaactattaatcttctattttgttgcacatttaatttttttacaatgtttatagctaaaaatgctatttctatcgaagctgttgcaactggcagtgttaatgttaatttaataagtaaaaataccaatagctatacttcatattttcttatctccactagtcttaaatatcattaattccttttgttttaaacaatttaactgtaagtcaacttacagtattggcttggatcctcatagcattcaccacgtaaacagggtccccactcaccagcattgagaatttattagtcccaagtttacaactagtggtagtactctggtccaacaagtcatacaagaacggagcaacatcaatcccaacccttggacgaagtctctccatcatctctgctctgttcatgatgtcaagaaaaggctcgtcccacttatcataatcagcaaattcagcattgtgcatggaggagatactgttggctaactttttcatctcatcatactcgcttccacactgcttcacataaaacttttcaatggcctccatgtgcgctttaacttcctccggtattgatataggcctgactagaagattgaaatatgaaagaggtaatagagacaagaccgtcttctccctagacagttgtgtggcagtggcaagaatgtttttaggtgttgaaggtggtggaggcagatctttattatccatggttgttctagttcttctcctaggtggccttccattctcggagacatcagatccctttcgggtttgagattcagcagcttgtctcctcgtggcagccaactattggactttttccttgatctccaccttcgcctttttattggcccctccatctatagtatcagactgcttcctagaatcaagactagtccatcacaatatgagctatcttcctcagcgttccccataggcacttgctgcaatggtgccacatcaagagcaggttctatcaggtcaatgacagaagctgacaagtcatccgaggttggagcctttggagcagcctcctggcttgagatcggaggtgcaggcttctgagatccactctgagaggtttgtcctttcttgcttttatttttgccttccgtggccacctcacggacatcgtcagatttagtgttaatggcatccatgaaattgttaggcagacccatttggaatgtaatcggttgctctgcaagaaataaataaaaaaaatacatcatgttagagtatgtatgtcatatatataattacagatacaagctatcagaaaattttctagaaagattcaaactgtttatcttagcataattgacttttcctttagccaaaagagaaatattctctcgacctaagttagtctcgtgctaaaagaaccctggggagtaaattttactaagtatgtccactttgacatgatggtgcgctggtggaacaaaatagttgggactccttatgatgtaatctgctttatctataaaatcactgcaaggatatctatttggatctatatttaaaaaaatatgggtcaaatcccccttgatcagtattatctatgtctactaaggagggagccctaattatatgaaagggtgttcaccactaccagaagtattcgctctcaaagcaccctcatttgggactacgtccctgaagcaaatagtgagctctttagcttcactcaaatcttctagaaagtgctcttccaatcagcaagccattattcattggccttcacaactttcaaggcctcttcattagttatgaccacgatagtctctttcacctcattagggatctcctcagagtgattcctaaacagtttccatcaccgaaatgtagtcaactttctgatgggatgcaatgaggcccattttttagagatttccagtggtcacaagctagcccacttgtaattccttgggcgataaggacttgtaaaaagttatcctctcctccaactccagagtcaagggtgattggggaagacaatctaacagacatgaaacacgcatcaagatataactaaaggtaaaaaaaataagaagtgaaagtcaggaaaaaaacacttactcgctatgttgaaacccaagctgagtgtggaaactctcttcaataggaagttgaaattgtagaaatagtagtcctggaagttgtgagtatattttgtagaactgacgggacaagctacactcttagaatggtgctctagcctatagaaacccaccttttccttatggcccctcaagagttgagatttaatcttgtagaagtacaatatctcctccggtgttggtgtagatttattatgttgagcctaaaggatataccatcttgacaatagatgatacacctagggaatgaactggaaaggtgccactctggccacgacacaaaaattggcgaagtaacacctcagtggcagatgggcacccatctctaagtgagcccaactccagatgtcgaagcccccattcgtgccactatgcctttctccatgaatagagagtttgttataatagagacctggaacacttttgagccctcgctcggtctcgtacttccttaagttgttgtatattctaaacttgttgacgtgttggtccatctcccatggactatcattaaagatcaattttggagcatcctgttgctccaggagttcctcttccattttgacttcatcttgctaagtcctcttaggcataatttctataaaagaataaaaccgaaccagttaactacccaaactacctaatttagaaagggagcaggggagtcctaccccataaactgtttggaggggtcaattattttggaaggaaagttaggaatagcgaagacaaggaatggagtaaaaatcaacaaattaccaaaaccagaaggattatgggtatggacatttttttagcacttctgttgcaaaatgactaatctcaagaattcataacattggaatctaaaaacaacatggtttatgatacctaaatctatcaacaatgatattcacagaaacaacatggtttatgatgcctaaatctatcaacaatgatattcacaaagtcaggaaaccctaatttcattcaaaatagaacatgcaaatgaaatgtgtagcgacaaattcaaaaaacacaatcaaatggtgaaaaattgaatcaatacacacctgatagtgaaaacaaagatgttaagctgatcgtcgttgggtttggttgagaaagttgatctcacctttcatgaagacgagatgcaagggtaatcaacgaattgatttttgtattggtagaatttggagttttattgcctcctttctgtggtccacccatcaaactttcaaatgtttgaagatgattgatcaattcagttagatcaaagttaaacttgttcatgaaatattttgaggtgaatggtagaaaatctaaagtcaaactatcgaggatcatactcacttgagtatcttgatcaacaatagctctatggagtttagcttcctgaaagtaattgaagaagatgatcacaaaaaagttgaggttgtttcatatgagtattggtaaaattcttggtatagcttcaaacataatttgacatgattgtttaccaaacagctcaaccaactatccataatttcagatgttgtttctatagattcaaacctagtccttagagtaccaaccatgttggttagcatataaattgtacctattgacaaatttgttagcacccccatggaatttttggacactcttcattcaatacaaagaaagagttctccctaataagaacaatattaatgttctctttcatttcaagaaatttttctaaaagccttttcagtggaaagctggcaaagaatgggattagaaacaacgatattaatgtacaatcactggaccatcattgagtttcgcatatattaggaatattatacttatgtggcatgcatgcataatcattttgagaatatatgcttaatgagttttactttagtttgaatatcacaactaggaatgtagatagttgattaaataaaatatttttgcattacaattaggagaggcttccaaaataattataatttttcagttgataatttgcatggatggatgtattatatgagatgagaaaaaaaataaattaaatattattttagattat

SEQ ID NO: 300156 - DNA, 1836 bp, Cannabis indica
tattaatttttttttacagaaaaaaaagtgccttaaatgtaaattaaaaaaaaacaactaagggccatgcgatgcgtaaagtttgatccaatgtacaagaaaaaaaaaaaaaaaaaaatcatatattaaaaaacatcaaaaattgaacgaagaaaagggttcgaagttcgaacgaaagtgacaaaaaaaaacccctaaattttcttcccaataaaattcacggacatatataaagaataaagatggaagtgttttacaatagcagcaagctacccttagaagccatctgcaatgaagcccccaaaatccaactcagatcaacaaatattacagatgagaataaaactagtcctaaagaaatgaaaatgtgaaaaattgtaggccaccctcagacccaaaattaataaatacatccatcagccaccctaatttatgccctcataaaatgggaactagtaacaaaccagtatggaagtgaaccctggttgtgacaactgaaaacagatcaaagggttcctagaccaatacatcctgtgtagaaagaaagaagactcaacccaaataaattgactaaccttgcctgatgggaagggagaaatgagaaaaaggtggaaagaaaaaagagagaaaaaaaagggggtaacacaaaaccgatcgagatggcatgctctgccgtagaacatccgaactctattgacaaaccaagctgaaccctgggtcttgaagtggcagttacggtgtctagtgatttctcatttcacatgttaccggtaactcaatcacacaaagccacaagcacttcaaatgttagaagctctcactggcaaccacatccatcaggaccaactaatatctgaatggacaggtaaagacgctttgtttcatgaatggaataaacaaagaactgtgacaataaacaaaatttagccacaccctaacgttcaatgcatgaattaggaagcggcagcagctgcagctgttgccttctccagtttttcttttgcaatttctgctctcctttgttcagcatgctgggcaacaccatttgcgatagcctgataatggaagtcgagtgtttgcagaaggctctggaaccttgatggatctgatgcttgcacatctacaattcgggccaaaaagtaaaacccagtgaaacagggacaagatcagatatgtcagacaaacggaaaaaaatcaactttcattctttaaaatgaagaatactttcacatacctttgactgaatctacaaagaaaataaatgggtccacatcatcaagtggagattgcaaatcctcatcatcactgtaatcatcatctgagtcatcatcatcctcatgtgggcggaaagactttgcctgtaccaccaaagttacaacgatttatataatattcatgacaagatttaaaactatgatagccatagaaaaaccaccaaaaattcttccatgacaaataagaaggttaaaaaagactttcttcataagaacaggcatatatacattttaattcccaacaaacacgaattaggagtttcctccaccttgggtttcctgatagaaacttgatgcaacaacaatatataactactaacacccaaacaacacataataagagcatctcccattggggcaatacctataattgtcaaaatacacacatcattctaaaatattattattttttattttatctctcatccacataagatttgtcatcttctcttaaaaaaaatactccaatagttgaaaactctaaatttgtccaccacggtcctacatcatattgaattaatgactttttaagtgaaaaataattttttaataaataaaaatt

SEQ ID NO: 300157 - DNA, 2402 bp, Cannabis indica
caatcatagtatggaagactatggaaattctacataaaagaaggagaaataaggttttctaactttatatgtatttattttcattgttttagaattcatattaggttgttaatccaacatacttgttagtaaatctagatcctggtaaaataatttccaacaaccccctctagtatcttcaagatcttaacattaaatgttatgccttgaaattcgtacgtggggagtgtgcagacagttacaggaggtcatgcaatacatcattcttcgaatttaaattctttgatttttaaattttttgtttaaatgtgtgtaccccaaatactagtagttgatattgatttgaatttacactaattctatgcaaaattatcccttgttttttcttggccaattatttttggctctttgaagcttctagaaatttcaaaacttcaaatccctttctatttggaattccataatggtgttaaccgtgaatatctaaaatatgagtattcttacaaaaagaaaataggaggataaatgattcaagatgttctatacaagcaaaagaggacaaaagatggccccacctcttttgtcctaaaatttttttttgtcacattgggctaaatcttggtacctacacgtccctatacctgcgtccccatgacgcccgcaccgcctcctcagcccatgcccgggcccacacctcagcctgtgcctgggcccacacctcagcctgcgcccgcacccgcacctcagcccgcgcccgcacccgcacctcagaccacgcccttgcccgcaccttgacttgcacctcggctcacacccgcacctcgacctgtgcccacgcccgcacctcgacacgcgcctacggctgcacccgcacctcagcccacacccgcgcttgcatcgcgccatggttactctcccaaaatcggtctctcacacctcatcaatattcttttccctcctgacaccaatagtctatgtaaggagatatcagaggagataacgacgactcaatgagtatagataatggggacaaagtccttttcgtcctaggtacaaaatgaaaaggggtattttttgtataacttaggaatttaggtgtgtgagattacataggatacaatattatcatagatgaaaatgacttcacatagtatgtattggggatctaagggggctgcaaagggaggagggttcactataaatatggccattgagttcattgtcaaggggggatttttgagttttttaaaagcaatgaaacagtaacttcttgagatagaaaaagtttatgagaatcttactctagatattcttcaattaagttatctttttaagagttagttcagaaatctaattatatacataacgagttctaactgttaataatttggtgccgtctgtgggaattgacacataaaagcaacatcatttccttacctaagatttgttgaaaagatgctgagatgctctcaccgtcgttaggatgtggaagtgcatcttgatagccatcggctgatcgcttcaagggcagctccgtcgacgtctgctgccgaaaaagaggtgcaggtgatcaaacgcctcagaatggggaggcgcaaacggtcaaggaccctcggcagaagagtaaaatgggaggcttgaggacaacccaataaacaaccaattaagatggggtgactacctccatcaccccataggaagacaacttagtgcaaggccgaaagcttcatatttgataagacactgcagccaccaaagcccagagatccaagaacctcgcaccataggctggggtaagagaagcgagcttactcagtgagttctagctcacaaactcgactacacaatgaggagatgaatgagctaagaataagcaatttgtagttggaagaaatagtcgcgaacatgcaaatggcattagaggagctccagagagaccgttctgaggcacccttgatcgggcaaagaggactagaaatgggaaaaaggggagcgagtagactggaggatggggagtatcaaggtattcaacaaataacacccctgaatcctccccgcaaagagatttaactagaaaaaatccacaaccctcaacacaacccaaaaagactgagtccaaggcaatccagggagacttgagaaaaaagctccatcaaaagaccacgatcgagaaatgcacgctaacagtggactcactttgaaataaaatgaaagcaaagcctgtcaccatggacctacgggagaagctaactaaaaggaggaaaaagttagatacggagatggaagaccttcgatgaaggatagctttggccgcatccgaggattgtaactaggatgaggaagatttcgacaaggaatccccattctcaagggagattcaagcggagactttgcctatgagc

SEQ ID NO: 300158 - DNA, 1107 bp, Cannabis indica
ctttcaattttccctattttactactaaaaccattttgtttttggaattgaacatgcatggagtcaggggcatttcggacttttgctgagaaatgccccataagtgagtcaagagttgcttattttcgtaattaaagcttattggtttcaatttttttttagaagactcacacaaatgtggtatctaattagaccagcttgattttccactaattgtggataacggggaaaaagtttcaattattaggcatttgttttatagggcaccctctttagattgtggctatgcaaaattacaacacattagaagataagatacaatgtgttaggctttatgcaataaaaatgttcattattaatagcttaagggcgcgtataatatatagcagtacgaactaattaattagttaatctcatataaaatacatattgttatatcctgttcctgtaaatatattattaatatatttgtattattgtctacatgcgcatgtatatatagtctatagatatgatcttatataagattcatttttgctttgtcgaaatattcactaacatgttcaatctggaaaaacccgacccgacccatttatacaccataattgataattaaaattgtatacatataatgaagatgaagaatatatttttcttcttttatctattttattctatagtgtaggtacgtattgtgagatcaatcagattaggcacaagatgccaagaactattcatatgcggtttccatttttatagtactattcttgaaggaaaagcaacattatatggagatcccaagtgacaaaaggcttataaaaagataaaaacattcacatgtattactttgtatttaaaggccttaaatacttgatggaaatattatattgtagcaaataattataaaatagtaaataattttggtgtatatatatagcagtagaagtagcagtactagtagctaatagtatagtacaattcctagtagcaattagagaattccatgttctattcctttgttctaaacccacttaccctctattgccaatttgttggacccttcaccttgacactcaaattttcaaatccaaactctctctctctctc

SEQ ID NO: 300159 - DNA, 2247 bp, Cannabis indica
aagattaatttatcaatgaaaaatattattttagactaattattttacaaaattactaattaaacttttattattttgttaaataaaaatttagattctgtatttttttttaaatagtacaagctagtattcaaaatctaagtttttttttttaaataaatcttactaataatctaactttaaattgttatgaccacactatttatatttttgtttctcttgatgttaaaaatttactttaagttaattgtgttgaaagtataaaattaacaaatattgagttcatcgaactattttatttttaaaaaattaaagttttgattaatcatttaagagtaatctaagttttgatttatcatttaagagtgtcctcctatccataacttctgtaaactacaaggttaaaaataatatttatcttatataaattaagaaaaaaaaaatcttaaggaaaataataccaataacacattgattaaaaaattcgatcccccttctttattattttgaagttaaatatatttttgtaaaagtgcctttatattatattttttttgagttacatacaatttgatctcatgattttctatatcgattttaatacgttggccacttaaactaatttgaagtatacattacatttaagcggacccacttttattaattattaatgtggggttataaccccactaacaagtaaagtccccataaaattaaataaatctagtaagagtaattataatataagtataaatattttttaatgataaatatatctctacaaagtgaaatttttgaatccgtcactgcatttaagggctgtatggtttacattttcgaacatgtgattatcattatatttgtattttatagattagagctttaattcacattagtcttcttatttacactttgatcagtttaatgaaatataatattttaacaatatgatctaatttccactacattattctctgtctattaccatttaattaaatttttttcctcttaagtacttaagtgtaaacttgactcaatatattgctaaaacttagtgtcaaatcatatgagaaatgagcaacatcagattttattctatttttcaaaagaaaaaggaaaaatagatatatggtttacagaatattcattactgttacttcaaagcaccacattaatgtgtacagtaaaattccactaaaaataattaattagaaagcaaatctctattgttttttttttcttaagaaaagaattaaagaatataggggttgattagaggtcacacacgtgtgtatatatatattatagtggtggctttttgctacccacccacaagtgccgtataatttttggcatctccaacactaatgcctaacaaatcattagggttgttaagcatctatattctataatctatattattatatatatatttctttttacaatatatattttatactaatatatttcttttaacaatatatattgttagtgtatatattttttaataatgtatattgttagtatatttgatatagttagtcacattattatttggaaaaaaaaaaaagattaattaggatttttttctcccgaactttgacatgtactaaatcgtgcccattgaacttgtttggccgttaaaaattctccttgaactattgagatggttagatttaaagatttttatctgattagttagtctaattggttattatagttatcacttatcaaagtcaattgccaaataattattttatgaggacaatgctagttttaccaactaatgaattatatactagcattttaggacattattaaggaataaggatatatatattataattaagcttttaatcacacgcagccaattttctgagatttaatataacttaatttttgccctcgttttgaagactctcaaagaatttaattccctgattttcctcgataaagaaaaagaatttaattctctaaaattatgaatctttatattcaatgtacgtgtcaactctaaaagttaatacttaaagaagtttttagaggaacttgattacctttagaaaaagaaagagaaatgctaaagggcaccagtggtgcctagcaccttcctatgtgtcaatatcgctattggtacaactaagtatcggctcccatataatttaatataatagtttttagggagtatcgttagccaatcgcaacgcgacatgtcgcaaaggtgctaggcaccactggtgcctaata

SEQ ID NO: 300160 - DNA, 2394 bp, Cannabis indica
aaaaatgtaggtaaaattatacccaaaaaaacatgactcttaatctttctctctattctattggtacgtacgtacattatttgttcaaactaatagctatatgtaattttataaccagaaatcccaaatataaaatactaataattatttgtaattttatcatgttattactgaaacctaaattaattatttttcttagaacattattgatattctcctaacaacaattaataatacattatagagattccaaacacttgtcaaactttcaatattcttactaggaatattaataatatgttatatgattatgtttaagtaacgaatgaaaacatcacagatgggaaaacgtattagaaacaaattgggtttattagacataatacaatgattgaaaattacttggtgagatttattgagagaacgacaagtgggtatattgtatataatgagaattaatttttgtcatatttagaaccacaaaaatcacttcacaacacaaataattgtgtgtgtatacatcttttcttttacgttagttatgataagctataactatatatcaaatattggccactcatgcattatatgcatagtgaccattattatataaaagactctataaatgtgtgtatatatatacagattcaaagatagaattaattaaagacatctttaatcatataatcacatgcatcatcggcataattgaccagaccagaagagtaattattattccaaagagaagtatatcatgttgtcagcttattgttctgcattttacagcttaattataactgtaaagagaagaagagttagttagtggttctaactaattttctgttgtttgttaactttctgttgcattcttatttttctgttgcttgctttcttctcttgtatatatactcaagccattggcttcataaatcaaaatacagaaattcttttctctatcttcaattactttacatggtatcagagctgattctttctttccttttttctttcgttctgtttttctgcaacttgagctttcgttcatggctaacaatggaggttcgtctccaagtactggttctaatcttcccagatcgtctcctgtcacattctctcattcactttcagttcagctagatgaacacaactacctcccttggcgacatcaggtgtttgctgcaatcaaaggaagtcgacttcagcatcatcttgatccaacaaaaactcctcgaaaatttctcactaatgacgatcggcaacaaaatcgtctctctgcagaatttgaatcttgggatcaacaagacagtatactagtctcttggcttctatcatcaatgtctgaaaagatactcacacgcatggttgggtgtgaatcggctgctcacatttgggacacacttcgtacctactacactgccttaaacagagctaatgttggcaaatacaaaactcaactcagaaatttgaagatgaagggttctcttaatgatttcttgctgaaaatcaaaactcttgtagatcttcttgcctccattggccatcccatgtcaactcaagatcacattgaagccatttttaatggtctttcaagtgaatacaatgtctttgtaacctctgttaatactcgattggatacctactcggttgcagaaattgaagcactcctcatggctcaagaagtgcgattagagaaagattctgaagatctggatattgctaaaccataagcaaatctggcacatacaaaacctttcacaggaggcagaggtactttctccactcattactatccatcttctaacactccacatcactcttccatgtacaggggtcctcctggttcattttctttcaataatccccctcctggcttcagtaatcaaatgaactttggtcagtctcgagggcttcctactggtcgtggtcaaatgcaatccaacagaggtggtagtgtccaaaaccgtggtcagtattcagcttggggccaaaaggttcaatgccaattgtgccacaagatgggtcacacggtccaaaagtgtttctacaggtttgataaatcgtttacaggtccagaaacttttcaaagttttaatggtagtgctaatcttgctgaatgctctcatctatatgcctctcctgaagttgtgcaagataacagttggtaccctgactccggagccactcaccatctcactcccaatgcccacaatctgagttacaccactgaatatactggggatcaacagattcatatgggggatggcactggacttaacattcaaaacattggtaagacctttattctttctccctttcattcccatcagcttgtattaaacaatctcctacatgttcctcacataaccaaaaaccttcttagtgtgtctcaatttg

SEQ ID NO: 300161 - DNA, 4703 bp, Cannabis indica
aataaaagaaaatacaatcaagtgttaatagtaataattaatatggtaatttggacattcataaataatatttcataacactcgttgatttctttcttatttattaagcatctgttgtataatttactttccattattgtacttgtaacaaacacacaaaataataataatgcaactatttatttatttttacagtatctatcctatttttataggtaatggttcctacaagaaaatgcaaatatggagatttaaaaaagaaaagaaaagctcaaaatacaactgttgaaaaacaagttttacataaagttcaagttttcttttttgttttttgataaccacataatgttcaagttggttctcagaaaaagaaaaaaaaaaactctgtaagtcaaagttttctaggcccccaaattctgtggattggctctggatggatacacaacaaatcttacgtcatgtcataagttactgaagaaaaggatagcaatgttccttcaatgattcccaagacttttcagtgttgtcaactgtcttctccgcttccacttttttgagccataatggctccttgtccagttcagcattgatcaaagcttgtcttgatgcagtagcttttccagccaaatcttcaagattgctctgaagctgtgccttctccaccttcctttcagctagctgtctctccatatctgctatttctcgattgacttcctcagctcgattcctggtaggtatgaacttaaaagacaactgcttcagagaggttttcaactcaattactgatctcacattctgttcggcctcccttatgtcctgctctgcacccatatatcgttcacaagttttgttcaaatcatccagaaactttgttacctcatctacttcgctgtcaggaaatgaattgacagcaagcataacagaaactgcatgtttaaattcacgagttcttcctgactcgatgaagctcgcaagcctcatatcaaggcattgtttaacgattttacgtgcattcgtaatctcatcatcagtgctaggcactgagttctgaaggcagctagaattaatggcctcaccagcctttacttccaaaaggctttggatatcagcaaacaaggcatcaaatgaagatagagaagaattcatttctgcttcaactaaatttggctcctaaaacaaaattcaaagaaagaaagaaaaaaaggaatgagagctctgccaaccagaataaaactaggcaccaaattaagtcagagcaacctgatgaggatggacatgcggatgaacagtaggggtgacagatgggataggtatcgttttaacatgcggggctacctgaggacaaataacttctacatgagttgcttgctcttgagtgatgttaattcttgattgtgggagccaagttacatgaacatctcgaattatagtttgcaaacgaggccgaccatcaacaaagtctccctgaacatacttgaacattagttgataaattataccgaggccaacaaaaaagcttagttgagagaatcgttaaattatatgttttcttgagatcagtcaatactaaattctgctggataggttaaatcataataggagacaaaaagattgcttacattggcttcaccagctattttggccgatcatgaaccaaacaatgaaattatcagcaattatagtgcatactgcatagtagctaggaggagcaaataccttggagttgagatactcaaagaatgatggaacatctggacaatggcattgctcgatcttttccgatttctgaaagcaaatgatgtctccatctctgagctgcataaaaggtaaaaagtgcatatgaacaagaccacaaagaaggaattaataatttataaatggtttgcagtaagaaattagcctctactagtatatatatgtcatcaatctgtaaataaatataaaggatttatatgtaccttactacaaagaaatgttaacttcttgctaatgggaacacacatggtgcaagattcagattttgtctcctgcacatttaaatgggctatatacttaaggttgtcccttgccagtgatataactagtaaaaatcatcaaatgagtgaaatcccaagttagtagttacctcaaaaagtatgattttctcattaggattgaaaccagccattttgtttaattttttcaatattctactaggcttctcgtgcagttttacaaaaagccttcctacatagctgatatagaagaaaacataagatatatatttatatgtatttatatcgataagcacatacagagaaagaaagagaaagagtaccataactcttctttccaagggtcataaagtttaaaaaataaaagaacatcctctttagattttagtggaggagcaacaggctgcaaatcctgattgtaaaaagaaaatacacaaatgacggattcgtgtttatagcaaggggaaaaacaaaaacatttatgatctaactcaaaaaattagtatgtaaagtttgattgaaaggttgaaaaaacactaccaaatcaagttctacttccagaaaaagccttagcacttcttctctctttctcttcttgtctaaataatctgtcagttctccaacctacaatagtcactagtcaatcttgtaacgaacaaaagagttcatacctcgacaagttaagacaattatacagtacttccttgattgatatcttagtcataagtacatatgatgggttcaagtagtaaattctctcaaagttgaaacaaacgcccatcagataattaaatgaattaagcggtttaaatggtcttacacgtctttgttcttccacacttgtcaaaggccttaaaggtctgtaggtatcattgtcgcgtttttcccacacccagaatcgttgaaatttcactggtacatcgaactctatggctaccttttcctgagtacaatggtgatagcagtggtaaaagtgtaaaaccttatattgtatctagataaagaaggtaaaaaaaactaccaagagcaagtacgaataacaaagataacaggcaaggatagagagaaatggagagtagacgaaataaagaaaatagactgatctgggaccaaaagataaggacaaactagagcaatgaaaaatttgacagacctcaactctccctacagcaaagctcttataaaatatcactcaacatttcgcctccaattctctcctctcatatctatacctacattaacactaacatcaccccaatcaactaagcacacaacaaactataccagctcatccaatacaaatacccattttcccttctacttcctatattctataccaattccaagtcccatcagaaggaaacagttcttgattaaaaatacatttgctgagacattgaagtaaaaattgatcagagggaatgtatcaagtgattcatatctaaaattactacaggtctatagccctgcacacacccgtatctaatacacattagaaaaagatagatgtgtgtccagtcatataaggcagggatttttcagaatatgttctgaacaaaaattaacctttataaagaaacattttaaatttataaaattaattatgaaaaaccaaactattataaaacaaatggaagaaaaggtttgaattttattattataaagcataaagagtaggtgacattataaatgatgacaagagtctaaataatatgaaaatatgagcaaatatctaaggtgagtactaaaaatgaaagaaaaataaaacagttcagccactcaaatctccaatccttgaatgttgtaactttttatatgattcaacggtgttagcagataccccatttcaattatgcgtcaccttatttgtgcatggttcatatttgccccctacagatagaaattagcccaggcttttattcaatgttggtcatttatccatatgcttgcacaaacctcctatggaacttaaatgtataggcaatttccttgagaaataggtatatttagatacaaaatagtagcaaacgcatagaataagcatgaaggatcaaaattgatagaatgggaattgattgcccaaagatcagtaccttaaatttgtagaaggtaattaggtttggaatacgaaaattacgaactttgtcatgatttacaagatcaaaatacatatcccttcctatctgtgcaatcaaatcctcgtcacgaacaacctaaaaacacgcaatgacatttgataagtcacattttgatctcatttcaaacaacaatggtataaaaaaataaaaatcatcacttgaatttaatcattttaagaaagaaaaacattgctttaggaggtttatggttacttaattcctcatccaatgctccccacaaattagacatctctacaatccccaaattataatttgcatccctttattataacctttcatttccttagtatcgtggtcttcaaggcaccttgaatcagcacaagtgttccaattccaagtgcatattttcaaaggcctttcaccatgtgtatgtgtgtatatatatgcatgaaaaaaaagtggttgaaaatcgaaaagagtaaatagtgccttaccttgatgtcagtataaggatataaggtaactcttctagtttctttctcctgtatgtcttgatctccttcacgtgataaaattcagtgtttaatatccaattaaaaaaaaaaaaaaa

SEQ ID NO: 300162 - DNA, 1567 bp, Cannabis indica
aatcatagtgtggaagattgtgaagaatccagatttaagagaaggacattcgggctcagatcttggtgatactctgcgacagaaaggatacaggggttacggatctgagtggaaggagacattatattccgctccaaccactgtaaggtttcttatactttatatgtgtttatttcatatcattttagaagttgatatttaagatattaaatagcatacttattagtaaatctaagatcctggtaaaatctttccaacactcctcagtttgcaaattgtagaaactttaatggtcgagattttactccacattctcacttgatttgtcaggtgtgtcttaagataggtcacacagctgcagtgcgtcactatcgttatgatgaaaattagattacttcaaaatctacaccaaacactcctagagctttcatgactgaactagaaaatggggtatttgcctaccaattataattgtagggaaagctactttattagtgggtaatattctttacctactaatatagaattggtaaagtttgatagctaaaggttcgtaggaaaaggttcttcacctatatttatcaatatgtatcatggtaaagttatagtaattaaatgtaagaatatcagctcactatgacatgtacatgaaatttctatattcattctaacaatccataatatatataaaatcataattaaaatcctaaatacccactaagaacaataacaaataactaataattataaacaggcagaaaaaatgagtacttattatttaataagctatctaaaggttaaccattctttcgacaaagccagaaaaacttcacttaaagtggtgacatattttcaagtcaaaaaaaggagccaccagtatactctatcctatctcattgagaaaatataaaatcatattttcatcttcatcttcatcataataattatagtacaaaactcttaattattatcagtcatatatatatctaaatataaagggaaatagatatttccaagcttgattaataataaacttatgtttttaacccttcaaaacaaaggtagattttgcaaaagggaccaagatgagcatagaattgtaaaaaagacaaatagaaaatcaaaatcagaacaaattaataagaagaagaagaaagagagtagacctagattagcttatttgaactcagaatcaagatgagatcagatctccaatagacataattacttttctgtcactaaaccaaataaacatgaggacccaaaatagaacttctacaatgagatcacactataaacacaaattaatttcaataaaatcaatcgaaatgcaagatctaaatagtaaatcacaaatggttgaaagagcaccacataatagaaaatagagatgactgaagattaagagaaaagaaataaaatggttctttaagcttgacctgcgtgagagagaaggaaaaaagcgtcgcaagcgccggttgtgtgagggcctagataactatcatgactatagtggcattgtgatgagtcacacagactcgcttgagagatagagagagagagagag

SEQ ID NO: 300163 - DNA, 1367 bp, Cannabis indica
caatgttcgatttgtatctattttcaggttgactgggatggttacacaataggatactatggccgtatatttgaagctcgaaataagactaaaggcggttcatttgaggtattatttgctgctacacatcctttaaaaccaatacaattatgatgagtatttgattcaggcactgtctttcgatcttgcagggtgatgacaaggattttttcaagtttcgaataggatctcaagaggtgatacacactctttttccctttatctcttgttactaggatagggggtttatgctcaattgtctcacacacaacaatgtagaatttagtagagagagaatagaatgatagattgagcataagatgaaatctatgcacccactgacaataatttgattatacgaatggatggttatgtcggttcttgaatggcaggtaataccagctttcgaggaggcaataacaggcatgactatcggaagcattagaaggtgctgcatctgctttttcttttcttggattcaaaaagtaattagctttatgagaaatacaatttatgagtttgaaagatacataactctccatcacatttcattcttcaaattcttatggccgggcacagttttgatagcacccgaaggccgtgtttgatagtgaagaaagttatagaacagaaagtagaactaaaataagcagagaacataaccaacagtatactttcatcgattaattggtgaaagagcttatttttaaatacattctttcgagttgtttttggtcaaaatagtctccaaacccgggtgttcagtgtgtcatgaaggtcattttccaaatcatagcaaaaaagacactcttgtgagaattattttttgccaaacaatgtcatatattcaatataagtgagaatacatgtataagcaaatttcacaatctagttcaccagtgatgcaggattatagtgcccccggagttgggataccctgacaacgattacaacaagagcggccccagaccaacaacattttcggtaacactccttattgttttgtgttagtgattctatgatatacattcaggtgtggaattctcctaaagatcatgcaatgttgatcatgtttcagggccaaagagccttggattttgtattaaggaaccaaggactgatagacaagactcttttgtttgatattgagctactcaagatcataccaaactgaaattcttctctccaaattcatcagattcaactattgcagtaacacattttgttctataaatgaagtttcaagctctgcaacttttagctgagatggtgagaaagctgaaggttcagttgacaccattaatagtagattgaaaaatatttattga

SEQ ID NO: 300164 - DNA, 2734 bp, Cannabis indica
gatcataataaatgagtctgtttgtgtaagcaaatctctctgaaacttcatatatatctctgtctagctaagctaagttctattccacgtcttaccaattctttcctttgtttttcgcttctctctctctgttctccagaagcaatggactctggtaacagtgggagtatgcaatcctcgagcggtggagacgaagagtacgactcacgcgccgaatcgatctctgcccttttgagctccaaccctcaaggccatatgggcagccaccacgcgccgcaacagcagcacacccaccaccagcagcagtcctccatgttcgaccctttatccaacttcttcgatccggcaacagtctcttcccgatctccgctcaatcttgacatggcatggcccagaaccttacgatccgacccgaattcaatcgatcttggatccgggttgatgtcttcgtcgtcagcccagaaccaaagccacccatttttcacaaatagccaatacggacaaggacaaaacagaggcagtggatttggaatcagcggagtcggaggtggagtgggcttagccggcggcgtgggcggcggaggtggagtcgggcttggctcgagtcacacttttcagggaattcagatcccactcgagaataataatgtaataataataatggtccaagaggtacaaacccaggtgcgatttctggaacttcagctcaaaacgacgggaacaacaatgtcgttcgaaatccgaagaagcggcaagggcttctaggcgtgcacccaccacagttttgaccactgacaccaccaatttccgagccatggtccaggaattcaccgggatcccggccccacctttcacctcctcacctttcccgagaagcacaagattggatctctttggcacagggggaggagccggttcttccatgatgagatcaggaccgttggattcaccgccgccatatatattaagaccttttgctcaaaaggttcaggctccccagcaacacccaacgacgtcgttcattcctccaatctcatcttcaagtagtgcttccatggcttcaacttcaactgccattaactaccaacaaccaccaccgggaggcggaagcggtagcggaaatggaggacagaatcctctcttgatgcaaaacccagttctgaatttccattccttgcttcaagctcagcctaaattctcattatccaaacctcagacgttaggaccgttggatcatcagatttctcatcacgggcttgaagactttgggctgagccaccatgggctcagtgggcttcccaatctcatgtcgtccgatcacttaccaccgaggagcgacggtaaccatccaaccacgacgtcgtctccgccaacgacaactgctacacccaactggggtgatgaggtcggaatgggtttaaacgacaccaacaataataacaatcgaagcggaaacgacaacaacaacaacaacaacgtagatcatcatcatcatcttctcatgaggtcaatcaatggcggtcctactacgagtaatagtaatggtagagggccagagaatgtaacaaccagaactgaaggtatggtggaatcatggatttgctcttcagattaaatacttagtcatcacatatatataaaccaaattatataatcaaaaaaaaaaaagaagtaatgaagcatggtgattgattatatatgatgatgatgcatgatagagaatctttgtctcttctccatctaaaaccatggcgctataccaacatgatgatatatattatcaaacacttttttttggttttaaatttttttcttcttttttattacatatattaatatatgtaaataaccaacatcgtatttctttcttatgatatcctttcagattttgttatatatataccaaaaaaaaaaaaaaatttcttgctgcatcaaatatttattatgtcattaacttattcggaatagtaaaatatttggttataatctgcttgtttgaccagtggtggtactgtataagcagaccaatacagacaaataattaacctgctatatataatacgcgttttcctcgtacattacacttctatggataaacttcattttatctaattaatttaaatgattattattacagcgaatggccaagattaagtagtactactgtctaattgcttttatcattaatatttaatcctctcaaatgtcttgtattttttttttctaatttttattttcttgtataagtctcgaatatattttgtatgatgtctaggagtgattggtggcgagatttggggtgtagctagccgccgcaatctcgtaatatacaattcaaatatatacatattcttttatcatgtgtttgtttatgtttttaagctatacttcctccactccacttaacattatttttttaatctaacaggttatattctttctttttattttatattagaatagatacatagatatgtgtaatatatataaagcttagatgataattaatgccaagtgagtccattagtataaatttcaacagttattatataataatcattaggcattggttggctttcgttacgtatgaacgaatcttcatgcaaacgtgcttccctagctagtttcaaaaaactaaaaccctttaacattaaggtacaatgccccaaaatttgttttgtttcattttctcaaattttaactaatggaaattagtgtatacaaatttactctg

SEQ ID NO: 300165 - DNA, 2999 bp, Cannabis indica
gcgtaccatgtgtttactcgtgtttgtctgttttttttaaatgagttgggcttcaaattcgtactttattttactcgtgtttgtttgtttttataattaatgagttaattactaatatatatatatattataacttttattattatataattttttaataatattttacaacaaaaacaaaaaaaaaatatatagtttcagacaatgaaatcggagaaaaataagaaaaaacaaacagaaaggagctctacacattttattgattaagagaattatttatacaagaactaatggctcgtgaccaaaagccaactaacaaaaagcaaatgatattgtttacatcatttacagtcgttaatcaatcttttaatttagaataatttatcaactagtatacaaaacttggaatgagattttatcaacaaaaaagaaggaatgaactgcagtaatgtaaaggctaaaattaggcttaagcaccatatcactgcatattgttgcctaagagtgctcaaataataatatcaaattggactatctaattaatctaaatggtatgaacacataaatttacccatatccaatattaagatactaatgatttgtctttcgacaccatattgtctcaaagttttttggttactaatgtgcccacatataatcatcttacattgattgtgaattttagtttctccaagtacaagctattttgacacaaatttgtttgtttgttttgttttttttttttcatattttaatagcttaaattggtaatataacaatttgtgataactcacatttggctggattaaagatttggtatgaaataaagaataggaaggaacatatgaatggaaatattgacaatatattgatttttttcaatagttactttgtacataagaaaaaaggaaattaaaatctctacaaaatgaaaaagaaggaaattaaaatactttactaacttccaaataaagatatgcatttgtttccgaaaaaaaaatgaaataaaataaagatatgcataacaacaaagatatgaactaacttccaaactagtacattttgtttatctcatattatccccatttacaaaaggcactacatgaacaaagaatcaatagtttgatttgctaataattctgttccaggccagttcttactattatcctcctatcattccttccaacttcataaggcttggaaaatactcaaattcacctaccttaagctgttcatcacgcagtacaagttcatcaattttgtcaattctctctgttttggtatcgtaatcaaacacttcatttttaaatttaaaccgaaggacatcagatttaaacccccacggcacaacttgatctatttcatttgaatagggctgtttgcttaaaaatgtgagtggaacaatcattttcttcgtgttccatctcaagacaccacccacgtactttgtcattttcaagaggtgaaggtcttggtggtttatctcagcaatagctaagcaatcatcaagatcgataaaatgggctttgagtatattgaaggaaatacgcctaggcaaaccattagtaaccacgtacttgtcatcccacacgtcaatagagcgaacacgcaaaaatttacacgaaccaaccactaatacttggatgaaatgcaatacccccatgtttctcacgtgtatcattcgtgctagatcctctgcatcataatcagggtcatctaacaagcctgtctttctcccaatagatgtccaattgaaatctcttccaacttcaaaagtttccaaagcatgttccatgataccttgactattagtcagtctacattccaagagcaatttgcactcatgagagaaactattcaaagcaatgtaactctttaatcgactaatagtgggagccttgtaggtctgaggagaacgtagcagagcatgatttggatcaggcaaatgaagtacttggcgggtggcagggttggagatgtagtgcttcatcacaagaccgggatcttctcgggtcacccacaccaatccacagaacgagtcaagtacgtagttattattagtaaatggtggaaaatagtgacaaggagctcggtccaaatggagttctgaaatgaaatacttatcttcgatcaaagatttccataacttgttgacggccttgcattttagtagacaatgtacggacaacctactaaatatattaaacaccactgattcctcgggagcaatcagctcatcaaaagtagttttctcttgttgttcttgacaggtttcttcagcctcatagtcgctatcactcatagaatcataatcagtactatattcatctggctctgactctgaatctgattcgattgagtgctccatactctcttgatcttggcattcgagttggcataagtcatcttgtttctccatttttactgtagacatcgaatgatcatagttttaaggttaaagaatcataaaggaatgttatattcatcaatattttagagaatcaagattgataaaaaaaaatatattaaagaatcatggaagaatgttatctttatcaatattttaatatgcatatgcagattgatgcaagtagagtacaattaacatcaagaaggaaataaaacaagaattggactaacaaacacgtttacctgagagctgaattctgaaactatagtcactgatgcggacatgcaaagcagagaaattgcgaagaaatataatcaaagtctgaggaaattgaaagtggaaattaaaatatgtttaaatctacctgttgtcgccattgattacctctatttatatgggcattattgatacatatatagagacttaggtttccataatccggcaagcggtgaacaatcaccttaagcaatttgttgggtccaccacattagtgggcttgactaaaatgagggcagcagcccatttgaaataaaaagaaaaaaaaacaaaatagagattgatggtgtgtgttaggcctgcacatgggttg

SEQ ID NO: 300166 - DNA, 5631 bp, Cannabis indica
tgactaattgaattgcaactattggttcattatatcaaaattaattctttaattgtagcaaaaggattgcaatcttctttagacttagtctcaaaatttcattgtattattactcatattaagaatcttgtggctaatttctaagatctgtcatgcttatatttgcgaatattgatgctgataaattagtttatactttctttggtgaagacaaattgtatttgattggaggatacatggttatttatttatgacagtttcattctaaaaagaaaaaactttactagtcgctgcgtatatctcgtgtatagtgtatacccccggttttttttttcgaggtggtttatggtttttcatatattgacagaatctcttgtttcacatgcttcacaccaccacctctccaccttcactcttcaaaacccaaacttgcttcattcacaccaacttaagccattcctcgtccatcgttgaatacataaacccgtaggaattataaggtccaactctcccaagaagggaccatcaaagccaccgatctgaacaaggtatatcccatgtgattactatacaatttcgcgacatgggttttgttcaattctcctgctatttatatatattttcaagtttaactgacataatctactatgaaagttgggttttttattttcatcaatcggtgtgtaaagattatagataagcctcttcttcgcctcctgcttatacatactatgaagtccttatttttatgggcttatttgtatttttcacactaaattctgtgttttttctgtcataatcgcattcttctccttttctactacacccacttcggtgccacagaaattgactttaaagctctttctttgttgaagctctcaaatctcaaactcaatctacatatctgtttcagtgcccctttctttccatcacataaaaaataaatattttggcgagggaaaggaaagaaagactgctaatctggttgatgcttttttcatatttttatgaagattaatcaaaatgtttgaatgtggggttgtagaagtagtagttgttgttacagtatggtttgaattaagcttttgtttgataaaaaataaaataaaagaaagctcaagtagcaggcagctattaaaagtctaagccctcttcttccttttccattaatcttcatattcttcttcacagggttaatagctatcgaaacgtgtcgtttaaggcctaaagttatggcgcctgccactgacaacactcttcaagctatatgctacaaccgtggttctcttcagctacttgatcaggttgtgcttctggttttgttgttaacttttgtttgatttccgattttctttttcttcttctttgccttgaatcaaatttggctctttgtggcttcgtttcttgataatgttttgttcaacagagaaagcttcctctggaaactatttatttggaaattcgagatgccactgatggatggtaatatgcttctttatttttattaggtctcttattcataatattcattgataggattgtttaattttctgaggacgattcaatttcagataatttagatttgtttcttttatcaaagctggtcaaacttgttttgtaaattattggaaggtataactagcttctagtaaagttcactttcaatgctgtaacactactaattatgattagtgtttgttgtgtgtattgtgaagaaaagaggcaaaaatggtgccattctttttatatgtacacaggcatatgtttttcatattagtgcttgtttttgtcatgaataatctcaatttttgagttctttttttaattgtcaggcatgccataaaggatatggtggtccgtggtgccccagccattgcaatagcagcagccctttctctagcagttgaagtgttcaacttggatggtttagatgggaccatcaatgattcagtttcttatcttatcatgaagttggattatcttgtctccaggtgctaagtgttgcttaaataagtcttctgccacctattagtttacatttgttcgtcacatctttataattcccccacaaaaaagggatcaatagcccattttaaatctgaacaatgctatttcagccggccaactgctgttaatctttcagatgctgcgacgaaacttaaagaagtgatctcaaatactgctgctactgctacagaaggcaaaagtgtttttcaagtatggtactttctattgtactttcacttggttttaccaattatcttttgatttggccccgcctttcatagcattactgcaaattcatgtgctccttcttactgaacttccacaggcctatatagatgcagctgaaatgatgctggaagatgatgttacttcaaataaagctattggctcatttggagcaagttttattcttcatcagcagctcaacaaccctaaaaagctttctgtattgacccattgtaacaccggcaggtatctaaatctcttgagtttcccattttaataattctccctaaaaattagtaaataaatatctcttgcaacttatatttctccttttcgacaagaaactgaaaaatatgtctacttatatgttctgtattgccagtcttgcaacagcaggatttggtactgctcttggtgtaatccgcgcacttcatgcagaaggggtgttggaaagagcttactgcacagaaacacgtcctttcaaccaagtttgtattatgatccattttgtttcttgtttatgcaccttatttttcatttcacatgttacttacacacttatgaaaatttatgtaatcaattaattgcagggatccagactcacagcctttgagttggtacatgagaagattccagccacccttatagtagattctgccgcagcggccttaatgcaagctgggcgtgtgaatgctgtggttgttggagctgatcgtgtggctgcaaatggtattcaaaatcctttaatgattaatctgcttttgaaattcaattaatgggaagttcggttaatctattgcattactgaatccaggtgatactgccaacaagattggaacctatagtcttgcgttgattgcaaaacatcacaacgttccattctttgtggctgcaccactcacttccatcgacttgtctctttcgtctggaaaagaaattgagatagaagaaagatccccaaaagaagtactgaactcacgaggagggcttggagaacaagttgctgcatctggaatatctgtatggaaccctgcttttgatgttacacctgctaatctgatatctggcatcataacggaaaaggtgaaccctctttctttaacttcaattcacttttgtatatacaaaaccagcaacatgaggtctcagttgtgtttcagcatctaacggttttagtctctccaagcagggtgtcataacaaaagcaggtgatgatggttttgacatattggggttttcactaaagatagccgggtagtcttgtgcgcagaggaatcctcttctggtgaaaagtataaccttattttatgccaagcagctatgttctgctggtccaaataattgttaaattctccattgctttctttgtaatagggggcaaggttaatggaaatttcaaaatattgatgtatcctgttcctgtcctgtgcttcaattctcagagttctagaatatacattgttcacatttttttcttgataataaagtatacaaatctttggctgggtcaaggatactgttaattttgagcaacccaactcaaccaataactctggttgagagttgagtacaaaactatctacaaattttaacgttcaaatgtataatcaaaaggtagctaccaaatcttccatcaaatgtataatcaaaacagctgtaatatctccaaatagggtaatgtacttggtgatcctcacattggacaagtgcaagcaagcaaaatgtcaaatttaagaaaaggcaagcaactgagataagtcatttccatcaaggagaacacagtgctaataagtgataactatcaaagcaataaatgaaaattgaaagatggttgtaatttgtaaacttgtccaatgtagcatccactacatgcagctttacactttcttttttcttttcttttgagaatgagaggcatgcagcttcatgcctcgaaatcttaacatttgcattttatcaccctaaattcatagactcatagtttcagtaaagagaataattacatcggaaaaaaggaatcttgagaaaaataggacaaagaagagtaattttggtgaaataattaccaatagtttgtagacttgtagtagcccagtcacgaataaacacgtaagaatgaataattgttagggatcagtgttgagtcattgttacagatcagtgttgagtcatagccatatcacatgtttccaccttttatatctctctatacataaatacaattataattattattattatctattatttttttttgttaaggattattattatctattattaatacaggtgatcttgctttttgtttcgtcttcatattcagtgacttacggcacttatttttcattttccattttcgtttaccatatcaaattcaatattcatctactccaactccacactctcctctcacatttcaaccattgcatcttttggattctcatatcaatttttcaaggtactttttctgctccgccaaatttcttttgtgtgtctctccaaattttaatgccattttcatttttatctgtattttgctagctttgactgtgttttctttgacttttgcgtgttctcgctgtctagcttgtggatagggttgttttgagagatgggtttcgagaaaaagagtacgagtttctgaaggagatcggtttgggatcagaaaatcttggtgggtacgtcaatggcaagtggaaagcaagcggaccattgagctcgactgttaatccttctaacaatcaggtttccctttctgtttatagacttcttttttgctatttttggcgatcattgagtttgtttgattattttagttgaggaatttatgttatggcaaaggagcaacacgtgaatttttgggttatgtttcttttttatgcaacagtgagattattctctgattaatgtgtttttggatatagaaaattgctcaagtcaaggaagtttctctagaagattatgaggagggactacatgcatgtagtgaagcagcaaagacatggatgactgttagtacattgtttcgaaatggtctataagttatcacgtaagttatggttctgctttagaagtgaattataagacacttctgtttttcttggggcagataccagcaccaaagagaggtgagattgtgagacagataggagacgcatttagagccaaattggatcatttaggtcggcttgtgtcgcttgaaatgggaaaaatactacctgaaggaattggggaggttcaggtatgatttatgatggttcatttgttatcggattttttatattatggtaaaagtgttttccttgtcctaaggaagggagtttatgccttttagatgttatattatggtaagggatatttgcggcgaaacctccccaatatttgcaattgttacacata

SEQ ID NO: 300167 - DNA, 4052 bp, Cannabis indica
aggggaacccttgttccccaaattaaacaaaaataaaataaagaaagagtcgaaatagttaaggctgagcagagccatctagtactagagcatcttcagtttagccctctgggatcgcagactcggtgggaacaagaacctcagaggccgaaggagtagggttgtccatattctcacctgcagggatggtggttctaggattgacaatcctcgattactgaggtttgctcagtgacatctcttctttctccagcgccagcaactgaggcaaaagttccgccctatcttcagcatccaagagatctaacatgactttgttatgcttcagtgggtatatattgtgtgaacaaaagcttgctccaaagctttaatataccgagcctcctgctcttgaagacgtcccctcaaagtggagctttcaccctctgggtcggtgattttctattcagactctttgcaagccttggtctctgctgccaatttgttattggcctcctgggctctattagtggcctccttttcagcaaattctaccttctgctatagctcgagatgaaactgcaccttcttctccagagtaaattcattgatgaacttgtcttcgatgatctaggtttttttatcatactcttgagacaaagtggtgagttttctctccttctccttaacctaaaggttttcttgtcgtatgtcttccttagcctactgcacctcggcttctaattctttaacgcgagagagatccttggaatgaatatctttatatttgtctctacgttccctctccatggccttctttcccaggatatagacttttccatagactcggacaccctctaccttatggtagactccatattggaattggcatcagctaaggccctctctgttccttctctcctttgttaagcattgccgtgtttggccttcaacacctccaaatcatattccagctgggtgaccagggaacaactcctctctgccatcagagcaatctacaaaagagggaacataaataagttaaaacaatgtggacacactaaaatgttatttgagtcagaatagggtcgaacttacaatattggcctgagccctcacgaagtcaatcacgtacatcgagtctctacttgcgatcatggcaaatttatcaacatcaagcttacaacttgtggtagcaccctgttctaatagatatgccaaaaatggtgacaaattagtccctacacgaggatggagtctctctgccagttcagccctattcatgatgggaggggccgtctcattccacttgtcataatcgacaatttagtgttacgtctggaagagatgctggtagacaacttcctcatctccatctcacagctacgcctttgatagtagaatttatctactgcctctagtctggcttcctccccttccgtcaactgtgcaagtttgataggaaatgtgaaaggcgtaggaggcaacagaggcaactcagtcctttgcctggataattgggtcgaggtggccggaagcacttgaggtgctagggttgtaggggaaggtcttgcttgtccttaaacaaatgagtactttgccttggtggtcttccatcatcagaagaagttacccccttacgagatcaagaatcagtgacctacctccttgaggctaccagctgttggactttctctttggcctccatctttgccttcttatttgttccatcattagaaaggccagcccgcttcttagtgagtttgatgggcccatcataatcaaaattatcttccccaaaattcttctaagggagcctggtttagaggctccatgaacatggcaggcttggtaagatccacgatggcagtggatgacgtcttcgtgaccgaagcctttaaaacaacttctaggtttggtacttggggtgctggcttctgggctctacttctggaggcctagttatttttgcaaacattaccaccttgggcgatctccctaaccttgtcaaaacatgcttggacactgcccaagaattttttcaaaagccccatctagagaatggctggttgatttgcataaagcacacaaagttgtcattaaaaggaatcataacaaaatgcatgaagtttacaacatataagcatgcaagacttcatgaaggttcaaaccattaatcctagcataattggcttttctcctagcaaacagagcgatgtcttctcgaactaaattggtttcgtattggaagaatctggggaagtatattttgctaagtgcatccactaagatatgatggtgcacgggagggataaagtggttaggactgtggacaatgcagtctaccctatctacgtctctattaaaagaatacttatgacgatctaaatttaagaagtatggatcaaattcacactgagtgaccatctcaaaattagacacaatgggagccataattatacaaaaatgtgtctcaccactaccgaaagtgctcgctcccagagcacctttattcggcatcacattcttgaagcggatgaaaaaattcttcagcctcactcaggcttgtaggaaatcattttctctagtcttcaagccattgttcattagccttcaccgcctgtaaagcctctttagtattaataactgcgatggcttccctaacctcttcagggtcccctttcaaagcctcataaactgtctccttcatggagaggtgagctatatcctggtgtggggcaatgagatccacttcttgaagattagatgtggtcactaggccctcaacttgtaactcctggggcgagaaggatttgtagaagttgactctttctttcagctctggctttaaggtggactgaggaagacaatataacatacagaaattagtggtaaatcacaataataagtatggagggaaaacaaagcttttaggagtcataattggaatcaaaacttacttgcaagacggaagtccaaattgagggtgggaaccctcctcaatgggaagctagaggtgaagaagtaatagttctagaagtcctgcatataatatgtgtgactagttgggcaagggacacttgttttgtatctctgcaaccagtagaagcccaccttgtccttgtgacccttattggttgagatttgatctggtagaagtataagatctcttctggcgtcaaaataggtttgccttgtttaacacaaaaaaataccatccgctagaaaatgatatacttggtggatgaactagaagggtgctactccaaccaagtcgcagaattcagaaaaatagcacctcaggggctaatatgcccccatctcgatatgggcccaactccatgtgctgaagcctccttccacgcaccagctaggcctctctccaagtatggagagcctattctagaactgtcctggaatacttttaagccccctttgggtttcatatttcctcaggtttttgtacttcctgaacgagtaacatgttggtctatctctcacagactgtcattcagaaccactttggagcccttcgtctcttcctctgagttaatctccctttgacgagaatgtttcatcatgatttctgtacaagaataaggaaatctaagcagttagctaccctgaatacctagtatagaaagggagttgctggtcctccccacataaactgcttggagaggtcccaactagatatactacttaaaaaagatggttcccaggggttgcttgtttctaattagaaaccaaggataacgtacaagagagacaacatagattagcagtcacctaagagtctcaaggattttgggcaaaaaactagccaacgtatttaatgaaattcctaaacgaaaaatttgaggggaaaggctatttataattcctaaattttcttgcggtgatatttgcatagatgagaaaacgataatctcatccctggatagaatatgcatgtataaattaaaacagtaaattctcaaagcacaatatatgagtgataaggacgtacttgatgaatataaggggtgattatttatattagtctaacctaattaaaattgaattagcaacat

SEQ ID NO: 300168 - DNA, 1600 bp, Cannabis indica
aaaatgtgctggcaaaagtggcatttacttgtagcgtgatttgtatctaatatactatgttgatacattttattacgtactaataatgtaatttggtttcatataatatacagtgatagaatttatattgtgactaaaacatattccattgcaacatataatattttttgtgactaatatataattagagaaatttatggcaaaaattgttgaattgttcactttattgtagattagtcttcaaccttcaaaaataaccgcaataatagctaagcttgcctttcttacaagtttgtttcatctcctctccgttaaagtaagttagttaacttacacgtgtacgtttatgatttaatcctattttttttgttttatttctttctcttcaataataagacaaaaaataaattacaaaattaaaaataaaccttaaaacctaaaattaattgatcctagcactgtaaaactattaaaaagttagaaacactgttaaaaaaattgggttttcctaactgttttaaatagtcgggtaaaatattctcgtttttaagtggatacccaataaaaaatcccacctaatttttaagtgactatattaaatcgtcgagaattccttatgagtgtttaaaaccgtgatcagaaatatccaattatagccaacaaattttaaacaatcatgtaactttattagctacgatcttccaaaaaaaccgatttgagaaccgttgggaataaatctttttgtagtagtgaaaagttaaaataagaaattcaaacattccctcgaccaccaaattcatattccctaatctttagccttcgatcaaaatccttcaatgatcgacccagaacccagtcacagagtgtccaactacctagaatctagccgtattgaaaacccttgtcactttgttgaattgtgacctaaatccctagagcttgaagtcgactacagaggaggtacccaaaaattgatcgaacaatggaggaggacgacgatggaggtatagtcttgtttctcttcacctttatttgatactttaatagttatatgttgggattgtaattttttagaattttttgtttttctttcactctttctgtttgtatttcccactcttaatcttttttagtgattgaaaatatttttttttattgttggtttgtgttggtgtgaatgttattgtattagctgtacaaatttattttttgtgatgagattcttggggaatgcactattttttttggctgaataagtaaagtttcacttggttttattgtggggttattttttatgtgaggtatagtgctttgtttggaatgtggtaatctgtacatggttttaaaacttataacaaccacttttattggaatcaatttattattttattgttttgttatttggttgttggcaagcatatactttagtgtaaatatgcactatgggagtaattggtttattgaaaatagtttgtaaaggtatgagggtgtcactgtcaccgagtttgacaagtgccataggtatatgtttaatatgatggaactagaaggcatggtcatgcaagtacagtggtgcaatggtgttggaattattttacca

SEQ ID NO: 300169 - DNA, 4539 bp, Cannabis indica
gtatgaatttttgaaaatatattttcaaatgtgtacatttttgaaattgtgtttttttgcacattttttgtaatataattatttttgttgtacactaatgaaaaaacccctaataaaaatttgcacaaactcacaatgatatttcttctcaaatacattaagcagtttgatgccttagaaaaaaggatagaagacagggcctcaaaaatgccaaaatattaaaaaaacacaaaaaaaataatgaaaagaaatttgctcacagagcattttaaccctactaagtattttgagtcacacaattattttggaacaaataaaaaaaaaaactttttacttttttcttcttcatcttccaattcaacaaccaaccattttcaaaccactcacttggtgctggcaagctgggtacggaggagcttggctgcgtcaaccatgttcttgagagcgggcttaacctcggtgtacttacgagtcttaagaccacagtcggggttaacccacaagatgttggtttcgaggacagcaagcatcttgttgatcctgtcagcaatctcctcggttgatggaattcttggagagtggatgtcatacacaccggggccaatgccagcaccgtacttaactccctcacggaagacagacagaagcttctcatcagaacgcgagttctcaatggtgatcacatcagcatccatgtcaatgatggagtggatgatgtcgttgaagttggagtaacacatgtgagtgtggatctgtgtgttgataataatgtcatgtcaaatgcttgatgcaaatgaaaatgttaagttataagacataaagttttcggtttgatttttacctgtgtagtgtcctggacaccgctgttggtgattctgaaggagtggacagcccagtccaagtagaaagcttcctcggatttccttagtggcaaaccttctctcaaagcagcctcatcaatttggatgacagtgactccagccttctcgagatcctcgacttcatccttgatagccaaagcaatctggtagcaagtttcaaatctggaaaaggtaataaattgtgttagatacatgttcatatagaacaatttgataatcaagattcgattttgagaaaagggtataccgtggttggtcattacggacaaaggaccagttaagaatggtgactggaccggtaagcatacccttcattgggcgcttagtcatgctctgtgcggtggaagaccagaagacggtcattgggttggggcggctgacatcaccgtagatgattgggggcttcacacaacgagatccataggattgcacccatccattgacggtgaaggcaaatcctgacaattgttctccgaagtactcaaccatatcgttcctctgattaaaattcaacagattagcgggatttccacaacaaaaatactactaatgcaaatgaaaaaatatcaaactcacctctggttcaccgtgaaccaagacatcgatgtcaagatcctcttggaggtcgacaaccttcttgatttcagccttgatggcggtaacatattcttcctcggaaatcctataaacaacacagcaatgttaacaagtgtttcacaaccaactcactttttataagaaaataaaagagatacagagcttcactcacttcttggccttgtactcacgacgcacccttctaagttcaacggtttgggggaatgatccaatggtggtggttgggaggattggaaggttgagcttcttctgttgagcatcaagtctggcactcacgttagttgcacggcggtggtcagaggtcttcaaagcagcagcctgagaaacaacaaaatttcaccgaaatgaacaaaacgaacccccacacactgacaactttgatataagtaaagaatagacaatgaagcactcacagccttttggacagcctcattgttgactcttggggaggattttcgtgaagcctgagcagcagcattggcggagaaaaacgcctcatccttctgaccagccaaagccttggccaaggcattaacctcaacaaccttttgagcagcaaaagccaaccaagacttaatttcagcatctagcttggtctcgttgactaggtcaacagcggtgtgaagaagcgagcaagaggtggagacaacaagtttatctgtatcaaacaaaagaatcattagcaccacatcataacaaatttaaactatgcaacaccatgacatgacaaaagagccataaattaaacacctttgccaacaatgctctcaagagattccaatgtggcaagagaagaggccaaatcattagcccagatgttccttccatcaacaactccagcaaaaaggtatttgcccttggggaaatcagccttaatcaagtcaatggtcttagctccacgaaccaaatcaaatccaaatccggtaactcccttcaatgaggtaagggtcttgtatgcctcagctggaagatcagcaaagtaactcacaacaataacattcaaaccagaaacagctgattcaagttcagcataggcttcagtgaatgcattcaacttgtgagcttcaagatccttgacaagtgtgggctcatcaaactgaatagtggtagcaccagctgccttaagctcagaaataacttccctgaaaaaagcattaacaaaagagcaaattagagacaatggatcgatataataacagagagtaagcacatgattttatctcaggtcacgaattattacttgtagattggaaggattttgctgagaagggagagagttgagaagttcttctcaacaccctttgcaggcttggacaacaacaagtatgacacggggccaacaaggacgggaacggtgtcaacaccgagctgcaataggttcaaagataatattaaactacaagttacatactcctttccaatctaaactatgttcaaccaattaaacaatatgttcatatgaatccaaagtatttgtatcatgaataactatacatatgaaaaagctcaaacatgtcatagaatgtttcataaaacaaacaaatgaacaaaagaacataccgccttagcttccttgtactcgttcacggccttgtgagaagagtaagagaatttgacatcagggcccaattcagggacaatgaaatggctgtgggaacaaatcaattaaccaaaatcatgtcaatacacaaacaaaacaaaaccattagcaacatagtgagatgaaagtgagtagtactacttactagttggtgtcaaaccacttggtcatttccatagctgggacagaggcatttcctctggccatggagaaataagtatcaaactcaatctctccaccattccagccatatctagatggaacagcaccaaggagagcggtggtgtcaagaacttgatcgtaacaactgaaagtgttgctgggaatgtacttgataccctcagcagacatttgcttccagattgatgctctgagatcagcagcaacctttttcaaatcctcagcactgctcttaccatcccagaatgattccaaagcaaacttgagctctctcttgggacccatacgagggtatccaacaatatgggaagccatctttctgtttcagtttgaacacaaaaacaacacagtcaatttccatcaacacacaagatctaaatttcaaatctaaacaaaaacctattcaaaacaaagaatcataacattagttggtattggatcttaattgctattaactcattggtaattggtttttgagataagaaacaataaagtttggatctttaacagtctttaaaacacattactttcagattctaaagaaatcaaatgaacactactaactaaaaccataaagtttggatcttaattactataactcattggtaattggtttttgagaaaagaataaataaaaagtttggatcttaacactcttttaacacattattcagattcaaatgaacaccactaactaaaaaccataaagtttggatctttattctttaaattacagatctgacatcttagctacagatctacagatctatacaacacaaaacaagaaaatgggcaattcccagttcgattcaaccaaaagggtatcacaaaacactcactaaacaagcagatctcagttcaaaatctgaattgaatacaataacaacaacaacagaagaagaatgaagataatgagaaagaagaagaagagtggagtgttgttccttcgtaccttagatgaggtagaaagaaagaaatgaaatttgggtttggtttaaggttctcttctcttacggtggattgtgttcttagtaagaagagaacggcacgagttgagaaatggtggtgtaatgcttatttatagcccgaaaaacatcacttgcctctcttttctctctactttcttagatctactattgtggtctacaatgccttggcccattctttttttattttaattaaattaaataattataatttgtgatttttactgaaattgtggtagaaagagataaaactttttttatttttatttaaaaa

SEQ ID NO: 300170 - DNA, 1638 bp, Cannabis indica
caatccacacaagtgcggatatccgtattttgcggattggattggattggatcgtgcggattggattggatcggatactttgtgaacacccctaggaagaacaaatttggtatcatatttgtaaccactttattacataatcatgaattttgaaattaaagctatgatgtttgagtttgaatttgaaagtgtagtcttcaaaatactttaagttcacttgtggtgcacacttttctatcaagaaattacattattaaaatatcaaaaaggcttaataattcttaaatttatttccataaaagttcttttagtaattagaaatatgagaacaaacttttgaacaaaaatataaaatattattcacatttggtgatccttacttttctacactcaaaatttatgagcgtgagatttttcttctcttttgttgatctttattatttgcatttttacttgttttgttcccttgtgttgtaacatatattcttcctcttctccatttctccaagttatgaacaacttttgcaataatgttatgacattggtttaattattttcttagtccttgcaatcttctcacaatagagcagtattgattcttgatatttttttttcattgatatatatatatatatatatatatatataagataataatcaatagcttattctctttgtttcaatggataaagagatatcaagatcatgagtgtacaagagcaagagtttcatgccattcattattggaggtttttttcattacactttgagagaataggacaggtataaccaaaatacttcaaatacaaataaaaaatattacattaagattatatgaaaagaagaggaatattacaactctaaaacaatgtaagatacaaaaagagagagagaagaacacaataagcttaaacaatgtctaaaatctttatcctaaaagctatttcttctctcacatagatatataaaaaaactctaaaaatatttctaaaaattttttaagcttcatatgctcagcctagtgtctaaggatgaacatattcttataagattataaccataacaaatgatttcaagtactagttgtttcaataattgtctcacaagtgaacaaatgatcaatatttatagagttttcactctcatttgaatatgaatgagtaacgaccaccataaagtacttagctatttaccaattataaagtgtgcgctcataaaattaattgggtgatttgaaggttttttgagctgttaaaaacatctcattagttcaaaaatgcacaattaaacatgctgaaaaaaatagtataattagttaaagattaccaattttttaagctttaataatacttttaataattttttaagcctcatacgtccaacttagtgtttaaggatgaacatattcttctaaggtttgaaggttcaaaaatgtgtacatactaattaatgaaaaattaataattactacaaattcatgaaataaattttaaaaaaaagggaagcatcttttttgtctctcacctgtaagggtattttttaaacctttaattttaatctaatggtaatggtttgttgtagtttatttcgttatcatgaggtaccacatatataattattatttatttatttttaact

SEQ ID NO: 300171 - DNA, 5175 bp, Cannabis indica
aaaaaggcaccggagtttgttgtaggtgcctgaaaagtcacctgagtagctgtcagcaccgagaaattcgttggagttgctatcaatgccgaaaaagtcatcaaaattggcattatcgtcggaaaatcatcggaaaaattaccaagaaactagtttcttcatcaagaaactggtttcttcatcaagaaattggtttcgtagtatttctttcgataattttttcggcaacaatgctaattccgacaaattttctagagtttgctgtcggtattgaaaaagtcatcggagtagctgctggtgtcagaaaagtcgtcatagttgctgccggcgtcagaaaaaatgtcggaattggcatttttgttgaaaaaattaccaagaaactgtttcttcatcaagaacctagtttcttgatgaagaaatcagtttttttggtgactttttcgatgattatgccaattttgatgacctttctgaagtttgctgtttgtgttcgaaaagtctccagagtagctgtcagtgtcggaaaagtcgtcaaaattggcattgtcaccgaaaaaataccaagaaagtagtttcttcatcaagaaaccagcttggtaatttcattcgattttattgtttcagtgattgtttatgtactaaaccatgctcctcagactttgatatctaccaaatcatgagcctcaaactttgatatgtactaaatcatgtccccctgaactttcatccatgttagaattttttactaaaattagataatagttcttaaatctaacaatcttaatagttcaaggggaatttttaacggccaaaaaagttcaaggggcatgatttagtacatatcaaagttcggggagaaaaattgttaattagccttaaaataaattagaaagaggagtataaatccttctatttgaggaaggattcaaaatggtgggcccaaatggattgtaaatcattctacctcttctctccatcccacaatcctctatgccaaataaatagatttttcatctcgcactacccctctccctccttctctctccatccacccatgtctccctccttccaaacacaccctaaggtccatggtagactttgctgtaattaattatacttagcctacaatgttacaataggtaggccaatttggaaggagatggagaacgtgacatctatccatcatttgacgatgaagttccccacacccattggtgtgggatgtgtgcaaggagtccagtctgaatcgcgagaattctataattccccacactggtagggtatcctcacatgatagaaatatgcgagaaggtgtgaccgagataaggtctagtcgcacattataccaagcataaagaagataaagttgagacatagagagaagttaacacagttgcaaaatgcatcaattatatgtgacgacctagtgtttcacccgaatggctaaagtacacaataactcatcatgaagaaattaaaagtgtggtttttgatatgcatcctcttaaatcacctagaccagatggtttctcgggcatcttctatcgaaaatattggcggattgttggggctgaagtctgcaagatggtgcaaggtttttttgaagatcaatcggtttgtcctaacttaaatcacacctttttatgtttgatttctaaggttaataatgcctctcggtttgatcaattttggcctattagcttatgtaacttctgctataaaatcatttctcggattcttacggacagattgaaaaaagttattgacagattagtctcccctttccagtctgctttcgtcccggatagatggatagcggaatgctctatcatggctcaagaggttcttcaaagttttaagagaaagaaggaaaacatggggtgatggcgataaaaactgacatgagcaaagcgtatgatcgattggaatggaccttccttcttcgggttttgaaagcaaacggattcagcgaccatgtgtgctctatcatcatgacctgtgtgacttcggtcacttattcggtgctccttaatggggctccgttgactcccttcaatcctaaacggggtctccggcaaggggattcgctatcaccgtttctattaattctgtgcagcgaggtcttatcgaatttaattcttagagccgaaaataatggggaattgaatggggtaaaggtgtctcggaatgcaatgccgattactcatcttttttatgccgatgatgcaatctttttttgtcaggcgaatggtacgaatgcgaatgctcttctacagtgtatttctaaatatgaagattggtctggccaaaaggttaataaacaaaagagtggtgtggtcttttctcctaatacctctcaaaggtgtaaagatgagctgaagaacaagatcggtatgaacagccttggtcgggatgagaagtacttgggtaatccttttttcttttctgttagcaagagaacggatttcaattttcttaaagagaaaattatgtcgcggttagaaggttggagggcaaagaatttgtctcaggcgggtagaacgactttggttagctcgatcctttagagtattctggggtattttatgtcgacagccttggtccctaaaactctttgtgaagagttggataggattgttgctcgattctggtgggtggggaattcggataaagaaagatatagagcttttaaaagttggcaggagatttgccaacccaagcgatgtggtggtcttggtttgagaagatttagtgacattaataaggctttgttagcaaagctttgttggatggttctaacgggaatggataaagcttgggttaggttgctggaggctagtaattgtcaggttatggatgcttggagagtggagaaaagagctggcgatttgagagcttggctgggaattttagaggctagacatatatgtactgcaggggctggagttttgattggaggaggggagtctatggaggaggttcgggatagtttccattactctaggaggcatgcttttgtgagggtctcagatctcttcctagaaggctctagattgtggaatgaagaactgatacgagaaagctttgatgaagaaggggcaatgtccattttgcgaattaggccattggcgacaagtgaagacatcacattttggaaagagacaaagtcagggatgtatacagttaaaagcgggtagtggataagtcaacaaagcagattcaagaatccaaatcgtgtttgggaaaagctttggcggtctaagattcatcaacggttaaagctcatcctttggaaagtgtggtccgatactcttccttcgaaacaatgattgggtttggttgataatacttgttctctctgtcatgtggcttcagaatctgttttacatctgtttgattcctgcagtgttgttcgagcggcttggtttcaaagtcgatggggaattcgactggaagattttcaatgggataccatcttggattttggagaatggtggtctcaagtgagggatgaggaacttcaactatttgctgcgtgtctctgtgaaacggtcttgcattggaagaataaggtaatatttaaaggttgcaccttctctctaacgggattgataaatgacatccgacacagagtaaaggagatggagttgagagatgttcctctggaagaggttgatcgggttgatctccatgacccgattgtggagaacttggatgacctgcaatgctatcactgtgatgcatctattcttgatgatgctgctggtgtggcggctgtggaagttgctgatccgaatgtgggtgattcttgggtggcttttgaatttcatatggtctctgggattcttgaaggggaattattggccattctgctagctctgaaagtggcttgagagcggggtgcaaggaagatcaaaatcctatcggattctaaggtggcaattatggctttgaacaatggctgtttgccttatgcttggggcacttatcctgtttttgaatcttgtctatgtgtttgtaagtgctttttgatcttgttatttttgctcattgccctcggtctttgaacggtgtggctgatgcggttgcgggctgggcgagatgtgccaagtcctgcactttgggtctgctcaaagatattgcaccttcggtagctttgagtttgtactagtttcttctgtttttcaataaagttgcttcttatcaaaaaaaaaaaaaaaaactcatcatgaacccgtgagttctgtgttgccatacaataatagataacttcatttgacacacgaatgctcgttatgcaataattccaggaattttattcgataacctcggaaggtttgtatgtataaaaatatcgagaggtttatacacaagttcaaacacatccacaatgatccagagacccgatatgtgagtaactcgaagtgaacccgtacgttcacccattactaggaattcgaacgaccaatgtacgattagagtatttgcacctgtttgaatattaattaagaacggttaaaaccactctttcatttaatttaggaacatttttattttaattaagtgtaattaatgttgcaactatcatgtgatgggttatgtaactgatgatcacttgctttctattcctagtgaaccacgaacgaccaatgtgcgattagattattcacacccgtttgatattaattaagaacagttataactgctcttccatttaatttaggaacgtttttattttaattaagtgtaattaatgttgcaacaatccatgggttatgtaattaattgatgatcacttgctttctatatataaatgaatgattcgatatgaataagactaatcacaatctcccttcaaaagtagactaagcagaccgagttatgactgaacaactataattttattgtgttctttacataatttgttatttatattctataacaatgaaatgagtaccaattaaattgtatagcacattatagcacattaaattttaagtattacttaccacagcttcccgtacgttcaccattccactccgaccacttcgatgtctggattgaatttttgaggaacgttcacgttgcaccttactcaattcctacaatgccaaaaaaatacattagatacatgtacttgtatttaagagtttatcttagtgttaatataattag

SEQ ID NO: 300172 - DNA, 9540 bp, Cannabis indica
atttctacatttttttttttaaaaacaagtgggcccaacgcccaaatccggaagtgaaaacatacgattcgaccacggacctgaatcctgatcggtaactgaatagttgccgatgccgatagtttcacgttatctatttatttatttattatatatcataaattattaaaaaatagtctctttcttctttcttcttcttcttcttcttcttcttcttacagggagggacacatggagcttctgtgtatacactgaaacgacaaggatagaagaaaccattctcactttcttttttttttcttctagcctaaatttttatcatatattatcgagacaattttctttggttctcgctaatggcgctctcggaggaggaatgctcttccgccaaatcccgatcgtcatcttccgcggcctcttccaccagcaatcactacctcgccaagtgcgtccttagaggaagtgtcgttcttcaagtcgtctatggtcgaatccgctctcctacctcactcgacgtcgttttcggcaaggtcattctcttcttccatttcctcattttctcttcttcttcaatcttgatttgtgatctttcttcttcttgttcttatggcattgttggagtataaatcgagtatctgaaatgaataaatggatatcagtgttttcactgagattatgaactttttaattgccaatatggtatagaaagttcttgtcttttctttgcggattgatcttcacacatagctatggatttaattcatatgccttggagctgcctttgtgtaattctgtattttcatgtatgttttcataactagctacggagttttttttttagctgaacagtggggtacttgtttacaaaaattgattcaggagacttctatagaacttgttgtaataggcgaagatgggatagtgcaatctgtgagcgagcaacctgtgtttggcaccattaaagaccttgccgttctgccctggaaagacaagttttcgcctcagaatccgcaggtttggattatttcaagtatatatggccgtcgtagtttgaaagagatatttgtgtacatcataataagttcttattggcagaagcttttactttcccttgtgaagatcataattatcccttttcttgttgtagatgctaggtaaagattttttactagttctttctgattctgggaagctctcggttctatctttttgtaatgaaatgcacaggtaatttttttttcttacttatttcttcatgttgttgtcttggtgaataactatttttgaactaattcttggtctgtgtggtatgtgtgactgttcgaatagattcttcccagtgacgcaagttcacctttcaaatcctggaaatttgagggatcaactcggaagattgcttgctgttgattccaggtgcaccactactctgcttattggatatttgtaaatgcttagagcatctccaattttttttttttttttagctaaaatagctaaagttaaaatagagagccaattttattattgttgctccaactatggtctttactatagttagtctttgattattttaataatattttataatttaaatttgttaaatataaattaatattataaaataatggaaaaataataagtttagcaaaaaagtagcgagctccctacatttagagagctctctatccattctctattatatagagccattttttgtatggttgtagcttattttttcaagtctaactcgctattttaactaaagagtgtgtttagagagcatgtttggagatgcttgtgattatagtgtagtttaatcatatatacatttttttttaacatttctttcaaatgtttgtccaatgccattatttatagaaattaaccaggtcgatttgagttcatgaactgattttgtaattgagagatatatctttatcttgtaattttttgttgaggtggacttcctgtttcccttctcacactaaactattatattcataatatattcctttcacaactaaaagaaaagaaggataggaaagacaatgaaaatttgaggagtttttgttgtccttattatttattttttttttattttactttacagtggatctttcattgctgcaagtgcctatgaagatcgattggctatgttctctgtttcagtatctgcaggctgtgatatcattgataaggttagtttttttctctcccactctttaaattttccaactactgtcttcttgtaaagagtgaacagttcctagcttccacaattatttgtgataacgtgctccactccctacattttcttgaaaacaaagttttcaaacaacaagattattaagttatgttaagctgttatttcagaaaataatttatcctcctgaaaatggaggagatgtaagcacagctagaagcattcaaaagaacaatataagcggtaccatatggggaatgtgctttatttcaaaagatccttatcagccaagtaaggggcataatcctgtacttgccgttcttttgaataggtattgcattgacgagtatttatgctattctctatggttgagcttttcttagtataaattctctcttttgtttatgtttatctaatttgaaaatatatataggagaaatgcagtccttaatgagcttctgttattggaatggaacattagagatgatgatgtttctttgttatcgcaatatgttgaagatggacctttggcatacgacattgttgaagttcctcattcctatggatatgccatcatgttcagggtgggtgatgcactcttaatggatcttagagatgctcttacaccctgttgtgtctatcgaacaaacttaaatttcttaccccatgcaattgaggagcagaatttcagtgaagagtcaataagggcacaacatgatgttgatgatgaaggtttgtttaatgttgctgcctgtgctttgctggagcttcgggattatgatcctatgtgtatagatagtgacaatagcaatataaagattagctacaaacatgcatgttcgtggagttgggaaccaggaaatactaaaaatccgagaatgatcttttgtctagacactggagaattttttctaattcaacttggctttgatttgggtggtcttagggttactcaatctgactgtctttacaaaggattacaatcaaaggcgcttttatgggttgaaggtggctttcttgctgctcttgttgagatgggggatggaatggttttgaaattggaagatgaaaagctgattcacaacagtcctattcaaaacattgcgccagtactggatatgtcaattgtagattaccatgatgagaaacatgatcaaatttttgcctgttgtggagtggtgccagagggttcgctaaggattattcaaagtggtattagtgtagaaaagctacttaggacagctcctatctatcaaggcataactggtacctggacagttcgaatgaaagttaccgatttgtaccattcttttcttgttctgtcatttgttgaagagaccagggtattatcagttggtttaagctttactgatgtgactgattcagttggtttccaaccagatgtttgtactttggcatgcggccttttgaacgatggattgctgatccagattcatcagcatgcagtaagaatttgtttgcccaccaaagttgcccactgtgatggagtctctttgccttctccagtttgtaagtcttggtttcctgaaaagatgaatatcaatttgggggctgttggagaaaatttaatagttgtctctacttccaacccttgtcttctattcattcttggggtcagaatgatatcagaatacaactatgaaatatatgaaatgcaacatctgaaactgaaatatgagttatcatgcatttccattcctcaaaagagttttgagcgcaaaagcacaaatcatcccatggacgtgggagatgagagttgtgtggcttctctttcaactgaagttgacatcagtaaatcttttgttgttggcacacataagccttcagtggaagttttgctttttgatcctgatgacggcctaagacatcttgcaattggaacgattgcacttacaaatataacgggaactactgtcagtggttgtgttcctcaagatgtaaggcttgtatttgttgatcggttttatgtcctttgtggacttagaaacgggatgctgcttcgatttgagtggcccattgcctcttcagttccaacatctgtattacccgactcttttgtttcagtggatatagattctgatttttctagcatgtcagcaccaaatagttttggtgtacaaagcaattatattgaattatctgagaagacagtgagcggggttccgattgatcttcagttgattgccattcgccgcattggcattacccctgttttcctaattcccttgagtggctcgcttaatgctgatataattgctctgagtgacagaccttggttgttgcacactgcaaggcatagtctctcctatacatctatttcatttcaatcttcaacacatgtaactcctgtatgctctgttgattgccctaagggtcttttgtttgtagcagagaacagtctacatttggtaagaaatctaatccattttattatgtgatgatgtggatattttgctttctttatcattgatagctggtactttctctgtttgttgaaaagtttgtttccattgaacagatgttttatagattgagcatcgaatatcatgctatcttcaactgctacaaaaattaattattcatttagtttctaaagagagcaatttagttggtttcatggtttattttctgctctggtatatgctcttggacggtcttttgttcttcctcttttggtttctcagttttattttctttcccttttgcggtggttactctgtaggttccttaagtttctggtgaatgtagaggtcaattggaaatttttgcaaatatgtaaactaaattgttatggtgttaacaaatatctaagttaactacttaatgatgtaagtactgtagttaccgatattattgtacaattaaaattgcggcatttcttactcttggtatcatgtatccagatttactgtgttcgagttatggactcatttcaagaaccaagttctgtactttttcctggatacctatagtggctgtttagttgaaggagtatattataggaactagaagttgatgatttagcaaccctttttcctgttttaagacttacttgttacttaagctgataaatgtctgcatcttgtgattctttaggtggagatgattcatagtaagaggcttaatgtgcagaaattcaatcttggaggcactcctcggaaggtcctatatcatagtgaaagcaggttattgcttgtgatgaggactgatttaccatatgattcatgttcatctgatatatgttgtgtggatcctattagtggggcagtaatctcatcttttaaatttgagcatggagaaacagggaaatccatgcagttagtaagggcagggaatgagcaggtcattgttgtcggaaccagtctatcttctggtccagccataatgcccagtggcgaggctgaaaggtgtaccattttccctctacttttccatttactttctctgcttgttccacgttgcatcacgaaaatgcttcacacattaagacttgttatttttcttaattaagttaacttttcaggaattagtttgggactatacaggcattattttataacttacatgtttgtttggattttatatccccccttttgtgtatagttccaaggaaatgtcatcctaacttgacttttctgaacagtacgaagggccgtcttattgttctgtgtcttgaacatgcgcagaactcagatagtggttcaatgactttctgttcaaaggcagggtcatcttctcaaagagcttcaccatttcgtgaagttgttgcatatgctacagaacagctatctagcagtagcctgtgcagtagcccagatgataatagctccgatggaattaaacttgaggaaactgaagcatggcagttacggttgtcatattcactcgcatggcctggaatggcacttgctatctgcccttatcttgagcgttattttttggcatctgccggtaatattgtaagtcactaaactctttcgttcttttaacttttctgttattttcaatgtgcaatttagcatatatgattgcaagtgcaaacgttctcacatcagatactaggatgagtgtggttttctgtgcaatttattggtgataaaaatatattaactgctctattatttcagttttatgtatgtgggttttcaaatgacaatacccgagtgaaaaaatatgcgatggggaggacaaggtttatgattacgtctctaacggcacacttcacaagaattgctgttggtgattgtcgtgatggagtcctctttttttcttatcaagagtaagtggaaaatttatttgccaattaaatttttgtttttattggatggattatctccttgccttctttcttagtttcttcagtcctccacacttctattcttagaaggtgctctcttgtttcctacctgaatataacaggatttagcctgcttgttatgcaatacttgtgttgagagtgctgcttctctttcttgtatggcaggatactaaaaaactggagcaactttactgtgatccatcccaaagactagttgctgattgtattctcaaggatgttgatactgctgttgtgtcagatcgtaagggcagcattgctgttctatcatgtacagatcacttagaaggtattagagccttgtaagcaattgcttcattttatggaaattatggaacttaaaattacaataatgtttgaaaatgaggcagtaacgtcgacggcacttagaagtttgaccttagatatcaaatttaggcatcagctcataaaagttggtaattattaggcatcagctcattatagttggtaattattaggcatcagctctactcggttgaaagggaaattaaattaatacacaaccttataatctttggtgaagtacagttggcgactacataaacatacgtgcaggtttggaaaacttagacatggttggtacagaggctagcatatctaaatttttatgaattatcaaatactaatgctatgtttggaagttggattttggtgagaaaagaaaaagatgaggaaaatgtagggaaaaaatgtggagaattaaaaaaaaatcaatttttcatggttggtatggaaattttgttgaatcaagtttttttccatacactttttcattctacaccgaacatgagaatttattctttttttatttattattattttttatttcactttttatttttcctacattttcctcacatttttcatttcccaccaaaatccaacttccaaacagaggataaagaaatttcaattactatatggtgtaactcttgggagattttgccttcatcattaagatgtggggcaatgtggaggatctctttgaaaccatgagtgggaactttcaacttagtttttctgccccatttgtcattttgtttgttgctcatgttttccagtttgaatgaatatatcttaatttttcaatggggtgccagataatgctagtccggagtgcaacttaacagtaagctgcgcctattatatgggtgagatagccatgagcatcaagaaggtacttgcttttgcacttccacattattttctttgtgaaatcatcaaattactttgcagtggaattcaagtatctaaatccaatttaatgcatgtaacttttagatctggtatcatataatcattgaaatttcaattagttacaactttggaaataattttgctactcctgaacatttattttctcacgttcgattttagggatcattttcgtacagacttccagcagatgatgtattgaatggtggtgacttgaagattgactctacacataatactattattgccagcactctgttaggaagtataataactttcattcctctgtcaaggtaagggacaatcatttcagctttcttgaggaataaataaatgcctatagaatgcaagaagtatagttgattaatattgtggatgttcggaaatatgttgaacatcttaaatatctaacaattcctaccttgatcaggactttgattactcattatctaattaattttgagttgatctaactgatataaacttcattttcctgcagagaagaatacgaactcttggaagctgtccaagctagattagtgattcatccattaactgctcctattcttggaaatgatcataatgagtttcgaagacgagaaaacccagtaagattagtggctaccattagtacattatatggtttgacatgctttcatggggtttgtcgaaaatgttatgcatgtaaattttttttatttattttttattcttttccttatgttatgaacttatgatcattactttcaccttgataaatgcatgggtttgtgtgtacatggattctaccctatgctcccactgaattattgtttcttgggtgtagaaacttcacaaaagcagttgtgtgtcataactaactgttgtatatgttgcacattggattcaaactaaattatcttttgcctaatgatcgtcgtatcaattgcagactggagtaccaaatatacttgacggtgatatgcttactcagttcttggaacttacaagtatgcaacaagaggctgtattattgtttcctcttggctcaagagatgctgtaagctcaagcatgaaatcatcgtcatcacctttacctatcaatcaggttgtacaacttctggagcgagttcattatgctctaaactaagtacatgtctccaacttgttctggagctatcgaaaatggcttcgacccaccaaccttgatggtcgtcagatcacttgtcatccaattttcccagcactgattcactgactatcaaagaaaaattccttatatataatcacttcacttggatgaagggagtggaggtactgatggtggagatagaaatgttcagagaacgtacttggttggttcttatttaaagtggagcaacaattgagtaaggtggggaagaaagtgtgaggggttaaggttttttaccatttgttccatgtaattaattgctgcgttggatttgtgttgttcctatttattgttgacatgccgtgtgggaagaaagttaaaaatcatcattccgtagagtaattgattcaacttttgttcttttttttaagccacaaataaagggtttatgtatcacttgccttgtagctaatgccatctgttgcaagcgacgaattttacagaaataggtaaaaaaaaaacttaaaaagttagattttataaatctggacaaaaaataatgataataataataatattaataatgcataggtggttagccaaaaattaaggggttttttttttatttttttt

SEQ ID NO: 300173 - DNA, 1073 bp, Cannabis indica
cacaggcccagctagagaactctctacttaaaactatcaaggttgcttctttagcaaggatcatctaggcagaaccttaggtgattgcccgtacagatcccaactatccaaaaatattgaatattctgagtagggtaattcagcataagaagatttttagagatacattccataaatgtttcagcatacatctcaatcaaatccgtgattttgtaggattgacttgcatcgacaagaaataacaggaaaccttcatagtttccttttttagtttaatctgtttttgggaaaccaaattattgtattttttccctataaatagtggagccattccattagacacagacccaaaattatattgttttagatagctcttatactatcaaacaattgtaagcttttttttgagaattattaagaaacgcacttggtcagctccttgtgatcttattaattctttgaaataatacaagataaatgagagtaggctatttccatgatcacgtggtcgacctttataaatcatgtattcttatttgcttaattatattatttattatccattatctccttgcattgattgactcggtgttgttggctaatttaaaaatacttaaaaacttaataaattaataattaaaaagtcaagaactaatttttttttacttataactatggtaaaataactctattaatattttgtagagttatcattaatttttggagctcaaatcgtgttcgttggattgtttttaagctttttgtagtataaatttgcacttcacttggggaagaatttttgacttgatatatttagaaatgcattattagtatgcgatatgtttagaaagaacttgaaaatagctttcaaacataactcgattaacaccaatcaaataaatattgagtgtgttacgactgttttactaaaggttgtttagtaacaggtacccaagttgacatccatcgcccaagttgacatccagtcccgaggttgacatttcgacgtcaacctggatgatgtatgaatgagaaaatatgtcaaacttgtatttttttttatgcctaagtga

SEQ ID NO: 300174 - DNA, 1732 bp, Cannabis indica
ttccaaaccctgatgtcgttttttatttttattagggatgatacaacaacaaggtcaaaaaaaaaaaaaaaaagaaagaaaagggtcacttgttttagaatacaacaaaaaggtcgttttggatatgtgggagaaggtaggtagcattggtcaaccgaacttgccttgggtcatattaggtgactttaatgccatgttctcgtagcaaggcagaaatgggggaagacaaattcaaccaaagacacagaggatgctcaaaattagctagccatgggccaagtcggggaatataattgttcgggagtctattttacgttggtcaaacaagcatgaggttggtgaacttatttttctaaacttgacaggatctttgttagaaattggctggatgtttttcctaaaactgatgcttatttcaagtgggataatgcttcggatcataactactgtattatccgtagccatgaacacaacaatgtgagatataaagtctttagattttgtaactattgggctaatattcctaatttcaagcattgtgtgttaagcacctggagtattccaacaacgaggaaaggattagatggaataatgcagcagctttctcgtgttagacaggggttaaaaaaaatcagcaggtatgaggtgggtgatagaaataccgtgaagctaaggagaattacagtagaattcaaggagaagctgcctcgaatccaactgatgtaaaccttcagcaggctgcctcagaccagttgcagcagcttcaacagttgcagaagaattactccagttttgtcattcagcagagtaagataatttgggtcaagttttgtgacgaaaattcaagtttcttccatgttgccatgaggaaaaggaagctcgaaaacagaataactacctttactaaaggtaacactattgaagatgattttgacaaggtgaagaatcattttatatctcattttaagcaattcatgggtagcagaagtttggctaccagcagaatagataaagagagtataaaacagggtacttgtctcaatttgatgcagcaggtgaatctcatcaggccttttagtaagagtgatgtgaaaaaagctatctttagcattcactcctctaaaagccctagtttggatggattgggtcgagtttttttaaagatctttggagggatattggtgatgatatatctaaggctgtttttgatttctttcaaaatggaagaatgcctgagagcttgaatggaacagtgatttctttaattctaaaggtggccaacccgaagtcagctagtgattataggccaattgcctgctgtaaataaaatatacaaatgcatttcaaaaattatttgtacaaggctttcggaagtgctcacttctcttgtccaaagaaaccaaggggcttttgtgaaaaacagacttcttgcacataacattatgatttttcaagatctccttaaaggttactcgaggaaaaacatttcagcgagatgcattatgaagattgacctaagcaaggcctatgatacggttaactggttgtttgttgaagatttgttgaagctcttttgttttccctctcgtttcatcagttggataatgacttgtttgaagggaacctgtgacagtcaatagttccgtgatccgtaaagggatataccgagtaagttgtgcaatcccacactgcctagggaaggtcaagtgggatgattctgagactgtgtagg

SEQ ID NO: 300175 - DNA, 739 bp, Cannabis indica
aagtacggctccaagtttgaaaaaaaaaaaatcgatttgcaataattttttttttttagctccaaaggggaaaatgataagattggtcaaagagtattaggctttacattctgtcatcaaaacttacagaatatagactagctacctttctagtatctctcacaattcaaactttggaacattatttcaaaccttttctattggaactttgttgatttgtttctctcaaactaacgttgccttaaagggtgggcaatattaatgcatgcaccgtgaaatatgaaaattactgcatacaattttaaaacttgtaacatcatttcaaattttaatgatgttttcagtaatattctatgaaaatatttaatataaacatggttagacataagaatcatgaaaattgatacttcagtatagcatagtttaaacttagctacatatagtttttctactaaaatagtaatttttaatttaaatgctccagctttgctccattaaaataaataactaatatatagtacatatgattttatagtaataaatcttacttgtttatgtttagaagtaagtctataattattaggtagtataattattaaagtagtaattataaatttagtaattatattatattttaaaatataaaatatgtataattatgagatgacaattagatatgcattcataataaggaaatttacatgctatactaacttttgctattttttttacaaaaata

SEQ ID NO: 300176 - DNA, 1904 bp, Cannabis indica
aaaataatttccaacagttggtggggccaatgtatggtgtgaatatatgggagagataaatagtagtggtgttgtggttatggcttttatctggttcagaagataaatagtgggacatggttgctatattcaccttggtagggtcggcaaaatgagtggtagtggcagtgtttgtagtggagatagtaaaggtttgtgaaggcatcagaatttggtggtaagatggcattcgagttgtgttgattaatgcttgaaaaaccagtagcaacaacatttaaaccagtagaagtggtttggtgagagtgattgggttgtgaaggaaaggtgtttagggtgttgataggtagtaaagttgcgggtctagattgagtggaagtgctaacattaccagcattgtttctcggagtaggagcaggagcagtacaagattctcctctaaaaagagttggtggttgcggatgagagttagaacccaatttggagatagaagatactatggctttgcacgcaaaacgagtaacaaaaggccaggcattgctcttagagaaatcagttcggtatttattgtaatcagtcgttggtaaccttgcaccattcatccacgacccatataacatatcatcatcattgccattatccattctttccatgaacgccaaacacttttcaaaaggatgcccaatttttccacattcaaaacaaaattctggtagacgctcatatctaaaatcaatccaaaattcatcattgatttgaggtaaactaatcattcactctctaagcagcggtttgtccaccaacagtttaacctgaattctaaaaaaaggaccacatccctcatcaagtgattcctcatgaacattaacaaattcaccaatgatatcacccaaagcattagcaaggagtttggaattactaaggaaaggtaaacgatacacttgaacccaaaaagaagtggtattgaaagtgttggctattgcattttgcagagcatctggtgtgcagaaaaccactagatgattttgaaagtgccacggttctttgttcatgaccctgaagcgatctccttcacatccaaaggtgactttgaaatactcctccctatattcagtaattgtgacaggaaaacggccattccaatggttggacatttggtcaataaaagttggtttgtgaacatggttttgggtgatgactctagcaagtagagtatgatttggcatgggagaggagggtatcacatcttcatgaagaaggaaaactgaactctcctcttctgtgagatttaggttcaattcgatggagcgtaataaagggtccatggttgaagatgacaaaggagcagtagtaagcgtcggatagtgattcggaaagcaagtagtttgaagaaagaatagcacagaagagaggaactgacaagatcatgggagggaaaggaagaaccttttgaaaggtagttagaaatccaaaataaacggttaaaaagcataattcatatactaacacgtggtgccaagcacatagtacttcactagttaatgtataatatctctcgagataatagtcatataagactcaaagatgtgcgtaatattggttcattgtaacattattctacaacaaataaaaaataaaaggcattaacatattatttgatatttgtacagtattatagctcaacatatgtacacagtttacatatataataaggtgcacatttacacccaaaaacccacactgacacaacaaatccacccggcccaaaacccaaacaaaataggtttcaattttagtagatcgaatttgggtgtaactcaattctgtattgggtcggatttggatttaatatttttaaaaattcaaaactcgaaatccaattacaactatttatttattttttatgt

SEQ ID NO: 300177 - DNA, 1181 bp, Cannabis indica
gagagtgagaagagtaagagttaaggagggaaaataaataaaagggtattttggatagttttggaaaataatggaattaatttatataaattagtagagggtataaattttaaaatagagtattttattagggtcaattaataaaatttccctttgataatatatattgttgtaaattttccttaataattttatagtgcgccgtatatattagtttcatcatcaccactttgattagtgtaatttaggagcaagtgtcacataacttattttaaactacggataaaatgattaaattttaaagttcccaaatgtttgaaagtgtgagtgattatttcaaatggtcactttacacgtatacataaataagtagggggtcttttgtcataatggcctcatggatattgaaaagatggaactaaaaatacagaagtaaaatatgggactatatttatatccaaaaataaagtgagagggaaagaaagtatgaacaaatttgtccaattattattattattattcactaaacatgggaatataccattttcactttatattgattgaagttaccacagtaagatcttaaagtgtaacatatattacataggttactgtgtttaggtgtcattagtttctactccataaatcaaacatagaaaaagttagaaaatttataaggttattagatatttatgtgtaagtatataaagcttatttgattggatagaaaggttatatattactgtatatctgttcttttgccgtggcaagggcctctctcaaaagaggaacattgctattttttcatagtatttctccgagggactttgagtaaactccttaacattttaaaatctagctctttttttctttttggtcaaaatcgactttgcaatttactatctttttaattgcaatttgcaattaactattaatatgattgtatatacatatgattacaagaataatcttgagggtattatgaatcatcgacaatatggattgaatatcactagcttaaaatatataaatggaacatttattaatgagtattacctattgatgaatactaaacaaatttaattataaatattaattttaaaaatattaaattattaaattttagtccaatagcgaataataaaagataaatttaaatttttatgcttaatttaggtact

SEQ ID NO: 300178 - DNA, 4019 bp, Cannabis indica
ttataaattaatttataataatagactaacagtttaaataaaatcataatttaattaagaactttattaattatttgaaatataatatttatttttggcattgtaatttatttagggttgggatccccttttaaaagtttacaaaagatattgttacaattttactacaaaatacatatatatatatattcatcaaaggcaccataaaataaaattccaataactcgacactacaatccagatgagttgatacgtacatttgtcgaagaagacctctaactcatagcaaccctaactcgtttttctcttacatgcaccacaaaataccgatgagtcacaaagactcagtaagaaaagtaaacataaacaatagacatcagaacatagacataaatagatatgttcatataatcaaaatcaagtattacatatttaatccataatccaaaaatcacaccatccaataaaaaataattaaaacaaatatttgtctaataagacaaactaaagttttgatcaagaaggaatgaaatcttcattaatcacaaactctttacaaccaacaatacaataccagcagccaaacaaagctacttacaaatcctctttatatacattttctcataatcttttagtttcctatttttcatgtattgtaacctgtacattacaactctttgcacatcattaacaatagctctagctgtaaaagagtaagcattgtaaacacatctatttcaattaatccaaatgttataaatcacagcaacaagaataacaatatttactctttacttcccattctttgactgcctagccaaccagcatctccatccttcaaaatccagcggccacaccttgttgcctacccagttctgcaccagtaaatttacttctctcgacagccagcagttgaaaaataggtgttgttgcatttccttagccagcccacaaaccgggcattctgtagtttccaactcaacatgaaattgaccgagtttatctcgagtcaagagctggatattaacaacttgccacaagatgaactgatgtttggggatgtttaaagagcttcaaacactgttgctatagtggaatggctcctggtgtaagaggctgttatacaaccagttagtcttgaatttcccactagctcctgcagcttgtatgtccctttccaagaacttatctctcaaatgacataacttcttccaataccatctagtatcaagtttaagatcataggaccaaatagaatcatttttcatatatacactattgatccatttcacccaaagagtatctcttttggttgaaatggcccaaatgtatttagcaagattagcttgattccatttaattccttccttaaatcccaaacccccataggcttttgggaggcaaactttttcccaagacgcaacatgaatcttgctacgattgccatttagcccccaaaggaaacctctacaaagtttttccacctcctttgtgacactatgaggaagaacaaaaatgctcattcagtaattacgaagtccaagcaatactgagtgattgagctctgcccgcaaaagacagatgtctgctaccccaagtgctcaatctctgcttgatcttcttaataattcccccacaatcttttgctctccattctgatggtcttaaaggaaccccaagttactttagaggaaaggacccctccaaaagagccatctctctaaggatcttttgcttctcttctcctcctactcctccaaaatagatttgggatttgttggtattaataaaaagacctgttgtagcactgaattcatcaagaatctctttgagcacctgaaccgattgcttatttcctttgctaaaaagcatcaggtcatcaacaaaacaaagacttataattttcaagcttttgcacattgggtggaacctataagcagacttatttgcagccaaaaacaatcttctagtgagatattccatgataagcacaaataaaagaggagataaatgatcaccttgtctgagccctttttcatctttgaagctgccttgaactcttccattcatcatgatagaataagtagtagcccgaatacaagtcatcatgatagaataagtagtagcccgaagacaaactaaagttgttacttaataaagtaatcattactcattgttgccttaagacagcctaaataccattttctagcgagaaaacttatgtcactatccttgcttaatgagacaaccgataagtaagaaacctaacaacagtttcaaattagagtagtgactctttcttatattgttgcataatgagacaaccaatagagtaataactctttcttataaacgataattatcgaatcatatattgacatgctatgtggtatagttatacttttcttacctcaagtccaaattcaagcatatcgttcaacttgagtggaaatcgttcgacgattcgagccttatgccacaatagcagtaaatcgataaataacttgctttaatatattctagaacttaaactcaaaactaaaaaattttctattaacaaatagcgtggtaatactctaaatatggacaaaacacaaaaatcgaggtactcaaaactggtctcatccagttaattggatccaaaatggttgaatagatttccaagtgcatactagaccatctggttaaccgaatcatgaaccagtaaaacggttggtattaggaaagcaaaactcaaaattttaaaactacaatctactcccacctgtttaaaaattaaaataaaccttcagagcagttcaaacactcatttaaaatttatccatgaactcataagctaaaaaatacgtgaaaaatatatttccaccgttaaagctcaaattttgagtattgaaaactcaagcttgaatctctcaacaacaacctaaccacagcaaccagatctcaaatctaaactaaataaccataaaaatcaaattctaaactagcgcgaaaataactagacctaaaattatcaaaaatacctcaaaaacctaactaaaaactttgaaaaataagaaaataaactaaaggaacttaccacaatcttgagttgctcctaggattgactacttgataagaattggatagaaaaatagataaaattcatggcttttctctagttttatttaggttgaaagaaagagagaaagggagaaagatatgactttgatttttttgcattttagctttcttacagaattctatctaccttatctatcaaataaaataataataatactaataataaatagtaaaggataataaaaaaataattcatgtaaacctatttaactaaaatttgacaaattactattttgccctccaacacaccattatactaaaataaactctaaaggtaaatttgtcactaatagatagcccacttaaccccaaaattcccaatataaaaaataaactcccagtaccacaacaatacccactaataccactatgacatttggccaactgttatcttagtttttacccacataatgtggcatgtctatataggcatgattgatgccacgtggagtacaacctgacagtatcatcatgcacaacttacaagttgacgaagagtccaaatattcaagcatgaaaaagatacaacaaaatggttgacgatgagggtctggctggaccacccttggcttgccacaaagtagcatgcgttggccagcctacaacaaagggtaggtcggccagctttcatgttggcagccacaattgatgtttttgcagctttcaccctggatagacaattgctcacttttagctacaaatccattccaacaacccacgaaagtatgagttcaacttcagatatttctctgttctttaggagcaattaatgggttatttttttgtttatttaatatgtgaaaaagaggtgatatctccttattttaagggatattaacctactttggtttagatcttctataagctctcatttatataaagtgttggaaattatt

SEQ ID NO: 300179 - DNA, 4450 bp, Cannabis indica
tgtttctttattgatgttaaataaaatcgattacattgaaatggagttttatttagggcataaaacccaacaaagatttgccgattgaggtgttcaaaccgggcaccagtgggggtgtgataagggccaggcataagagagggactcgggaaacttgtaactcattattgagaagaaattcaggagttaaaacaaggaggagcagagttctaaaccgagacaacaatggaggtaactcattgaatttagatgaagttcttgctcaatgcattgatgtttcaatcacctatgtgcaaaatttgggaatggcgaggaggcggccaatgtcatgcccccaccttcgccatgaggtgcctagcgtggaattttcgcggtctccggagaccggcggcggagagagccttaaaaaagctctctcgaggggaggggtttgatgtaattttcttgatggaaactaaaattgacaaggatttaatggtggaaacaatcactagattaggttaccataattgtgagtgtatatcttctatgggaacggctggaggcttttgtgtcgcgtggaagaaaggctttcagcttcgagttcggcacaagtttaatgcgggatttgaatttagtattgtagaaaatcacgtggttccctggtctctttttctgatttatgggacgccttatggaagggaaaagagagctttctggcaatggctctctgaaacggtgaatagaggtgataccaactgggtggtttgtggggatctaaatgtcattgctaatgctgaagaaaagaggggaggccgtgaataccatgatcgagaaggatttcatgtcggatacggaaggagtagaccttggtttcataggaccaaggtatacttggatgcgatcgaagggtccaaataatagggtgaggaagcggcttgacagggccttagcaagtgcggactggtgtgtaaattttcctgaggctacggttgtgaatcaccctattctggcctctgatcatgccctggtggttttggattggcaaccaatgactcaaaaactgaagtatcctttccggttcttagaggtgtggacagctgatcccggatgtaaagatgttatacagaacgcttggaaaggaatttgtcatggccaaccgagtttcagggtgtgcgggaaacttgcaagaacaaaagaggcgctcaaggattggaataggaatgtttttgggttctgtgatgtgcaattaagaagattgtatgcaaagttaagtgatctccaaatgcaacatactgattcggctagcgttgaagaagctgaggtgcaattggacattcttagcttggaacaaaagatggagaggatttggaagcagaaatcaagagagctttgggtttcgcaaggcgactgcaactctaagttctttcacacttctactatgattcaaagacggagaaacaatattcaagccatcaaggatggcagccgatggatctttgaaagaaaggaaatgagtgattattttataaggaacttcagtgcactctttgaaagccaacatccgtgcattgaggatgattttgatactctttttgaaggtcaggtaacagaagaggataatgtagacctttgccgtgtttccacatgtgaagaaatcaagagagtggtttggaaactgaaccctttgaaagctctgggaccggatggattctctggcattttctataggaaatactgggaaacggttggagaagatatatgtgggatggtgcaagattttttccgaagtgggagatttgtgggaaaacttagccacaccttcttatgtctcataccaaaaactgacaatccgtattcctttgaccatttccgtccaataagcctttgcaattttagctacaaggttattgcgaggataatcactgatagactgaagctggtgttggacaaattggtcagccccctgcagtcggctttcttgccagggagatggatagcggagtgttctgatcttgcggcggaagcaatccatactctcaacaagattcgaagtaaccggggtttcatggcggtcaaaacggacatgcacaaagcgtatgatagaattgaatggagtttcctgcagcgtgtcctcaaagcaaacagatttaatgagcagttctgcaacttaatctcccagtgtgacgacggtgacattctcgatcctgctaaacggggctcctctgaaatctttcgctcccggaaggggtctacgacagggtgatcctttatcaccgtaccttttcattctttgtagtgaagttctttccaagttaatgaaccgtgcagaagctggaagacagatttcggggatcaaagttggtaagagttctcagcccataactcacttgttctatgccgatgacgcaattttcttctgtacagcgacagtgtctgaagctcaatagctgggaaaatgcattgagaagtacgagagatggtcaggacagaaagttaacaggcgcaaaagtagtatggtgtgttccccgagggtgaagacgacgagaaagcaaacattcaagggttgcttaacattaatatgctggataaaaaagagagatatttggggaatccctttttctactcggctaggagaagggatgatttcaaatatttaaaagacaaactcttggctcggttggaagggtggaaagccaagcatttgtcgatagcagggaggcaaacccttattaactcggtgatgcagagtatcccgggttatgcaatgtcaaccatgaaaattccggtgtccgtttgtgctgaaatggatagcattgttgctcgtttttggtggaagggatcagcgtttcaagggaatcggtatttagctctgaaaagctgggcggactactgtcaacctaagaggaatgggggtctcggtttcagaagatttaaagacatgaacgtagcgttgttggcaaagttggcatggcagatgcttgatggggagagaagtactagaccatgggttcaagttctttatgcaaagtactgctctattcaagacttctggtgtgtccaagaaaaacaatcggattcgagagtttggcggggcattctgagtacccgtgatttgtgtgtgcaaaatgctggaattctggtgggaaatggaaaaattgacatctggtgtaggccgtgggttccagggatcaatcctgtggaggttcgcaatgccttttcctataatgttactcatgccttttcgtcggtgtcagattttttcatacctgggacactaagatggaatgagagcctcattactcggtgtttttcgatgcaagttgatgaagctatattacgcatccgaccacttgctgggaaggaagatactctgttctggaggggcaacagccaaggcaacttctcggtcaagaatgcctattggaatgcgtaaaagtatagatttcatgaagagaaaagggtttggaaatgtctctagatgctaaggattcatgcgaggcaaaagacattgttttggaggattttgagtggctgtctgcccatcaaaagccgtctgggggggtttctgaatactgatacatgttgcgctttgtgtggtgatgatgttgaatcagatgtacacttgtttagagactgccattttgctcgtggcctatggttctcttgcccgtggggtccttgcagtagtggacttgggaatttaaacttggaggattggttcttatggttgttcgatacaaggaacgagttgatgatattatatggagcttgcatcattgaacacatttggaattgccgaaatgaagtcattttcagaggagctaaagcaaacatggctgcttcagtaaaaattatactccagcggttcaatgagtttcgatcggagctcctagaggctgacgaacctgtgaacactccttcagatgctcctcgttccaatctggtggatggttgcaggtttagggtggatgcatcgatcctcgatggtctggctgggttaggtgatgttcaagttgatgcagagcccgatgaagcaagtgtgttgctgcactttacggcagtggacagtgttctcgaagcagaactgcgcgccattctcagcgtcttgacatgggcaagggaaaaggaacgcaattctgttttcattgaatctgattctctcatagcagtaaaggctttaaactctaatgttctgccttatgcttggggttcgtatccggtttttcatgaatgttgtgccctgttgcctctgtttcaaaattgtgtgttttcatttattcctcgtttggataactctgtagctgatgctcttgcgtgttatgctagagtgtctcgtgtgagtgcgagttgtgtgctaagggatgtagccccctttgtggctactatgtgagtttgtttttctttcaataaaagaccttaattacaaaaaaaaaaaaggtcgacaaatatatagtttctgcaaaaattt

SEQ ID NO: 300180 - DNA, 4867 bp, Cannabis indica
caaccttggcaatccatggaaagaatccttccttcaactcgcggcatagcaacacagcatattacaagctgtagctttttcctccaacacgctagtcttgattccaattcgttagtcccaagagtaattgtttccatactgtaataaaacaaaataaatagaaaaaaaagaatttaggaaatagcaatctaaagaaaaaatagaaagaaaataaaagttacaagagagaaacatatcaacattatcacaatactacatcatcacatgatattcacaatacaaaatgttaacagtgccttaaaaacagggagtctagctccatatactaagtcgaaaaactaagtaaacaatcctcccctcattttgaccacaccaccaaagctaaaaccctagataaaggcaggcctaaaaagaggtgagttttaaagactcttcatttcccaaacacatgaaagacagacaagtctgacacaaaaaaatcatgtttccattaataaatgtttaagataggccaagctgaagtgaagacaacgtgaatttatttcagcgaagacctgacaccctaataacctaccagaaagaatttcccacctgttgaagccccgtgcagcattatacaaaagcccctaaaattcagaagtatttcctaatccctccctatgttacgggttctccaaactgtacaggcctcataaagaattgccaatactcgcttgagaaaaaacaaagcatgcaaggatgtacagaactttggtaagccaacacaaacacattagactcaatgataaagtctactgtgacacaaaccttggactgtttacttagtgcaccccaaatgtgagcctaaaattgctttcgactataaggtacaagaccatcaacttggatgtagacacaaatatccatgaaatacaaataatccacatcccactacaatgtaacaggagagttggaatgtcaaaaagcaagacccgagtagggtgagaatcgacgagggaaaggagagaatcaagagaaacatatcattgcatggcaatgtggcaaaaattaaggacatattaacaattagaaatttcatttatgagtaatatcaggaaaaaaaaaaagtgagaaaacagagcagaaaattgtgagtgacctaattaagataattcactaacaaagaaaaaaaaaactgatgaaaaaatgacataaagtaagacctttcatcatcagagtctgcagcatcatcatccgaatctgcagaagtaatggttacatctggcttaagttgagcagactggagcaatggtggcattacgacagacatgtaaggaaggaaatcttgccctaagcacttgcagagtctagcccatgcctgtatcattatagtgataaatattatcgcacataataaattgatatgcaatgtttctcacagtttgaaagataaagaacatacttgtagcatataacttgtggttggatcatcagtctccagttgagaaccttgcaaagacatcagcacgtccataaccttgcacaacagaatacatcaggcttccaataattaaaaggtagcaaggaatcaaattcgggtgccccaaaattgttgccagtcactctaaagtagaacataaggtaaataaaactctgaaaattgactttaaagtataattgaaattatgttatccattaatgcggaaattttataaatttcaaaaacttatacagtacaagaaagaaaaatggtgactatggcatataaatgtaatggtgatgttatgagaaataataatacctgctttgcgtcatccctgaacttatcttttccaacagccataccaaccaaactaatgcactccatggatttggctcgtagcatgcggttggatttgtcagttgcattcaacagaatagttttcaggtaaggcataaccgcatcgtagtatttttggaaatgctcctagagattacataaacaattcaatattgagtaatccatcataaagaatttaatattgtagaattgtctgtaaaattacctgtgatgaatcagcaactgatgccaaagctgtcaaagctccctcttgcaccatttgtttcccattctatacaagacatacagtgttaagaattgcatattatattttaactttttatagggtaaaaaatactaagtatttctgtcgaagacccacctggagaagtacaagcagcttgcttacgattccatccaagtagggggttaagatatctggagtgcagttctcactgaagttgagcactgctgaagcagcatgagcctgtagatatacaaaatgcaaatttaacattgaaaatattcaacttgtttatattaacagaatcaaataaatgctcaaaattctcataaaaaaatgatacttaacttgtgtgcaaagttcatacagaaatgaaatcacatagaaaagacaacaaacaaagcaggtagaaaactaaagccaagaatgagtctctattttgactagcataataggacatggtcatgaacatctgaataaccatctaagcaacttagtactaacatgataacatcactaatgttcataagtaaaataaagtgcaatatgccattaactaaagcagaagctataagagcaaataaacatgagatttaaaccaaattcagcaagtcttgcgtaagtgtaacaaatgcacaggatggtgaatgacctgcactctaggattctgaaaatcgtccatggctgcagcaagtgctggcaacacctggggatgatatttaacttgcaaatctgggcccaaatcagtagataactgcccaatggcattgatggctgcccacctaacccggggatggggatcttggaacgagttcaagaccattgcaaccacttgctccaagttcttgatcattacctgaaacaacaaaaacatatatcagttaccaaaaaaatgctattgggcaaaaccttagctatacacaaacaaactaaatagcacaaaaaaaaaccaataccttttgacatccctcagcaatttgggccagcgcaatcaacgcagcatggtgattttgccactcaggagcggccaaataagcagacaactgctcggaagcaacagggacaatagtatttccacccaaagaaatcgaaagccggtccaaacactcctgtccaacactgtaattactagtttcaccagcatcctcatcctcagtctcagcactatgccaagccgggtcatcctcaatatccaaaagcattctcatcagaatggcaaacaatctgctaatgaactgaggcaacttcctcatcattccaggcgccctctccctagcctcggccaaagtaatgacaaattcaatagccaaatgtctagtcccttcctcaagggtgtcagcctcagcaatttgcaacatggacccaaccacatcagtaatctgcctcctcaaaaatctgggttcggttccagccaactcaatcaacaattcaagagcttcctgagctgtagcctcattgccattattcaaagcctcagtcaaagtcctcatcatagcaggcaacaaatcctgaaacctatcacggtcaccagaattggacaaacactgaatgaaattaatcacagcattcaaagcagcaatcttcacatcagaactcgaagaagaattcaaacagtgaagaaaaacagcgtgcaattccttaatatgagggacaagagagtctcctatgtactgagacaactgagcaaaaatcaaaaaggcagattcttgaagcttaggagaatcagacgaaacacattgaaacataaacggcaaaagttcaggccaaccattatctggcaaaatcccagaagcaagttccgaaaccgtatcacaaagcttcttagaaatcgacttagcctcctctcgctgaatacaagacaagagaatcgatttaagagaagcctgagtcgccggagtgagtcgaggccatagataagaatcatccctagtgagttgttttcggagcaaaatagcagacatagccctaccctctggatgaggagaaaactgaagaaggtgagcaagcttaagagaaagagaatcgggatcggtctgcttacagagattgaaaagaagctcagcctgagaacgttgctcgttggaagaagacatgagatgtgagatcagggtttcgaaaggggctgtgtcaggacccagaatcgccgccagttgggcttgttggagttgattcgactcgggttgtgccatctcgagtaatgggtggatatggcggcgaagagaagaaaacacagagagagagaaagaaagaaagggttttgattaaggtttttggctatggctgctaaaaggtttggactttctctctctcttttcttcttcttcttcttcgaatcgactctgtgaatttatatatgaaatttttcttactgaaagagaatgagaaaaaggggatattgattgattgattcaattcggctgtaaaagaaaataagggttttgatttttttgattttgggtatttagggcaacctaaaattttccccctttttttatttttttcccctaatttttgccaaatttgaagattttctccctttttattaatatttttcatatattgtaggctaattaagatttttttccccgaactttaacatgtaccaaatcatgccccatgaacttttttggccattaaaaattccctgaactattgagattgttagatttaaggacttttgtctaatttgagtaaaaaaatttaacatggatgaaagttcaagaggcatgatttagtacatatgaaagtttgagtggcatgatttggtagatatcaatgtctggggagcatggtttagtacataaacaatcactgaaacagtaaaa

SEQ ID NO: 300181 - DNA, 1659 bp, Cannabis indica
tatatgtctcaacaaacatatacagctattattacaatacctatactcttgggcgtgcacaaaatattttcctacaattatgatcctgatcatgctcaacaaagtagccactactaaatctaaacctgatttgaaagagtacggccaccatcgatagaccatggcaccttaataatttgttcaagtttaagtctgaatttacctttttcttttagggagaacgtataaaaatgtgaccaacacataaaagattcaaagccaaatgacaaaaccatcaaaaaaaaaaatgagacgaaaatgatatatttgttctatattcaaaccattaaaaaaaatttgcccagaatttgggtttacatgattccaagaaggtcaaaacgagccatctttaacaggactttatcctcaaaaacaacaatttgtgcccatgtcctaagtaagaccatataaaagacctcaaaccctaaaactcttgtgatgcagaaccaaattcaccctttcctttcccaactttcttaggcaagagagtttggtgaatgtttggcaaaacaccgccattagcaattgtaacagtccccaaaagcttgctcaactcctcgtcatttctcactgcgagttgtatatgtcttggcacgatacgattcttcttgttgtctcttgcagcgtttccagctagctccaaaacctgagaataattttttaaaaattaaataaacaaacagtgttgatcttgtactccgatcttataatgaacagtgttgatcataagccaatcaatgcaaatactttgcgaagaacaaatatggaagcaaatcaatccccatttgtatattgagaatccatttccaaaatcatttaccatcaatccgagttcacagaacatcatctctaaacctaggtgaataagcaaaacaatagaatccatacacaataataataacaataaataaagaccaaatcggaagtaaccgattaaaaagaacaaaatcaaatcagagaacaaaatcgatcaagagtgaaatacaaacctcagcagcaagatactcaagaacggcggaaaggtagaccggagcacctgcaccgactctctcggcatactttccgtttttaaggaatctggcgattcggccgacaggaaattggagaccggccttggaagacctggagacagatttggaggactttggcttgcctctgcctcctttggttgtagcggccgtactcatctttagggttttgctgtctggatcaaaatacaagtaaaccctaggaaatgtgatcgagcaagaagaacggcaagagagagaaaaagagacgtattgaagtgaaagtgagtgttctggaagaagacagtgtgtgcgtatttatacgaaggggtttggggaaagtgcagtagggcacaaatgatattattggtggatagccaaggacgtagatcgccaacctgtcaacatatttagtttttatttagaaaaagagggaaaattgttgtagggagggaacgagtgtagttttaaaactttgggtattatttctttcaatgaaatgacagccagtctagtggttcctaaactttatttatacggaggaatgctactcccattaatcaatcttctgttataatttcttaatcaatttttacgttcaaaaaatacatgt

SEQ ID NO: 300182 - DNA, 1243 bp, Cannabis indica
atcccgagtcttttgtataaatattttataagtttaattaaaaagcaaagattttaattaatcacgttttccataaacctcgttgattagcaacgagctgcacagcatgtttaaaaatcaagtaatacgcctatgttagttagggtgttacaccaatggtccaaacaaaccacgaaatcctgatcccccatgtccataaacatgtaagcccggtctccttcccctcgattcttccctctcatcccctttcaatttctctcttactggcattaatggagattcacgattgggcatgcttcaacgccggtcacctctccctctaaattcctccctctcgatttctctatctttggcatgaatggaggaccagacaagcttcaacggagatccgcgagtgacgaagatgatgaagtgggtaatgatgctttcagatctagtgcaaactttttttaatataaaaataatagatctgggaatgttgaaaaatgacttggagaaactggtctgtgtgaaattttttgtttatttctagttttatggagagggagtattacggtccattgggtgactttctctctttttttcatttaagtttgtctgggtgattttgaatggtttgttgatttaattgagtgacattatgctcttaaagttccattcatttgagatgcttcttggagtagtaattttgattggaacaattttaaatactattttgtgaattttattaactgtagtcgatttttttagtaaaaaatcaaaaaaatcaatctgtcctctaattacatatgacttcgagaatttcccattcgaaaattttgtttatcatttagtcggcggtggtgcctggaagcagtagtgactgagtagaaaaagaggaagaaagaagaaactaggtttttgttctttattattatttaaaacttttaaatttaattagtttatataattttaatattatttaaaaattgataaagtagagtgaggtggtttaattaacgatgtggattagttttattgagtttgaccaataagttattgacagttggcaatctatgtggcagttaacaccaaagtacttacggttgcaacaaaagtacaatagaaggtatttttaccgccaaaaaaataacttaggtatttaagcgcaacaacatataaaactgaggtattttcgccgcaaattactcaaataaaattcataaatttccaataagtaaaatgatataaaatagtaaaatat

SEQ ID NO: 300183 - DNA, 2203 bp, Cannabis indica
ccacaaatacaccatcgcctgtcaaatgtataaataagcataaacgtattagacactcttctcttcctgaaccatagattacagcaaagaatgatccgcctcaaaatttaaattttggacttcaacccaaaatttttggtggatcagtcaacctcccaatattttcatcaaatctacaagtggtataaaccagtttgatcaaccctcggactaacacaactagcctccctctagttgacactcaactgatcagtttctcataggcctccggtaatatgtgcctatactctccagcatggacaacctcagcgctcggccatgccagaaaataataatactatttctatcattcatagttgacttcttagatttctagctgaccaagctaaggaaagaaaccaaaggaaaggaaagagaagttgataaggaatttatataactgattatcaaagcttctgctcagtaggagaccaaactctataaaatatataggtttgcttgtattttctcagtgttattcaagaagttgtttttcttccctatctagttgcctgggtcaacaccatcattcccactccctctaccattttttgtgaaaattttatactactcaaccactaatatcactctctaatgcctgtatagtaacacgtctaaatgggaaaaacttacagcaaaacatacagatgaattcagggactttagaattaataccataatagatgactagaagatttctagaattggtagtgtcaagcaaacaaaaactaaccttgaagaaaagtctaaaatctttgccaagagtaatatcatgagccatcagcaacatattgttgattttaacacgaaatgaagctgcagcattgttaaccatttcctctgacaagactagctctggtaaactgtacagttgtctgttcgtttaaagaaaaagaaagacactaattaaaatgatcacaaacaacactttcacagaaaaattcttggaatgagaaccaattagtttcaccattaaggtgtttataagaaaagatagcgagtgaagcacatcatccttacttgtttctaagagcagcataattggcacgtagaaataacagtacgatcaaaatgagcaagacatctgaacaaattgacaagaatgatagtccagatcgttcaaagaggacccaagcaacagtggcaacaacaatgacaccaaaagaaacatgtcgtttcttccacaatagaacatcagcagctaaaatgggcaagagacataaagaaagaccaataataagtcaacgaaaaaagtaaactttttgaaaggtaatacgattgtagtctgtaatgtacagatcaaactaggctgtaattttggcatttaatcatctgggtgagagagaattttactgtataaccatttaagactcatgaaaacgccataaacaagcattaaattacatcaatcaaacaaaagaaagtccacaaacatatctccccataattgtttctttttttctttctttttttattttccttagcttggaaaacccagaatgccaaaagtcaagaaagcctcaaaaaaagaaaacaactgagacaattacttctattatcttaccaacagaatggtaaactgaggtttgttggcctaaggttggagaaggagaaggacaaaatgaagataaagaagggtaaggggtggccttccttccatctccgtctccatctccttctgtgttgattttacatattgaattttccatgaaatcaacccaagtcccagaattgtagaagttgaatttagggattttccaaagagtccgtagagaaattgaaaggacaatcagaattatacgagtttgatgattggaatggtaatgggatccacgaggttggaatgtagctgtgttttcttggagccgacagacaccgttgaaagttaaaacgacagaagtagcttcagcgctctcgtgtcgttcaaaatgaatgggccattgttttgggctgaaaacgggtgggagatgatctcgaactcaaggcccaattgggcttttgaaaggaattatttcacaaacacaagttcaaaaataccacttttattaatcaattaatcaaatttacctctacttttatatttaattaaaatatacatctttttatgtgtattgtacccaaaataccttgacatagaaaatcacatggagagtatcttgaagtg

SEQ ID NO: 300184 - DNA, 7814 bp, Cannabis indica
ttgaaaaaaaagaagaaaaaacatgagaagggcaatgacttttagaagctattccttcatgttatggctcatcttaatcatgtgtgtcacacaagctctgaattcatccttagcttcttcaaaaataacatgtctccatgaggagagatatactttgctgaaattaagggatgagtttgtgttgacacaacctttggatgatgagactctttcatcatatccaaagatgaaattttggaagggaaatgagtgttgcaattgggttggtgttaaatgcaacatgaaaactggccaagttgtaaggcttgatttgagcaacagttggcttaatggccatttcaggtcaaatagcagcctcttcaatttgcaccaccttcaaagtctcaaccttgcctacaacaactttaatttttccaagattccttcaagattttcccaactttcaaggttaacccatctcaatctctcttactcccatttttcagggcaagttcctaatgaaattacttggctcaacaatttggtttctcttgatctctctgctaactttgattatgatggtggaactactggaagtagttctttgtttattgagtctgcaaattttcataaaaacttttcacaattgcaagttcaagtgaatctttcttctataaatcctcaatctttgtcaaatttgtcctcattaacatctctatctcttataaactctgctttgcaaggtgacttcccaaccaatatttttcttttgcctaatatacaagtcattgttttgcaaaacaactataacctcaatggttttctcccaacatttaattctagcagcaatctagacacattggatctcttttccacaaaattttcgggacagatacccgattccattggcaatctcaagtctttgacatattttagtgtctctttttgctattttacaaggcctattccaccttccattggaaatctttccaaactgttctatatggacttctcatacaatagttttagtggtaaggttccaagtacaatgggtaatcttgtaaatctcatgtacatttatctagatcatgctggttgtacaggtgagctaccctcaacactaggaaacctcaaaaaattggtcttcttaaatattgttggaaatgaaataaatggtaaaattccaccatcactagtaaatctcactcaattaactactctgtctcttcactataatggtttgactggtgagttgccaccaggacttacaaacttaaccaagcttgagtccttaggtatgtcacataatgctttgagtggatccattccttcatctttgtttactatttcttctttgagtgaggtgcaactagatgagaaccaattcacaggtcctttaactattcacaatgtcacttcattcaacttgacttctctttctttaagtcaaaacaggttaagtggactaattcctaagtcattgttcaaattggagaacttgaattctctttcacttcattcaaacaacttcagtggtagagttgagttaggcatgttctcaaagctaagtaatcttcgctatctttttatttcgaataaccgtttttctgtaacatacttagattcaaattccactcttcccaaattattttctttaggtttggcttcatgtagcataagtagtacgtttccaaatttcttgaaaagccaagaggaattgcagtatttagatatgtccaacaacaaaattgaaggtgaaattcctaactggttcatcaacatgggagttgagaatttttatcgtttgaatctttctcacaactccctcactggttgggaaacaccccaatttattcttccatggaaactcttgagaattcttgatttaagtttcaacaagatgcaaggttctcttgtggtaccaccaatgtccacacaatacttcttcatgtcagaaaacaatataagtggaagaattcatcataggttttgttacttgactgagcttgttgtctttgatgtgtccaataatcgcctaagcggggccgttccaccatgcttgggaagcttgagcagagagctctccatgttgagtttgaaagggaacaatttcaatgggaaaatacctcacaaatttatggatggaaataagttgatgacattggacctcagccacaaccaattccaagacaaagttccaacatcactgatcaaatgtaaagcattagaggttattaatcttggacacaaccatttaagtgacaaatttccattttggctccaaaatcttccaaagttgcaagttcttgtactgcgttccaacaacttttctggccaaatatggcgtcccaacaagattgtagggtttgacatgttgcgaattgtcgacctttccttcaacaatttcaatggaaatttaccatcagactacttcaagaactggagagccattaatacagaaattcctagcacaaacaaatcaaagacagtgtacatggagcataaagaggactattatcagaactcagtgacagtgatgaataaaggttcagaaatggaactggtgaagatcttgacaatcttcacatctattgatctctcaaacaaccattttcatggtgacattccaagaagtgtaggatatcttccatcattgattgtgctcaatctttcaagtaacaactttgaaggccctgtcatgtcttccttgggaaatcttaaacaacttgaatcgttggatctctctaacaacaagctttttggtacaattcctcaagagttggagagtctcacattccttgcatatcttgacctttcaaaaaataaactcacagggccaatcccacaaggtggccaaattactacatttgaaaattcttcttttgaagggaatgtagatttatgtggccttcctttgtccaaaaaatgtggacaaaccactgatgacaaccccactactcaccaagaggaggaatctgatgagtttggttttacttggaaatctgtcatggctggttatgtatgcagctttgttgttggaatgattggtggacatttcatcatatcaaataaaccaaattggctcatcaaaatttatggaagaaagatttagtattgtggagtaatatgttgtatctatacctctttaattttacagtagttaattttttatgtgttctcttcgttttgatattttcttttggtagcatatacatatctcaaataatcaagaagaattctacttcgtttgctttgtgagaaattttgcctaatgatatcttataatatgatttagttaattgagtttggatatatttatagaaagcaaccatatataatgctatcaattttgtgtagtggtattggattggattgattagggacatctatttgaagaaattataattcgatttttttatacgaaatatcatatcccatcgaccacaataacaatcaagattagaagctcaatatgagctatgcacaagagagtcgcagcagcaaaacacacaacaagaaagattaaaagaataagatttattgagtttaatggagagtattacagagagagaacaaagtctatacaaggctactccaatgaatgaatgaggaactaactatttatataatttgaattaagacagaaaaatacaaacttgtaactaacatgacagttaacagaaataactgtcaactaatgttaactaacttctaactgtgtacaataattagcatgagatggatcacaccacaacaaatcctccttgatctgtttcatgccaatctgagaatcaacagagagttgaaaaagagtaagtggtctgataggaggagttagatgaattagatcaaggcagtgtttgaatttgaattgtgttactgccttgttgaacaaatctgtaggattgtggttggtgtgaattttatagacttgattgcttgagattacatctctaatgaagtgcatcttgatatctatatgcttggatctctaatgaagcattagccatacaacttctttaattgcctcagtaacaaccatatacttagcttatattgaggatagagataccaccttttgtagattttccttccaacctacacatcctccttgcattgtgaacacatatcctgggatggatcttcttgtgtctatgcatcctgtatagtctgagtctacatagcccgagatatcaacctatgtcttgtagcttttgttgtaggttaggcctagatcaagagtgccttcgatgcacctcattatccacttaagggcatcccagtgcttctctccaggttttgcaatgaacctactaacaatgctcattgcatatgctatgtctggccttgtacagaccatagcatacatcaaactttcaaccccattggcatagggcacataatccatgaattctctttccttttctgtcttggggacttgatctttacagtctgaagtgagctgctaaaggagttgacacaggttttgagttgtccattttaaatttctgtagtctctttctaaggtagtttccttgtgccaaagtcagtgatttaggtctgtttcttctaatttcaatgcataggattttcttagcttcacttaggtcttccatctcaaattctgaattgagcagtgactttatttctccaatttcactcttacttttccctattagcagtatgttatcaacatagagaagaagaaagagtgtgctattgaagtatacacatggatcatatgcacttttggtgaagccacttttcgtcacgaaatcatcaaatctgagattccactgtctttttgtttgtttcaaaccatacagagattttgcaacaaacagacattgtctttatcttcatcaaaatcttctggcatcttcatgcaaatggtctcatctagtttcccatgaaggaaggtagttttaacttccatttgctcaatttctagatcctcagaagcttctttggccatgattgctctaattgaggcttgttttacaacaggtgagaagatttcattgaaatctacttcttttatttgagtaaatcctttggccacaagtctggtcttgtacctcttgcaatcataactttatatcccctcatttcatctgaagatccacttgcaattggccaatttacacccctctggtaatctaacaacagtctaggtctcatttttcaccaatgattgtttttcctcgtcaattgcttgcaaccacttgtctctgttcttgcaattaacaacttcttcataagtggcaggttcaacattctcaatatcactgactatggttaaggcaataagcagtgtaatctgcaaagccaaatctagctggtgcccttgattctcttctgaccctatctctggcaatttgatagttgtcaagaggactatcttgagtttgacctatttcttctgcagaatcctatttatcatagtcacttgccttgccttctggtcttacctcaacttgtacttgtctagtctcaatgctaatttcagctttgtcttctggtttcatgaccatcactttctcattgaagactacatctctatgcatttcttgaacccttcttctaagcaccatagtttgtatcctttaaatccatcatgataacctagaaacatacactttattgctctaggctgcaatttgtcatatttgacatgaacataagcaattcatccaaacactgtcagattatctagacttggagcttgacctgtccatatctcttgtggagttttgaatttaattgcagcagatgaactcctattgactaaatagcaagcgttttaacagcttctccccaaaacttttttttctaaaccaacacccttcaacatacataccattttaataagaattctgttcatcctctcagctaagccattttgttgcggagtccttggtgctgatttgtgtcttctaatcccaacttctctacaatagtttgaaaattgtgtaaaatagaattccaaacattgtatgtccttagtttcttaactttctttccaaattgattctccagcagagttttccaatccttgaaggttttgaaagcttcatctttggttttgagcaagtgcacccatacctttcttgagtaattatctacaatactcagaaagtagttaaatcctctcaaacttgacatgcacctttgagggaccccagaggtctgaatgtatgtacccaaggttctttggtggtgtgtttgcgagtgctgaatttatgtatgtagcatttttcataaacacattcttcacagaaatcaagtttaccaccaagttttcctttgagaattccttgtttttctaactccagcaggcccctttggctcacatgactaagcctaatgtgtcacagtttagttttatcaaattcttgattagatgagatagtattgacacatccagttattgtttcaccaatcatgatatagaaactatttctgaattcccctttaataaccaattagaatctttcaaaaccttaagagacttaccatcaatttcaaccttacaacccttctcagttagtacaccaatagacaataaatttctttttaggtgtggtacataccttacattttgaatcatccttttgactccatcatatattttgagcatcattgaaacaatttcatagatttgacaggctttgttatcacctagaagtactgttcctccttttattttttaagatcattgaacatttctttaatggacacatatgaaaagagcatcctgaatcaagaacccactcatgaccagaatctacatttgaggccactaaaatttgaaaattcataggcatctgctacaacacaagcttctcccttctcattatttttcttgttgtctctcttgagtttagcttttagagccaaactttcacctcaaaaatggccttcctttttacagtaaaaacacttactgtctgtaactccccttgtcatcttttgattttgatttttggtttcctttatagctccccttttggtttttggaatctttcttttgtgacgttcctctagtaaacaagccttcacccttgtcaccttgattgtcctctatcttcttttgaatttccttggaatttagagaagccttacttcagacattgtaagagtttctttaccatattgcattgtatcaaaaaaaatactcataagatattggcaaagaacttaatagtatgatggctagatcttattatctaattttactccactgttgcagagatcgagagtgattttgttgaattcatctaagtgattcctcaagtctttcccttcatccattctaaaagtacacattctcttcttcaaatatagtttattagccagggacttcttcatgtatatggagctgagcttgttccacaaccctaaagctcttggagattattttactaggagctagatttactatccagtatgttatttaacatcctaaatatgaattatctaaaataatggaattaaacacatataaaactcaagaaaccttacattgattgcagcataattaaatgtctccttccacttagatctctaacccgtgttcctttctgtcgcagagtattatcaagatctaagcttgattctccttcaggtgttgggttcttcacagtcttacacaatatgattgagtactagacttgctatatgtgggcacgtactctatcactatgaggctcgaaaattgaagagaaagagaaagagaaggattcaaaaattctatagaaggagttctcaagtttgtagttgtttgacagagaatgaaaactagaatgacacgttggatagaatgaaaaccatct

SEQ ID NO: 300185 - DNA, 1722 bp, Cannabis indica
ttaatgggccggcccaaagtattttttgtaattttttttttcttttttgtatttttctgttttttccctttcttttatttataaaaacttttgctattaaaatataatgttatgattttctttttcatagattatttttaataataacctacataaaaaaatataatgattatattatattatttttcatgtaattataaaataatgacccttatctatgtgtatagcaaactatataggaatattattattattattatcattattattattatatatctatataaaaataatttatcaatatggctttctgtattttatttaaaaagaaatatctacctacttttagtcaaaataaaaatcctataataaagattttaaaaaagaaaaaccctaaattattgtttacaaataaaaaaaattcaaaattaaaacactaaatagtttccaaactatattgatttggaaactatttcacttttaacaacattatttactattccccagtatacatatattattatttataaatataaatctatacacgtacatgcttgtgacatgacaaacagtgtcattagaaaatgaacaatcgcacgtattagtggaaaaatagagagagaaagaaaactcttttcattattctcgattgggaaatacaatggctagctcacgtccttatatagatgaggagttgatacaacagtgtaacaaaaataacaaccaaacaaataacagaattaacggtctaagagcttacttcaagatgaagtgtaaagatttttgacactcatcttggcaatgagtacttcatgacactgagcagggaagagtggcttggtgagaatgtctacaatgttggatttcgatggaacgtgattagttttgatgaattgttaattttttgtcgaataaggtgacaatcaattttcacatgtttagtgcgttcatggtatactggattctctaatatgtggagggaagcattgttgtcacaaaacagagtcaatggaagtctgatgttgatgctgaaatcttgaatgagggaatggtgccaagttaactcacaagttgcattggccatggctctgtattcagcttcgactaatgatcatgacactgtttgctgctttttgaatttctagaagatgagtgattgtccaaggaagatgcagtatccttatattgatcatcttgtgtctaaacacgctccccaattcgcatctgcgaaggcttaaagatgaagtggttcagaacatgtggcatagaaatataacccctatcatagaatgccttttaagtgttggaagatgcagttggctggtttaggttagtttcccttggtgcttgtaggtactggctagtttgttgacaacaaatgaaatgttaggtctctagtgttggtgagatagatgagcttccttataaggctatgatattgagtaggattagtgagtagggatccaatctcactattgattttagcattgggctccattggtgtggaaactggttttattctaatgtgtccaatttcttacaaaagttgtagagtgaataatctttgagtgactaagattcttttgttgcaacatgcaatgtgaagacctaagaaaaaacgcagagggccaagatctttaagcttgaagtggtcattaagtgttgattgatgtaaattattgtaaagcccgcttagttaatttggaaattagcagttgttta

SEQ ID NO: 300186 - DNA, 2244 bp, Cannabis indica
caaagaatttcaaaccgcattatttttacggtgtggtgcagtgcgggtggtttgatgagcacccctactcgaaagcatagatttatcgtgtgactggttatgtgaagagacttgacacaaaggatcgtattactaaatacgattcatccttgaatcaactttgtttgttgtgtggggaagacaatgaaaacttgaaacacttgttctttaaatgtatatacaagaggtgcttggaatctattaaaacatggctcaattggaaggtgaagatagagtcgatagcacacttgttgaaatggttgtccaaatcaaaaagcatatccagcaattaatccaaaaaagattatattgcaataatggcagcggttgtatataattttctgagggtataaattgtttaatgagaacaaaaactttggcagattataacacgagattataggttgtttttttgccttataacatgagattataggttgtttttttgcctttataaaatttctgttgaagataaaaattgggttagcaaaattaggagcatagtataccttttttcaaaaatttgagatgtaatagcagtaaatattttgtatagtgcaatacttatcttattagtgcaatacttatcttattcaataaaaaaaaaaaaaaaaaaaagaaataaaaatataaatatgcatgtgtttcacatatatatatgtacgtcgtcgacaattgtttcttgattatataaatatgtgcataatatataatataaattaaaaaatatatataataattattatgaggtgatccgagtgccgactttctctatcataataagattattacatttgagattgaacatttgtaattgtaactccaataataataactactgaaactacgtaccacgtgcaattataattatgcctttgaaatcgaccattttctttcaaatgaaaaatagactactccacccattatttagtttcctatatttttataacgtaattatataataataataatcttttttatttagtcggtcactaatttttctggttgtggaccggccgactccattatcatctttccctaaaaaaaaaagagaaaaaaaagaagaatatatatatatcgatctataatgtgtagattctgtacttataaagattgactatttaaattaaataatgtacttgacataataattattagtttatgaaaattagtaacaataacactaaagatagacaaataaacaaagaagaacttttacatgttcttgctaatttggaagaatatttttcacatgtgttactaaatagaaattatatgcagatccatcttaatactttctgaacgtattaatttatataattgcctattatatatagcttagaaataataataataataatcgaagaagtatacttctttaagctaaaaggtttatcgtttcacttgggtgtgtttggatagttatatgagaattgaaatttgatgtaattgaaagttataattttaaaataactgaattttacctcttttggcactagtcatgaatatgccataatattattataaaataaaatgaataagatatgactcaaacaaactttgaggatagtcattataaaaatttttacttttagtcacaacaaaacttgtggctaaaagtaaaaaagttatgattaattataaattattattcttatgttgtgactaaaaggtccgcggctaaaggtattagttacaaaaattataaattgttgtgactaaatttatttttaagtattatgactaaaactaaattagtgacaacttgtgtctaaatgcaatattttagttacaaataattttttgttgcgactaaaagtcacatttagtcacaaaaaatctatgttgtgactaaaaagttgtcactaaaaaagtaacaattttttgtagtgagtattatgaattattacagtttgattgaaaagaataaaaatataggaatgatgatagaaatagaatgaaattaaatttaaaatacataaaaaaaaattctcattttagttgaaatagtatttccttctaaattaataatattgggtttaataatatggtattaattctcatacaactatttattaaattttggaaaaagagaaagtagtgaggcacatccaaatagcgagaaaataaaagcaaatattctcccccatttttacagggaataccttttcttttcctaacttagtttattttaattttaatttt

SEQ ID NO: 300187 - DNA, 1464 bp, Cannabis indica
ggcataaaacccaacatttaggtgtgactatggcatgaaaatattattacatggcttattggtgatttagggttgcgaattgggtttcaattttcagaatattgtgacatggtttagatgggaatttagtactgcaagttaggttttaatttttgggcaaacttgggatttagggttgcgatatgggtttagctggggatgcaaagatggagaagcactgtaatggtttttattattaatcgcagatatatggtggtctccaatggtagttttagttggaagtctccggtggtaggtctccaattgtgctctccgatggtggtttccaatggtacttctttgatggtggtgtacgtggtctccgattatctctcaagtcactacaagaaatgtcacttttgcctttttcaacacagtttgctactgcgctggtaaaaataacttttactagagcatctcgcaaactgcaagtttaagtacttttatcaatgtatttacgtgctaggaaaaatcatttttgctagcacttttcattttgtgctagcaaaagttttaataccaacgttcattttccaatacatcaaaagtaaattttattttgccagcactataccaaatttttgacagcataaaaatgtgctgacaagaataatatttcttgtagtgaatagaatgttagagaagaaaaaaaaatgtaaaagtgaaaaaataaacactaaatggtcgtatatagggatgattcccaaattagtttacgtattattttttcaaaaattaataaaatgtaataaaagataatatttaaataaaataaataaataaaagccaaccaaactactgtgttcaagaaactttaaagtttggtgtgatttctgaaaaaattaaattcaaagaccaatgtgttgatatttttatgagtatcgttggcaccaatagttcttagtactttttaatgtcgttttacgattggctagcgatactttttaaaaattattatattaaactatatgggaaccgatactattaattgcaccaatagcgatattaatacgtaaaagagcattaaacaccactaccatatttacacatttctctatttttatagttcagctagagacttaagatacaatataagtcttagtattaaatatacattgattttatttttgaatatatatatgtagtaattagcattgtattattttattgtcattacatatatatataatttctttctcacacaataatataagaacttttatttttgatgtcggcaactatgtggttctaccaagtaatatgtaggtatagtagcatagattaattagttatgaatatttataatagtaataatcaaccattatttaataactagtaaaataatacgtgctcggcaactaaggtggcgtttggtaatacttttttaatcagttttttatttttaaaagtgaaaaagtgaaaata

SEQ ID NO: 300188 - DNA, 1464 bp, Cannabis indica
aaatcacgtaatacgcctaaattagttagggtgttacactcatcatcctgtatcacacccccaaccccacaaaacccctacccgatttcacagaagcattagtagtaaagagaagtgacccgtcggtagaggacactaccttggcgtggctcgatccagggccaaaaatgagagtaggcgagccaggagtgcacttcgggcctccaaacgctcagggtcccaaaattattaaaaaaaaattattagtatatgaatacattattaaataataaataaaataaaacaaatattgttcgggctaatgataaagagtcttactttaaattgagaggtcaatggatcaattccaattctttacttttccattttgttaaaaaaatattttatgtgtagttatgaaggattgaagtttggagctttaagagttctaattttttttttaccattataccaaagcactaaaactattattttgataattattaaactatatataaggccccaaaatttgattttttcttaggtctcacatactttaagaccagtcctagctcgactaacactattagtaaccaccgtatttagaccgagcccttgctgctctcaaaactcccacaaggcctgctgagctagttcaggaataagtgtcacccatgattgctacttaccaaaccaagcacaattcctattataccatatccaccacattagaatcatcaactcaaactcatcctgagaaaataccaaaaatagaatagtaagaatatctagtatcgggccattaacatatctacgaatagaggataacaatcccgtattctcctaaacaaaaataagagcaagaaaaaaacaagacatactctagggtctctcactcctcattacatcttgaacaacacagaggaactataactttctaggtacgtaactgcgtagctacatggatggcatagtgaaataggtgccatataaaaacctttacttttggaggaacacaaaaatttcacataccattccaccacttcaccagccgagatgagtcaacaaccccctcatcaaattgaagggaccataccacacaataaccactttttactgagtaagtatcgtccatgtcatagtgtcagcaccacgcatcaccattcacgcctctcaccaaaggaatagataagatagccttaacatcaattggacaaaatgtccttaataatttcccaacatgccattctttatttgtagcaataaactcattaaccaaagtaatcccctccatcagactagtctgtaacgcccgtattttataatacactcgaaaattaattttaataatttatatcttaataaccatatggatcgggatcccgagtatcaaaatacaagttaaaagtactttactaatatgtacatatatatgtatatatatatttttttaaaaaaactgactcgctaaaatgcaaccccaaa

SEQ ID NO: 300189 - DNA, 1732 bp, Cannabis indica
tggtcttcgagttgccaaggacatagccgaaaacaaccctggaagccgagttttgttaaccacttctgaaacaacaatacttggtttccggcccccaaatcaggcgcgcccttatgatctcgttggagctgcactctttggtgatggagctgcggctgttatagttggaactgacccgctaaaaggtattgaatgtcctttcatggaactcaattatgctgtccaacagttcttgcctgagactcataatgtcataaatggtaagctctctgaagaaggtataaactttaagctcgggagagatcttcctcagaagatagaagaaaacattgaggaattttgtaagaagctcatggccaaggctcagctgaaggactacaatgaacttttctgggctgttcatcctggtgggccagccattcttaataagctagagactactttgaaactgagcagtgataagcttcaatgcagtagaagggccttgatggattatggaaatgtgagcagcaatactatattttatgtcatagagaatatgagggagcttttgaagagaggaggagaagagtgggggcttggcttggcatttggacccggcattacctttgaaggagttctcattcgaagcctttaatccattaaattaatatattataatatatctatatgaatttaattaaagctagagggaaagtggggctgcatctcacggattggtcgtttaaaagaaatggggttcaaggattttccttctaagaatcaagtttcttggtctgttttttttttctttttttcttttactgtgaataaagtgatgcaagaaaacgtggatcagagaaaaacaaaattaattgttttgttgcaattttattttaacatcttctggcttctttcaccttcttggtcattactagtgcgcgtaagcaaattaaaattataatggtaactagctcacaccttattttgtgagcgtctttgcttctaatttgtaaaattgctattttatatatttttacgtactcaagtcaagtttatgaaaaggatttgtcaagttgtaattcacaaatcctattatgattaatcaactttcaacttgtgacgttttatcaaactaaatttagggtggctaaatagtatttaagattttaagactctgtgttttgttaaacttactaattagactctctattttgttaagtaacaattaaaatgttgtatttttcaaaataatacaaaataaatcttgagtttaattttcgtcaaattaaaatttaataataatctaactttacggtattatgacaaaaatggttatatatatatatatatatatattttgcatctgttgtttgtgttagaaattagttttaaattgattatattaaaaaaataacgaaaaattaagttcagagtctattttgtactattttgaaaaatatacagtccaaattataatttaataaaacagagaatttaatatgtaattttacaaaatacatcaatagtattaacccatttagatatgtataggggtgttcataaaatagccgatccaattcaatctgcgatccgatccaatccaatccgcaaggtgcggatatccccacttgtgtagattggattagataggaaaattcaaaatccgcacttatacaaattggatgttgattgacatgtataagtaactgatctaattcaactcacacatttttataaaaaaataaaaaaa

SEQ ID NO: 300190 - DNA, 1283 bp, Cannabis indica
acttcatccttcttctcgacaagaggtagagtctcaaacacaactggtttcaaaatagtcagcacaagcacaacttttttcatagtcaaagaaaacatcttcagcaagacagacggtgcgtgcatgtgtgggtcaagttgttgtgtcctcacccatttacacaaaattgggtactacttggggtcctatcccaaatgtcaaaattggaccttatatacccttataaacaagcgcttatatctcatgtgactctcttattttatcaaaaattgattaactttgtaaaaaattccgacaatcatagataaacataacaatgtatatatgatgatcatgaattcgaacaataataatatgaagaagaaaccttataatattatgaaattaattatataatctattattaataggaaatcgaaacaattaacgtacgcatgcaactagtagctaggatatcagtactcagtagtactagcaacatgattacgtactacatatcaataatataattaactattacaaactatagagtgaggctaagattaagatctaaactattattattattaatattattatcactagttgtagtagttggtttcttgggagatttctccatcttactggtcgaaggagttactctactactactactaccacttcgggtaaaatctgagcattcaaatgaaggaacccaagtattattagtactattactgctagcagtactcaacttcctcttcttcatcttatttttctcctgtaacaacttatcatcatcatcatcataatcagaattagaataatcatgatcagaggactcctttctcataatcagccgggtgcgagcctctctataactcttgatgagacagaagaacttctcgatctccttctcttcgtcttctggatcatcttcatcatgttcatcaagaactattctgttatgatcttccttcttagttttattctccttatgattattattattattattattattctccatgatcatataattaacttttctaataagaaagaaagctagatgaagcagactgatgagactgtttatgcagtttttgtttctcacccttttaatggagtggaatgcaaaaacgaaatcatcctgacacggaagaatatatggttatatgaaaagacaatgttgcccttacccatcttatggtggccttgtcagttttgatagagacgcttagggttatataatttaggctaattaataattttattaaaaaaattctaacatagatgaaagttca

SEQ ID NO: 300191 - DNA, 1663 bp, Cannabis indica
aaaatatattccaacaatttcaactgtcctaccattatcacaactcctcccacgaaatgtgctcctaatgcgtgcgtgtaattaacgaacacattaaagatgttgcatgcgcaccacgctcgtgatgccttccacttatggtctgtcatttgatgaccgctcatgggatgcatctgcgactccagcatgtaccacatatcaagaattcatccccaagaaatggacgagcattacaagctctcagatcttagagagtccaaaagcttgggtgataaatgttatccatgtttccatgcatgtgacacgtggcatattatgaaagggatcatccattaatactctaattaaagccctccactgtgagcctgtcacgaagaagtttcttggaaccgggaacaggtcaagattgaagagtgcacagtagtctacttggctttaccttggcttcccagacgcagaaggtgtattgtccctctcgaactcagaggggtctaaacatggaagcctgcctagataaaatctggacaggtactcaaagggcctaatacgaatgttgaccgccttggagtatcgtggatgtctaccttttatacacgccagatcactaagtgatggttatactttttttgacgaagataagatcctatcccctacgtccaagcatggtagtgaacacacctccatcacctttttaacagacggatattacagacctctgcttttaaaagagaaagctttaggcgacacgttgtctctacttctaaaggttaaacctttggatgatacgtgtccatatagtataaaatgatccccattgtccagctgcagcatgcacgggcacaatggtttccacaagacccaatagttgcctctaattttgcatgtaatttatccccattagtgaatttttagcagaaatcccaggcggatcatgggcatgaccatacttgccacttagcctataaataccctcctatttccataaagaggggggaatcacgtccaagatagctaaaactctaccaatatcaccctttgtctttgtcttctccaagagaagcatagggtgcggatataaggttttctgcaaaaattttgtaaacacatccaaaatgctctaagatgctaatagactgactcgtggactaatgttaagtaacgcctgaaccacataaaaaatctctatctttttatttctgtattttattatttctttagttctaaaatatctagtttctaaaaatctcggtaaacatataatattgtactataaaatttgaggtaattgatatagatcaatctagtatatatatctaattatttttgtgttctaaattatatacaaattatgtatccaggtttatttaattttttaacaatcggattcgttttaattatgctgtttggctaaatgtctagggaaccaagaaagttgttttttgaaattgtttcatttacagcaattagtaacatgttatctcaaaaacaaaatagtaacatatcagtgattcaatgaacaatttcgaaaacatttaagtgttctagaaaagaaaaggaaaatactcagagactgtttgattgtatttttagttttcggttttcaaaattgtgtttttaaaagtaagaataaaaaatattttttttgtcattataaaaatttaat

SEQ ID NO: 300192 - DNA, 3492 bp, Cannabis indica
aaaaaaaaaaaaaaacatattgagttgagatttgagaatctagttataaaaaattaacaaaaatctcaaaaaaaaatttaagtaaatgtcaattgtttcattatatcttcatagtttattaaataatttattattggctaaaacatctaatgtgggctataaaaattcacatgaaaattaatacatataatagatcccaattcatctatatataaatatatctatgtttttaataagctcacctcaatatctttttttcctctttacaaagtttacaaaatgagcaagaatcaaaagacaataaggcaaagaagaaagcaacaaaataaaaatattgaaattctattaagtgacttatcagcctgcatttcttgcctcctcagccttggattactactactactactccccattagaccccgatacgagtttggatacgagtacaaactctccgagtttccaaaaaccctagcatagaccatatccccgaacatccccacaacagggtgatgaaaacctgtcatgggcgatgaggatgataataaatcatcatcctcgtcgtggtaatgttgttgattttggtaaggatttcgatagggaagttgttgttgacctgaacgagtagtagtagtagtaggtgatgtaagggcaatttgtgcaccacaagctgatggtctaggcgggatttccatttccattcctattcccattctgaccgattttctttcaagctcggtgttattgtggccgacaccacccctaccatagagaggtaccatagcggtgtgtgatatttcggctttgcaaaccgggcactgagggtgctcatcagaggcaagagaggcactttggacatgaagccatttgtagatacaaggccaacagtaaagatggccacatagtgttactattggctcatgagcaaagtctaaacagatattacaatcaaaacaaccatttgatgaattttctgatatgggtttccattcatgaccatagtaatgttgttgctgcatagccattatgattttgaaacaccaattctgtaaaaaaacatgtaagaaaatattcagagaaaaaagaaaatctttggcatgaaaaagatcacatttttgacccaagagggttcgctcccacaaggtctaaggttcgagtcccttctgggtacttacacagcaattgttataatttcctggtccccaaatattgtagggttagataggaatcttaatttcaaaaaaagaaaagataacatttttaagatcattcacaatctcaattcacaattgtgagtgtttggcaaaatagtctttttcttttgtaatcactttgcatgcataccaaattgacattctagacacattggagaacatttctagaagctattttaggaaaatagttcatatttaaagcatttatcaataaaattgaccccaccattataagatcaaaacaatttacttataactcaagccaatagattctattctaccttacccattataaaaagctagaaaaatataaattcattatcatataataattaataatacaaaagtttcactttcaccctttgagataaattatgcaaactataaattgtaaaaaaaaatgaaaatgaaacaacttatacataattccaaaatcttatctttaataaagaattttgtgtaccaaataattttgaaagctagctcattgatacaacatttcaaaaggaaatagcattggatgatgggtaggcatccaacactatttttatttaattaactttttctctctttctaataagaattgctattaggtaaggcaccttaattgattagcagttaaatgtgtgggacccgatattaaaatattatgcccttaacttttctcctatctaaatttggtgcctaaattgcatagtgactttgttacagtgtatcaataacagtatgtcacttcttaccgtgcccttttctcccttctaaatttggtgcctaaattgcagtgtgtctttgtcatagtgtcattgtgtgttggatactattaacaaaatggaaaagattgaaaagagagatgtaatgaaagcattaaatgtttgacagaagaagaagtaaattttcaatgaatagtagtacatacagtactctctaatcttagaacaataagagctattcgagaaatgctaaaaggtaccagtagtatttaacaccctccaacatattatatcgttattagtaaaattaagtatcagatctcatataatttaatatattaacttttataaaatatcgttaactaatagcaatactccaagtgatattgatactcacacacaccaaagccaactccaataagagatgaagctttgatctgatctaatctgagttataacttattaatgcatcattgactttatctctctctcataccaacttggtcaacccaaaacaataaacaaaaccattaacataaaccaaagactatgacaactataatccaattcaagaaagaaaaaaaaaacaaatcttgaagaggaaatggagagcttgttagctatggagattttggttgatttaattagcaaaataaccatatttgatcgtacaagcgaccaaaaattacactatacaaccataaatttacaaaatgtaatcatttaatgtgtttattttgctaatttaacatttttatattgttagtttaagcaaatttcccaaaaaccaaactatttttttcatccacaaaagttgatatcaccaacaaaaaaaaataaggtaaagttggatctaagccaacaaaaaaaacgattaagaactaattaagggttaaaccattttaaatctctctattgtaaacgttgtttccaagtgtttaaaagacaacatgcaaatcccaaatgcataatcttattttctgtttggttaccgagaaaatgaaaatgggaagaaaataaaaatctaaaaaaagcatagttttttgataatatagaatctaaacaagcttaacccagataaggaaaacataaaaagatcaaatctttgttgtaataatttcaaaaaacacatcacaaatgttatgatataatacaatatagaaagacatacctaaaggttgtggtgagaagaagatatagcagtgagtgtgtggtggcttattggaagcttggaagaagaagggttccttgttcaatggcgattaataaagaaaaagaagaagaagaagaagagagagaaagattggtttgggtggattggcagggcgtgagtttcgtcggcttcttatacacgaatccaatcatgccttgttctgctctataaaaaaaaatataaaaataaaaatattaaaaagaagagaaatgataaaagataatgtgcactctttttcagtgtaatattattattggtataattaaatattaattttatgtaatttaagaaaataactattagggatatagctaatttttttgaaccaaaaaattaaactttattaaatcaaatcagc

SEQ ID NO: 300193 - DNA, 1219 bp, Cannabis indica
ataatactaataataatactaattttttgatagataagaagtatttgaaacctggtgattctcatagcctcttccaacccagatattctcttggacgaaataacaaatctgttgccggagcgagtgagagatggatgaggagagcggagccacgacatgtctggctctgagcagcagatattagaggaaaatgggaagccaaggaagggagatgaaagttcgccatggacgtagttagtggagagttgcagagacacggcatggggcagagcagcactgaatcccatctctcttctgaagccgactatggagtctagtctactggtgtacacaggaaagtggaagtgttgcagagaagagaggataacgaagaaaacaagtaagaggggctttagatgggctaacagctcaaaagaattggactgggctcatcattttcttgcggaattttctgactttgcttctatttttatcatattcttgcaaatattagacacaagcttgtattttcaactactatcaaatctattaaagaaattgataaattacaataaaatataagaagttaacacatagattattaccaaaattgatatattctagagatattttaataaatactcaaaaatgacaaaaagaattacaaaactacagatatattgttttttcaatatttttacgaattttaaaatttttatttttacaaaaataccaactattggtttttatattgttctcgcaacaacattatactaagctgttatcgttactttcatgttgatttatattagtattatgttgtttttgtacgttatttttaagtaactttcatgagattctagaaaaaatgtgatttaaaaaaattataaaaaaataaacatagtccacaaaaatatatataaaaaaaatggccatttttgagactgtataaaaatccctatatttagttttatgatgtttaagataacatatacaattggtttctttatgagtgtttttccattttagaaacttatggaaatttcttacaaaataagcttatttagaatacaataagtttaaaataacaaaaatgtcaagtaaccatgaagttgtttggtatattaaaagttgggttagtctacaatatacctttataaagggatatttttggtagattccttatctatttcgacataaagaagagctttttagttaattttttggaataattacataa

SEQ ID NO: 300194 - DNA, 4102 bp, Cannabis indica
tacatgaatgtttttagtatagaccttgaatgtttggatagttatgaatttggccccccttattttgttttatcattcgactcctgcaacgttttgctctggtttcttccctattttccaatgcaatgggacagatggagaatgacctctttgggggccttctcagggatggaccagtcaacttagaattatctttactaacaaagtgatgatcaaggtgtgatttttgtatgatgaatttgtaaatagtagatgtgaaaaattattatggaaggtgtttgccgatattttcaaaaatcgatattaagataagatttgagctaaagaaaagattaaaagaaaataaacaacaaattcttatggttggaggtattaatgagttttagttcacaaatcactatattggataatgttcataatagattttacactattttgaagagtttatgctctgtaaacttgaggttatgaacccctcacatgaaggttataaaatcctatttataatacaatatgtaatatgggtcaggctgacccaaacccattaaatgtttacacagtgttcaacccattgatggggtgattacattgtaacttgttgaatttgttttatgcctaaagcctaaggcccaaagtaggtgaggcctattgtaccctgcgatagtaactggtcacaccttaagtcatcaattgttccatggtgaatgctttatgtcagagtagtggccgtaccctaaattgatcacacctctttgccaaacccttaactaagaaaagacaaaggagactactatggcaaagaaccattgaatgtagtccttgagggattcgtcttctagttatttcacatctaccaaatcattgagttcgagtttgcactgttgagaaggagcaaattgattgtcaagggcatcaactaaatatttccatgaatatatagatccaggggaagcttgagataccatcattgagctaagcttgtcaacatggcagggaaaattctacaccaaacatcgtcccttactctttgttgatcggtctacacttcgatgtaatgaatgtgggacaataggtcttcttctcgatgtattgacgggaggaagtattcatgaacttaggagggatcgaccgagctttggtttggtctgagagtagtgaatgttgctctctatccagttcaaactctgacaactttagagttatgattcctttaactaaggctgctaggttgtcgaacctgttaacaccatgggtggtggtttgtgtcctagtcgaaacttttattgccagattaaggtcacctctagaagctcccacttccaccaaccgtcttctagtaagggtgtcacacaggtccctttgtcttccatgtcgatcaaggacatcagttgactggggtctagctgttgtctcttgaacacgtggtcgtgaaggcaatgccaaagacttttctggcacaaaggttagattatcttgggatgatgcactgtgagagagatcgttcggaatgttgtagtgactatttccttcgaaatagtcttcagtaggatcacaagtgcgaaaagagtattattgatcaggtacaattcttccccatgcacttgagggaagtacatgtgttgtggttattgaagctgtgaaaaagtttgagcgtgaagctgctcgttaatccttaccatttgaattgcatgctctagttttaaagtatagtctttgtcttcccccttcagtattagtcgcaggttactttccctttgcagggtcacgaggcctggtgtcatttgaatgatgaggagaactttgcagaggagatcgattggttctcttggtagtatgtagtcgctcaacatcaggtggaggatccattggttagcaatctcgagtttgagtctttttggattcttgctcaaaattttcctccctctaaggagcttgtgcacctgttgcacgctgagtgtttgcatgaataccgagcatggtataagtgtttcgtgcattgagggtttctccttcagtactagttctcacatggccagttggccgataaggtatctacccaactagcttggaagctctccttagggaagttattatgcgacaggaacgataagcttccttaatttgctaagacaggttagccatttgatgttcttgctccgcacactgattctcaacattcttccaattatccatgaaccagttttgaaaattttcatgttgtttgtcgagagaatctcgtagatattgctataggtcagccactacttggctaagctgttcaacaagaggatcgacttccttaagctcttctagttaaacaaatgattccccaagtggaatttattcactggtctcaataccagttgtagtttgtggccttgggagatgagttatggagctagttttgaggcctccacctcgcatctgagatgtaggtgtagtcccatctccagttccagtgattggaatggccccagtctattggccaacaactgtggttctttgcacacttgtggatcaagttacaaccatcttgtaagtgacttcttgagttgtggctgtcaatgaaagcaccaaaattttgatgcagatctctggccaactcactcgtatgtatagacgtgatggaagttagaagtaactaagtaaagtaaagagcacacacaagaatttatagttattcactccttgtgtcgtgagagtaatggagctccatctactttgagtttttattataatgagattgattataagaaaaatttctaattttacaagttttaatttctagagagagatgctctgaccttatgcgtacttttttgattgtgaaaaatgagctagatgagctttccttttataaggaagaaagtcctattaaaataataattaaaaagtccaaaaaaatataggaaaatacatttaggctatttttgaccattgatgattatctaatggtgaaattgaattcggaggttgatcgttgatttttgaagctgaagtcgcatccgtgggacgcgcttcgagtaagttgtaacttaaatttgtaactctcttgaggacaaaaattggcgttgatatctttagaatttcaattgaatttgaagatatgacttaatagagaattgaaatagcttcaaaattcaagttgaatcgtgtcaatcagataaatattgagtgagttatggtcattttactgaaggctactctgataccagtgcccatattgacagccagtgcccagattgacagatgacgtcaacctggatgttgggccaagggaaaaacgttttggagatgtaatttgtgatgcctaagtgatatttgaaatcactaagctagtttttgtattctggttaagcctttcactaattctcggagatgttgctgtttcgtagaatcgggagactcgaaataacccaatttgcgactgggtcacttcaccaaaaaagtgataatataaagttgtgaatttgacttgtataatttcatagctcttgtttatcatgaaaaactagatgaatgatgaagacataatcagaatcgaataaggagaacccagggcaccaagtcatatgtaaactttggcgttgggtgctctttctggagcttccatgatgttattttgatacttccaaggttcttgaaactgtggaagaggtctcctactctatttttgactattttggagagaattctcaaaccaaaatttgcatttagaggatcaaaaccagtacactatatgggtgatcataaaatttacaattcgtggttccaaaccaaaacaaatctggaccaaaccatttgagaccaaaccaaatgaatccagtgtgaatgctttgatcaatccggaccattttaaattctctggtttggtcacagttttagaaattttggtggcgcttcaaactaaacaaatctgcataattattatgtatatacttgatatatttttttagacaaaatattgatatttgggaataactttaggtagaatattgatattgagtttatattgttacaataataattttttattgttatttatttattataaacttattaaaaggaaaaaaaatattgaaaaatgaacaattattgtaaa

SEQ ID NO: 300195 - DNA, 2525 bp, Cannabis indica
ttttataaatcttaaattcagatatttttttaaagttttatataggtttttttttaaaaaaaaaaaaaaatcatatttttagtttgattggttaaataatgtcatatttagtggcatttactttttatgtcatatttatcataaccttaataagtttttccatatttttgaaaatagtctcgataatactagacttctctaacataattaaggcccatgggcttaaaagaaattaaaccaatcttctttcaaactaatgtgacaagtgatagttgtattgtctttagaccctagggaaaggtgcacaaagaggtatcaaagtaatgagtgtgtagattcctatatttatgggattatttcacaaatatacaaaaattataaaaatatggtttatggatttttaaatatttttataattattttatatattatttataattatctgtatgttatttttgttattgttttgatattatttagatgtcattttaatgttatttttatgtagttttcttgttattttcgtgttgtttctatagaaaaccaaaatgtaaaaaaaaaaatctttaaacgtaaaaatgaaaatttttttagaaaaaataatgccttatgtaatttacatttattgtcctttaaaggaaacttttatcgatcgagtatatggattatggaggggacagcttttgtgtgtgtgttgtcctctttttatgaaaccacatgaattccacatgaaaacttcttcaggccatcttgtggtggaacagattatacctactagagtttaaaaatctacacctcccttgtggactagagttgacaactcctcttttggaataagttcagacatagaaaaccctagcaccgcacaatatagtctggttttctcctgagttttgttcatctcctcctggttaggacatgggggacctttgtttgggcttggttggagtcctggtcaagaaggcttgctattgatctatgtgtgggtctattttcctcgggttctcgtctcgcattttatcgatttgggttgggttctatttttgttagttcctactgttgggagagttaggtcttacctttgcggtgatcaactagatgtctggggatttttttggtctggtctaattgtacggttgtttgacggtctagactagacctctattgcggtcagccatggcagtcttggtgtttctttgtccttttgtctatattcggaggtctgctatgcaattctagttagatttgttggggtgctctttggaaatggaggtggagcgagcaatgatggagcttaatttggtggttgatgtctttttgggactgtatttttcttggggtggttgtggataggggtgccaactcgtgttcgtggttcttgtttgtgtcgtgtcgaggttaggtgtcacaagaaaattctaaacctaaacccaacccatttattaatcgtgtcaaaaactaaaatcaaaacccaatccgatcgtttataaatgaattgacctgacccaacccatttaacccgtttatataaagaatcgtacttaattttggttaacttatcaattcatcaacatgttataaacaagtttaacatatttacaatcttgttatgagacaattatgagcaatttaacatgtttatatcctatttaactaaaaaatataatttacatgtaataaatataataaatttaagagtgtactcttacataggtcattatcatgttatttttgggttatgagtgtcaactccaaaattacctgtttcataaacgagttacttgtgtcaaccaaaatgacccaaactcaattagggcaaattcaaatctgtttattataagtgcaagttttgcatagtgttattgtgtctgacccagatcgccacccctagacttttggatctatcatatggatgtttaacattttcattgtgttattttttgttatttttattttttacaacaccactctaatatatatgattttcttattagagtgttttatttacggtatggggttttaggcttgtcttgtggatcggtggtgctaattcatttggctcatgtcgctttcgcttagccaatatggctccctatatctatagccagatctagaagtcgtgctattttcttttattcttgttagaataatagagttgctattgcccaaaaattttgggattgataggtttgattttgtcattagttcatttggcggttgaaaagatagtattttttacacttttaatttgatgtttcatagttgatattttagttgtccttttgtttttgttgaagatgttactagggtttcttttttatttttattgtaaacggtttgattaacctatcattgttgagttcgctctatgagcaatattgttatgtaataacttttatccaatttacctattaattatttaatatttccattttctttaaaaaaatatatatataaataagtattcaaataaaaaagcatcattaatagaagggaaaaaaaaaagggcttttttacataaatgt

SEQ ID NO: 300196 - DNA, 3560 bp, Cannabis indica
gaactgcaatcagtataaaaatttagttactaatgaaaaaaattactcaacctaatttaaaaggatatgagtttgcttaatattatgtataattatgtcactttttttaaatttacaatttattatttgaatctaatgcatcaattgtacttttttctcaaaaaaaaaaaaaacaaacacacatcaaacttcctgtagattttgatgaatcaatgcaataattcaaatactagttattaatgcaaaaagttctaaaaataaaggtgagatggccgattataaacatgctaaaagaatactaaatttattaaagtactatatgtttaaaaataagagacacagcatacatgctttcaactggttgaaggaataaaattagtttatcctattcaaaatttagactagcatgtatatatatctaactgaaagagaaaaaggagaaaaaaggctaccggaattagaggtactttttgattagttattgtttttggcaattcctctgcaagtactggccaaaacatatgtaattcatggcgaacctgcaaaatagatgatatgcaaacattaattaaaaatgaaagattcaagtaagacactaattagccacagcaaaagaaatattgttgatgatttgtagcaccaactccctcaaacacactccttcattcctgaaaatgacaaaacacaaagaaaatgacagtacattaaaaagttatgttaccgcttttattacacgccatgtagactctaacgggtatacatctgaagatccatcatttggtttatcatctagcagaacttcaacacaagcaagcattgaactcgctgtagattcaagattgtaacctccttctaaagccaatacaactttcccatgggcgaaatccatcaactgaataaacaaaagatttgacaaggacaaggaaaaggcaatactgaatcatcctagacttagttcccaaaataaaagtagaatgtaacatagaaaaataaaaaacagagattgcatttcccaaattaaacacccaacaagtgccacaatatagataactgaaataaactgaaaatatgaataagatcaatatatgtatgtataaccttcttcaacatgactgagtatccaaatggcgtgacaaggcattctcctaagggatcattaacagctgcaccaagcaacatattggttcatcaacatagtttgaagtgatacataaaaatgaaaaaggtaagagaaggaagatagaatacatcaaattaagataaatgaccaacctgcatcaaacccggcagacactataatcatgtcaggattaaattccttagcaacaggaatcaaaatatgatcccaaaccgcaatgtaatcagcatccccacattgattattctcccatgggacatttatattatatccagcacccggtccattgcccaccatcgtgtaaaaaccatcatcattaaatggaaaaaagtttccaaactcatgcctacatataatttaacattgttatgggaaggatgtctttacaaaatacaaattactgtaatgtcacttgcatacccttgataacacaaaatctatcttatcaaaaaattgtaatctagaaagtatttatagttatagtttggggatgtaattattaattattcaatgatgcttgagatgaattaagataaagagttcattagatataattgtaacatacctatgaactgagaaaaataatacacgtggatcctcccaaaacatcttttgagtaccgttaccatgatggacatcccaatcaacaattaaaattcttttaatacccagttctggctgtcaagtaaagcaaatggtcagttgaaagtaagcagaagtaactttccatatgaaaggatagcttttttaaaaagaaataatatgttgtgacttagtaaagaagtaaaaggaggaaataaaatcctttagtagagaagggaaggtgattcactttttcattcaatatgaatttcgctgcaatagccacattattgtaaagacaaaatcctattggtttatcatgttcagcatgatgtcctggaggcctaacaatagccacaccagaacttagttcccctttggcaacttgttcaataacctgtgtcaaaaaacatcaacaataaagttctatgagtttataaggtagcatatatcagcataacatacactgatttgagctttggaaaagtagcttagagtaataaaatattttattttacttaaaagttatagtatgaaaacaaattctgtgtaatcttcacattatatatagtttcttctgaacttttagtaagatatcatcagttatgctgactcatacaaaaaacagtacctgtacgacagagcctgccgcaagagaagcagcttgagatgatccttcattgaaataaatagagtcatattttgatgcaattttctttcttcgagaactaaattttttggaacttatgtctttcatcaatttcaaatgattttgggagtgaactaacaatacttggttatcttctacctctttggcatccagtagaacacatctgaaacataaattacaagaagcaaacaaaaacaaaattacccctaaaaaatccaacagaaattcccatttctcaagcattaaatttcaatgatgatatgaaaactgaaaaaagatgatacctttggggtataccagctgtttgaagtttgttccaaatggatttgatgcgatcagggatttctggccaatctgttttgttaggaggtgcatgcttacacattctatcatcatacaataaaccaactctcctcttctgtttagtcctcctattctcactacccaccaccatttttacactgctttctattccatttaatgcattatttaacctttgaagtttcctaatgtggtttcttcttctgctatcaacgaagagtctccctctctcccacttaccccatttcttctgtatctttttatacttttcaaacacataaacaccaaatataaaaatgaaacctttcaattccctttccctctctctcttttcttgtattttatattttataatagtctgtagaacccgtacggatccttctcctatataagactgacattagtttaatattatttatatttatttattgaatatgccttgtatatttcttatcatatataatgctacttaaattatgcacaattttccatttcaaaaagaaattatgcacactttttcacaattattaagtgtggattacattaattttaatgttacagttgaatatttattttgaacaaataatatggtttggatcccatattgcatatttttttgtttatttatatggtttaaatttgattatgtgccgatgactttatttgggataaaattgatgattattgagctaaaaaaaactgcgtgaaaagaaataacgatttattgttagctatagagtagatacaatttaaagctaattagtaatttttcccccgaattttgacatatattaaatcatgcctcttaaattgttttttgccgttaaaaattccctgaactattaagat

SEQ ID NO: 300197 - DNA, 3498 bp, Cannabis indica
attaattttttagaatattttcacaagggtgccgctgctctttcatccagctccagcagcccagcctttcttttcaccctcaactcccaaatctgagcctaattttcacaaggtatgatatcattacccactcttttctccatttgtattcgccgtttcaatcttactgcttgctttttttttaatgtatcactatcatcattttccttcaccggcgattctgatgggcgttgctacttgctgtttttcctttttctttttacattttatgctccaattaaggtgggcattttgtgggccgagcttctttttccatgtttggtcgttattaaaaaagaaaaagactggtgcatggatggaattatgagattcaattgttgaatgtatctgatttctttaatttttgtgattccgtttgttaatttttctgctactgcaaccatttttctaatttagaaatattaaagatcctttttttcttctggggtatctatctgtcattgagattattaaaaataggaatgttctttatttatttttttctttctgtgtagcttatgaagcttctgggattgctccattatttgaaatttatcgctttcactgaagagtgtgaaaagtaaggctttttgaagtgatcagttgattgaatttcacctattcaaattaagtttgaatatggggaaagaggattcttgattagtgtcagatagtgactattcatgaaagtgattaaacatctttcatggacaatggtggtggctgaaatggagttgggtcgctgtatgatttaatctgtacaattcaactgtttctttgttgtgtcatagtgtcactgtatcattttgtacccgaactccagacaacagatttcaatgggagaatctcgacctccttattctccatttaatctttctgaatctacctcttcgaataacactggaagatttcaactagatgggcatggaattcgtggtggtcctagaattcaggacctgaagaagagaggccatggaagtcgttcttggataaagattgatgttaatggagacacagagattttggagcttgacaaggctttcataatgagacactgttctttgcctgccagagaccttaggcttttggatcccttgttcatttacccttccacaatattaggacgcgaaaaggctattgtcatcagtctggaacaaatcagatgtataattacagctgatgaggttattcttatgaattcattagatggatccgttattcaatacaagtcggaattgtcgaagcgccttcagtcaaacaaacaacactcgggtaaggaaattacttttctcttagtttttagtacatattttgttgcaaacagttctgaactgagcattggggaaaactacttaataatttgcttatacattgtgttcttattgaatgtatgctaattgctagcaaaaaattcaattttgttttagatgatcaaccttttgaatttagagcgttggagttggcattggaactaacttgcatgtctctagatgctcaggtatggattttattcatcagtttatatgttagttacattactatggattatatgcatctggtcacttgcaattatcactatttttattcaattttatcaagaataattaattgcaatatcattgtatgaaacatcatgccacaaatcctttcttaaagaagtatatggacatcgtaggcaatagaactggaaatggagatataccctgtgctagatgaactggcatcatctataagcactcataacctagaacgtgttcgcagacttaaaggccaactgcttgccctgactcagcgagttcagaaggtaaatttgagagaatattaaaatggggtctcaaagtctcttatattgtgtttttttatctccttttatgagctttcagtttaatccaggtccacgatgaaatagaacatctcatggatgatgacgaagacatggctgagatgtacctgactgaaaagaaacaaaggtctgagggttatcctgtgagtgaccttggttttcaatcaggtacattctatgaggccaaaatatcgtcaaaatctgctcctgtttcaccagtggggtcaatcggtggagtgcataaattgcaaagggcttttagccaattgacaagttcaagcagacatggaagcttcattagttcatccaacagtggagaaaacattgtacaacttgaaatgttgctcgaggcgtactttgtcgtcatcgaccacactctcagcaagttgtctacggtaagtgatattcttctttctgttcatttatcttaaaattgagtaagacacttttagtgctctactctgtagcatacatctcaacccattaactgaaagaaaatgctgttacattagtaacagcacacaacagaatatgatatggagaaagagagcatttactagagctattctgaaggtggttgctctatgttgagattggaataagagaccatgaaaacttgtcacacttatggtaaagtgtatgtattctgacaagtgtcaatttttttttttattggcaattcagcttaaggaatacatcgacgatacagaggatctgataaacataaaactaggtatgagtattgtttagtagtgtttggtagaccttgggtagtagcttttcttgtaatttccttaaaggttactaataaattagtttgtatgaacagggaaatagtgcagaatcagctgatacaatttgagttgcttataacagcagctacatttgtggcaacaatatttgctgcagtgactgctgtatttggaatgaactttgaagaagcaactatctttaactatccatctgcattcaattgggttctaattataactggctttttatgtggattcttgtatttgtcattcctcatttattttaggcacaaaaaagtatttccattgtaatttgttgagcggggagactaatcttatcccaatgcaaatgattctttcgtcttttcttatttattaatcttgtttgtcttgtctcaactaatgtagtggtcatttatcaagctgttgaaatttcttattttagcccttaaagtttttggtttctaacccgtaaaccttttaaagtaattttctttagagccatgttacaacgaaacgatggctagttggcaatggggagtgtgtctttgtgtacaaagatcccctataggaaaggctctacctagaaaagtgggaggaaaagaaagtatacgacataaaagtggagacaaaaaaataatatggatgtcatccaatccaattagtattattttgtgattcgcactaagtgtggatttcaaattttgaaccaattcaatccgcgcaatagttatatttttttaattaagagattaaaaaaaatatagataaatttacaaacattaagcttaggggaattttcataaatatgggaattgagagtatagtttacttttttatggtcataaataaataacactatag

SEQ ID NO: 300198 - DNA, 2679 bp, Cannabis indica
aataggtttatttagggcacgaaacccaacacaaataactccccttgagttcaacacaactaatctccctaagcagttgacaacgaagaatgttgacgatgaaatctggtcaaccaaattacggctgaaaaataaaactcaaacacaagacttagaataaagatgacatatgataactgaaagaaatgttttgagcaataatggagaaaaataatttttcctatatcttggggtaaattattataatgatttttcaactcctctcacatctgagaatagggtatttataggctctaatggcctgggatacacttgtggtctccaaaggacaagctgacattttggtgttgcgagctttaggtgcagaggtggtattgtgcctttgtacctttgtttggtgtcaggtgggcctgagttgcagaggtggtagccattgtatgcccttggttgtgatgtcagggcttccaagcgtggtgcctccactactcgtaccctctccacaatagaacttccaggaggcatggttgtactcccctagcatgtacacctcgtcctttgcatgcatgactcatccttgtgatcgtaactcatctgcttttgtcctcaacactttggaagatttcattaagcatggatgtgtcatcgagaagagcattgtcgagaagcttaaggtgcatgctttgccgagaagcttgcatgcgtgttggccgagtggccttaaaggcatgctggtcgagtggcatttcatacatgttggtcgagtggctttgaatgcaagctggatgagtggccttacatggatgcttgacgagtgaccttgcatggatactggccgagtgaatttgcatgcatgctggctaagtggccttccatgcatgctcgccgagtggccttgcatgcatgcttgccgagtggccttgcatacatgttggctaagtggccttgcatgcatgttgaccgagtgactttgcatgcatgctggatgagtgactttgcatacatgttcgttgagtgactttccatgcatgctggccgagtgaccttgcatgcatgttggtcgagtggccttgcatgctttctgcctgagtaacattgcaagaatgctagctgagttacttttcatgcatgctagccgagtggtcttgcatgcatgttggtcaagtgactttgcatgcatgttggtcgagtgacctgtatgtcgaggggctcgtaaggcatgcataaccacacattcatagtaatcttttaggtttgcgtctgttgatcttctagctaagcgtcagctaatctcaagagttagcctttctaatttttgggattaacacttgccccctagtctataagaatttttttaagtattcttgttgactgacttcgatgagctttaccccatcttttggctctgcggctacctttttaggtgctcatgccttgaggtcttcttgttatgaccctttattcgggagtgttggatcttaggagctacttctattcagtttcattgtgggtacttgtcatgtggtgggagtgttaaacctcttgagttttctcgacctcttttatgaacttttttttttagggagctttttgccacttgggctttcttaatctcttttctagtgtaactttattggagggagtatagaatcatagagcaatctcaatctcttctttgttacttattggatgtaagggaccttgtggccctttagactatgctcaaccttaatttaagatttaacattttattgcgagagcttgtggcctcttaggcatctctcaactccttacatggtgtaattatttagctaggagagcttgtgaccgcttaggtgtcgctcaaccccatctactacatttgtggcacttaaagcacgttttgaatgctagaaatcggtattccttttagagaggtgtccctctcatagtcatatctatttcctttttttccttctttttttatttatttattttttgtgctgcttcaattagtttgacaatgtctattgacaagtatagtgaataagtcaaacagatatatgtagagtgataaataccatatgtaaagtgaaaatttaatatttcattgttaagataaacacataagcacttgggtacattttcaagtctcaaagattaacttaggtgccctttttgatttagtacaatgtattaaaggctgactcaccattgtcaggaatgctttccacggttggttggcgaaaaagaaagaactttactttaaagaatcttttggacatttgaagtttataggttgtaggttggaggtttttgcttgactgtatcagcttataagtgttggcggtatcgcctagcagacctcataagggtctgacaagattcccaaagaacattcacatgtatctatcgccaagactctgttaccctcctccacatggatgtacttctttgctctctcatagaaatcattgttggaaatttattttatcaggatcttagatctactcacaagtatgttgatttaacaacctaaatatgaacttctaaaacgataaataaaacacataaaaagttaagaaaccttacagttatggcagcgaaatattgtgtctccttccactcagatctctaacccttgattcctgactgttgcagagtataaatcaagaatctgagcccgaatatccttcagttgga

SEQ ID NO: 300199 - DNA, 2196 bp, Cannabis indica
ttaaaatgtggttagtgtgttcactggagtcttgagaactttgtatttgttaagtttctttgggtttgtgtgttcatgtaaattcctatggatatttgattttatgtacaagctctcatgttgtgtttggtgtaaaacctttgttaaaggttctggttgtgtgatcagttaattggtgtgacttggttgaataacaagcttccttatcagttacgctgaaaatataatccatttgcatatgtcagtgaattctcgggagtaattaaatagatggttaattaggaatctctctaattttcatgcctcaaacttttcaaatcgtttaaataccttgaattattgagattgttggattttaagaatttttgttaaaattgaataaaattaaacataattttttaaatctaacaatctcactaattcaaaaatttttaacggctagaaaaatttaagaggtataatttagtatggttaaaaaagttcaaaaggcataattaacataaattaattatcccttcatttggcttttcattatgaaatgtataacgcatccttctagacctagagaaggtaattttcttttttccatatataagaaaataaacatctctgcatcaaatcaagaaccaaagtgtaaaagaaattataatatatgtttttcaagttgcttgaagaaggaatctacttggaaatgaaacatttaatccaagaatattgacaaacgaattcattgatcaacgacctacaattcttgagacaaaatccaagatattccaattgttatattatttgtttaacatataatattaaattaaaatgaaatgatacatattacatattaatacctattataggtttatattttatgagatataatgttattaaacacacatttataacataagatgttacaaatctaattaattgatgcttataactactttcttagaatagatatagtggaaaagatttatgcttataactactttgatagaatagatattgagaaaaagatgtggttgtagaaaattttccccatctctttatgttcacaatgcaaataactaagtcttcttctattttttctaatccaaaccgcttttctattgtggaacctagtctcagtcctagcttagtggcggcttcgcgcatcttctccaatctagcctccaattgtgctaaagatcagatagtgatggcaaaggagttatgagctacactccaaatctcccatcatgcatgttgagttgagtctaatactcgaatgtcatacaactaaaaccaactacaatgattataaatcaataatagaaatatagatctttattaatggtgtctaattcttacacaatgaaccgaattgtgtcttagtttcaagtggaaaaacagggactttatataggttagtccaataaattttgacacttgaaactaacaacgcctaaccaactgtaaaaactaactagagctaacaaaatactaattgtcttcactgtgctaacggtcataactaactacaattttcaccttgatccataatatagtagaaaaaacaaagacagttaagaacaacagtaaacatatattcaaaaataaatacatttatcaatcttaggatataggacaggttctatcctaggattccaagtagcttcaagcagtgcttgaattttgttgttgtgacagccttggtcagcatgtctgaagggttttctgcggtcgaaatcttgtctagcttgatctttccatatgcaattacctctctgataaaatatagtcgcacatcaatatgtttggtacgttcatgaaacatctgatttttgcttaagtgtaaagcactttggttgtcactatgtacatgtatttgtctctaatttaaaccaaaatcagtgaccattccctttagccacaaagcttccttcacagctttagtacaagctatgtactcaacctctattgttgaaagagccactatagtttgcaagttagctttccaattgattgtgcagctgtttaggcaaaaaacatagcctgtttgtgatcttttagtgtctgagtcaccagcataatcagagtcaacataccctgtaatatctggtgtttcagaccctgaataatgttggaattttatgccctaaataaaacctattttaatctaatctgatttgttatcaatagaaaattagaaatcattta

SEQ ID NO: 300200 - DNA, 763 bp, Cannabis indica
agggtattttaagtacaatatatatataaaaaatatattttaattaaatataaattagaaatagatttggttaatcaataaataaaaaatgtatttttcaatttgaactcctcgtacttaggtagttgttcccgttcatggtcgatgtggatttggtctccacgtcatgtgaagtttaaagaagttgcttggtaccaatcttatccacatgacttctaacttttgaacttggtttgattataataaaatagtactagtgtaatgtgtttgttttattgttttatttttattaaattaggtaaaaataatgttaagaaagtcattgaaatgcaaaataatttatatgcagaaataagtaagattaataacctaattgttatccagtgtatttaagtcactaacttattaactaaagaggcataattatataatcatttcttcttgtgtttgtgtttaacatactaaagcaattttgctttaaggtttttttaattttattttgaagtttaattatattgtttgtttgaataatatgtttatggttttttaagagtgttggcagtgtgagtagtgcaggttataacttttactttttttaaccaaactacatagataatttttttaatttcttaaattacaatcgtaccgcggaattttaaaactgttatattatttataaataatatattgtataaattaaatatgtacatgtaacaaactaatatgtaacatatgacatcattttgtaatatttggaggagtt

SEQ ID NO: 300201 - DNA, 2402 bp, Cannabis indica
taattgcatacgatagtttatttatctcacttaatctagtctttttttttttgatagaaagtgtttataacatagattcctaaagagttagacctctcggtcattaaaaaataggattttcgggacggaagcaaccgggagaaacccaaaagtctgatgggtaaaagcccatctagccacattgcggcaaaattacaagatctactgacataagaaaaacaacaactactaaaggatagagaagacttagtacaaaatgagatatagttctctattgccgaacgagaccccttcccattgatagcatcaatgaccaccctcgagtcattctccacaataacatacttagaaccgatatccaaggcaacagacacagccaaagagcaggtcgccgcttcaccacttaatctagtcaaaatcaagtttattggtcttattaattaacatataatcactagctacaaaatctaaatacattttcatagaattcctaattgaattcttgacagcactagattcacatcacattagtaacacatcaacaaattgttttgaaaaaataaatataagtaaatgtgtgtattactttgataccattgtgtagttctaattcaaatttgggaaatattagaccccaagtttagtattgtgaggtattagagacataaaatagtgatcaacacacccaaacacaatggctattggctgagagaatgaataagaccatacttaaaagagggatgtgttgattccttggagctagtttagaaagaaagttttgggttgaggcactcaaaactatttaaaaaatttcaaaacattacaagaaatgtggatagggcatgtccctaagatagatcactaagggtctttggttgtattgcctatgaacacataaaaaagggcaagttgcagcctagatcattaaaatgcatgattttaggctatccaaatggtgtcaaaggttataaactatggtgtctagaacctggatacaagaaatgtatcataagtagagattttgtcttcaaggaggatgagatagcaatgaaacctaaggttcacaatgagattcaaccaacaattcatgttcaggatatgcaaattgaggtagatcaataaacaaatcctcaaattgtagaacaacatcatgaaactagattaaaaactgaaagtcatgaagatcaaactgacctgagtacataccagcttgcaagagacagggtgagaagggaaatcagacctccaaaaaaatttggctatataaattttattgtatatccattgattgctgcagaagagttggaatcctctgaaccgaccagttattatgaagctggcaaaaacagattaaaatggttaagggcaatacatgaggaaatgacatctcatacctggtgttgagtcaatcaagttcaaagaaaggctagttgctaaagggttcactcagcaggaaggagtggatttcaatgagatcttctcaccagtttttaaacaaatatctatcagagttatgatggctaaggcaacaaaggaagagcttcatatagaacaaatagatgtaaggactgctttcctacatgtaaatctagatgaataaatctacatgcaactaccagaaggatttaaaaacaaagatccataacaagtttgtctactaaataaatttctctatggtttaaaataggtcccaatgtagtggaatttaagatttgataaatatatgaataaaattggatatgcttaaagtaaatataatccatgtatctaccataataattagatatacatgtaactttatgttgatgatatcctgatatttggtaaggagaaatcagatattaacaggttgaaagtaaactcaaccaagagtttaaaatgaaagatcttggtgctgctaagaagattcttagggttgatatccaaagaccaaaccaaatgtcattattctatctcaaaagggttatttacagaaagtgttagacaagtttggaatggactgttctaagattgtctcaacatctctaagtcagcatttcaagctgtcaagtttacaagcaccaacaacagatgctgagaaagagaaattgagtaagatcctatatgcaagttgtgtaggaagcttgatgtactctatggtctgcactagactagatttagcacatgccatgagcatcacaatcaaatttgttgctaatccagggaatgtacactggacaacactgaaatgggtaatgagatacattaaaggcacattgaataatggtctaacatgtgatggcgctagcaacttcaaagaagtagtaactggatatatggattagggctgtacaaaaaaatttgtaaaccgcctaaaccgaataacccgcccaaaccgaaccgaaaaaaccgataaaaattac

SEQ ID NO: 300202 - DNA, 1994 bp, Cannabis indica
gtaattttgtaataaattgtgtaaaatggatttttcatgtaaaaatttcaaaatattaaaaagattattttattaaaaatgatattttaatattttaaattgcaacaaaataaataaataaaataaaaattcattcagactggtttttaatttaataaaatgagaatgagattgcctttaacctaaatgtctaagcctgttctgcttttcttggtagtggtaattatgattttttaattttaatattgaaaaggccaacataaatatattttctcaatccattctgcctcatcacccacttgtttcactctcccaagctgacttaaattgattaatgatataattaagctgaataaccttggttaagggaccatatacatagataattgattaatgattatgtttatttacttattggttaattagttaagaaaatggagttttattaaggccggctatttgtgtaaacgtattatgttcgtgttataccatttattagatggctcaattaagataaatataaataagacaaaattattaaatattgtcaaaaacttaaatacaaacacaacacgtctaaatagcaactcatcatttattaataagtgtatgtacgagatcccctaatcaaatgtaagacgttcttcaatttaacgttactctcgactgtgaaaatatacgacgcgatttattaacacaaaattaaatacatattttgacacaaacatgaaattgacaccatcaaacataattataaagaaacttattgaaaataaaacaaaaatatttcaactacaaataataatcttcaataaaaaagataagagtgactttaggatttctttcaaacataaaaaatattttaaaattacgacatatttacttaacgacaatttaagaaaatgaacctaatacaacaacataaggatcgcgcaatagcccttaaaactacaaaagatgcaaaaattttatttatacttttataattaattcaagacatataacaacgattgttatcgtcattattgttgatatagatgttctattttataacgacattactatatatgtataaatttttttagtggtaatataaatggtatagcgagtcaatgacaaaattgtttagtatgtatttttttctttgttttgtacttttttaaataagtctttagcgatgaattatctccgttatagaatattaaaattttgagcagtaaactttgttccaaaaaaaattaaccaaaaccatgtgagaaacttagatttcaacaccctatagcgatgagtggcgacattatcatcactataaatgaactaaatgattatttctccactaattcatttactaaaaataattcttaatttttactttttgtgtgacactatgacatacatgatatatatatcgtttttttttttactaaaataggacattaagaggctatagtgttgctctgatcctatctggattctaccaagagaactccaacccgcctaaagaatgttgccataatcatatttgttagatcactcctacctatttggggttgtgtcacttagcccttatccaagtactaaaaactaactgttgggatttatgccctaaaagtaagtaattaatagataatatattacaaaatatatgaaatacaattataagataaatgaatatattaattatagaagtataaataataaatatctaaaaatttcttattcatatggagaaggtataatcttataaggatgtacaagagaattaagataatacgatatgaataaaactagtcggtagtgtattaatgtaaaatgaatctttaatatagtactactaagtacggtttactatagactatactctagtgtgtgtgattttgattcagatcacaaatatggatatacatataataaaggtgttgtgtataatttaattatgcatgattggatcgatatgtaataacatctttcattaacgtgtcatttaccatgaa

SEQ ID NO: 300203 - DNA, 4272 bp, Cannabis indica
gaacatatagagcgttatatatactgagagtgcaattctaagttagagcagccacgaggtgacggtcttctccagcaatgtacttattgaccctgctggcttatgtgccgagttgtcaggagttgttttgggctgcatctgctgtgtattttgatttcgtattttgacttgtcgttgtatatagtattttgtaaaacttttataaaaaaaatccccgaaacatagctttagtgtcgttataatgttcattaagtgttttattttagtgaagtttttaatattatcacagattttaataattaattaatctatgatttcgcttctcatcttctacaatttcactttgtaaggttggcaaacctatttcagttggaattaaagcttcaattccataaattatgaagaatggcaattctcctattggggttctccttgtggttcggtatgcccatagaacctttgacaaattttttagccacttagttttgctttcctccaagtccttttttatgttattagtgacaaaatagatgtttaattttcaaagcattgcagagcttttaaactttgcactccaaaatggtgcgccattgttcgtcgttgtatcatgtagaatcccaaattgataatcgacatgtttccatattaaagtcaaggatttttcccttgaaatcgtttcatatgattctccttcttcccacctgatgaagtaaccaagagtacatatcatttccttcttttggctcgaacaaatgaccattgtgaagtataaatacactttttgagaaagtcaatttttggtagcctctcttcttttggactaatccccgacatgtcctctgattcccaagaaaaggttctatcttctttattgggtgagctcattatcttttcacttttttgttcttccatttatgctcttaccaacaccattttctgtgctcaaaaggatcaagtagagtttcctcaagtttttctgttgttaaccttctcacactgttttcctcttctccttccaaatgtttcatgtatgctggcaaagagccctctgattgctatttctcctcttccgcaatgatcttctctttcaccgcgttgactttcctcatcaatttgcaacacttcttggcttgtttctggcaccctttgatgtcaactatatgagcatcgttaggagatggacgtctcaggatttgagctactccttgcattcaatgcaaccattctctccccattattgcattgtaaccaaatacaactttaatcacaatgaaattgactttcaaagtccttccagcaatcgtgacatcaagttcaatcgctccgggaggatagacctggttattgtcaaaggaaagcactagtaaagttgaagctctgatttttcttctaaccccatattgattaatgcttcgtgaaacaagatgtttgcactgttccctccatccactaagattctccctaggatacaatcttggatctaaagtcaatgatgatagcgtcatcatgtggcaattttacttctttgaggtcttcctcggtgaaggtgattgaagccataaggaaatgtttctcttcatcaagaatataattaacttcaagttgctgagctcgcaacctttttaccctattgatgggtctgcttctcttgttagatcatattttcctactagattttggttcagtacttccaagaatcatggggatctacttcagcatgatcacctttcccttggaataggttaggcagttcgcaagtttgctgccttaaatattcctttgttttccatctttctttgctccttccatcttgattctttttcacatactattggagtcctccctcttttattattgtgcattttccttatgagagattcccactcattcgtgaggtgacaaacgtcttgtctgatctctccttttgagctgcgctaccattatgtcaggttccttccatattgccttttcattattttctaatcaaatctgagcatgagtggtattgagcttgagctcgctttcaggctctactcttggcctcttattcatgtagcttctttgatttggtcttggcctcatgtttgagtttttgtatcatttttcactgatcattggtggtggatttccttttgatggcatagagttcagagccacttttccttcttttgttctcaaaattctttccttttctgctcttcttctcgttgctctatgacctcgaaaaactccttcaactttttctatcacttcagtcattgtttttagtttgcaaagaatgagttgttcacttgccaaggaacctttgagcacctttctagtaaagtaaccacccacatcttttgtggttacttcgctcacttgatacatcacattcaaaatctttgtaagaattattgaggatgctctccctctttttgctctgtttgatacaactcttttctctctttttctgcttttagcgtttctaccatattaagtggcaaagagctgggcaagctcattaaatggatcgattgatcattatttcaattgcttgaatcttaatagagctaatcttgttaaggtcgtaaagaatgtcttgcatctgattgttggattactggtctccaatgccatcttctgttcaaattggagcacatgctccaatggacccccttttcctttgaacaatgcaaaagttggcatggtgaagtcttttggtttgggttcatcaatgatccattttgcaaatagaaacttagccacatttctcattgcagctatattttggatcatccagctctgtgatccttccctctctgacttttgccatattgtctttcaccatctgttcttttatttgctccagatcacctccagattggtcagagcgcaatggttgtgtttgtgtggcgattattggtgccttttgtgccactcctattggatttggatcgcactcaatccttacttgctcattcctctattcttgcttgaagtgcttttggagcacctgctctgtgcttgcgaagttaacagaatccagtataaaatcatgaatttagcttgctttatcctcctttcttgctttttccaacacttctttctctttgagcacctagcgtcggttgatttctcatttctttctcaaagttctgagatattgttattgattgtaacttgtcgaaaaaatattgagattcagacccacttgtttgtccaggttcgtaatgaatttgagttttgttcattttggcccgtatatcatccatttcagtcataaatttctgcattgtgtggttaatgtcctcttgatgttgcttgttctcgtcttgatcttgctgacatttctctttagtatcacgctgctcttgctagaatttttcttttgcgagacgccacatttcctcattatgtttgtctcgcgcagtcattctttgattcatttatcttacctccaacgccaatgcagtagtcggatcaataactagattcgacgtatctccttcacttggagctattgccttctctgacaccttcttagaacccatcttagttcgtatcaacttcatatttttgttctagagaatccagcaaacagtgccagctgttgatgccgaaaattgactcaacaacaaaattgtattattactttgaattctttacaccaggtttgatctaatcaaaatacaatatgtatcggtttacatagattccttctcaattccttcaatctagtctagatcgattactttttgagctcaaacgtgctcttgaggatgtactctgacaaaatttcgactagtagggtgtgatcaagaattcgttcgtctttctaaataaggggtgcttctatttataggcgcgaaaagtgtattaattctcatatgctctttagcatgctttccttttcttgcgtttaaagatccttaagcgcatttattctttcctccttagagctccttaagcgcaactattctttcctccatcatgctctgttcttctgcctctaagcttcttgctctgctacccttttaatgaaaccatgcatttctttcacagtcttactatatcacaatattagctctttcttcattttaatcccctagaattacttttttgccaccgaaatcatttttatcccttacacttaagatatatacttgatttttattttgattatataaattagttgtataattagtttttcttatatactttcattttagaaaggctaattataatttttaccctctgaactttgacatgtaccaaatcatgctccttgaa

SEQ ID NO: 300204 - DNA, 1934 bp, Cannabis indica
atgttaatgaaacatacttagtagtaaatctagatcctggtaaaatatttccaacagtttgtatctaggtgaacatcaattactcactcggtcgctggtttctagggaaactacacaccttgcaatgttttgtccatattatactcaatacaactcagattgacatgattccaagtgcattggaaatatgttttcatgaccgttcgatgaatatttcgcaagcatattaaaaatcgacttccttcatatcaaaaatggccttaaaatccagagtacgtaaagtattattagagcacctaaatttgatcaacggaccacatacaatctcttagatcaacggttatcattcaaataagaggagcaatcttagccatctaatatggtgtggtttcactatggtctcagatcggctagaatgaaatattcctagaatatgtttttgtaattatttaaatattattagtttattcaattatcctcttctataaataggaggttcattcaattcattttattccttcacacattctaatcattagacactctctctctcttgactcaaatttttttctctaaaaaatttgattctctcactacatactttaagctagtcgcgcacccaaaaactaaagttgaagggtcatactttttttgtgaggggggcaaaaaataaatatgtttttattatgatttgaactcttaacttctataacatgtgtgaaatagtttaaccaaccatgtcaaagttattattatatttatatttattacctttaatttcaaatatatgttatgactaattaaaatttatatatatttttttctcaatttttttcaaaggggacgactgtccgctctcgcttctatatgggtccacccatgtttaaattattataagttcaagtaaacgtaactctattaaccgtgaagaagggggataaactattataaaattcggtgtctcattgtttctattttcctctctctcttttcgtttatcaaatgacactttgttgaatatttttacgtttttctatatggtgacttgtggagatactcaattttttctatttctacctaaggtagaggttgcccaaatagtcgcatatactaatagtcaatctcatcctccttggtcaatgtaggaacaagtatcattctatcttttttcaaatctttaaagaagtagcgtacttagtctagtgtaggttcactgtctcgacgctatatgtgttaaaattcttgatctggatagtcaaatagttatggatctatgggtactgtgccctattatatgactgattgaaatgaatttgtgcaccaccatctacatgacggagttaccttccagtttttattttgagtatattatattaaatatatttaggacaaaatcctgtcctatgtatatatataaaattaatgatatataatttatctccaaattaatttcttaagaattcgtcacatcacaatctctcctcctattcactgaatcactgaatctagagaggaattatttcaaaaataaataaaaacaacaaaataattataaaaatataattataaatatttttacaatttttaagattttattatagaaaatataattttttagtacattttatattatactcttattattttgttgttgatttttgttatttgtgtattatttttttgttgttttaatattgtttactattatttttttattatttttatgtatttttttattattcttgtgttatttttataaaatattataaaaaaattaaacatataactatataattttcactaaaaatagtaattgttgtaaatttttcatatacatattacttcaaatcatgtggacggatgataatttgggttgagatgcaaaatggccctcaatttagtaactaagttagtaaatgtccactttttaaaaa

SEQ ID NO: 300205 - DNA, 3014 bp, Cannabis indica
tgttttgttgtttgtttttttttactaaaatttgaatccacaaaatggtgtttggtttttgtttcagatgatttagaatgattaaagtagtgagtaattatttcagtttgtcttattaaaatgatttcttcttacaaatgtgcttttggaagcttttcttttcagtagtcttcttttttatattttttttggtctttgtgttcttaattgcagacaggcatgatttccccaagcaaactgaggatgaagctcatgggtgctcacaaccaccttaggaagaaagatggatccaacagtaactcctcaagaacttctcctgcaaaacttgctgattctgattttgtcaagaacagcttgttagacacatcaactggtgatgaagaaggtttgtttttctttcttgtgaaccaacctcatttttgagtgttttaacctttatttcatcttaaactaactgttatatgctcattcagttacatctccaagtttagaagtttcaacattgggggcaaggcatagtgaccagctaaaagagtcattcccagaagaaaatggtgagactggtcgagtaagaactcagcattgttcaaagggtgatagcagcaattcaagcacagttcatcctctgagaacattggaagatgacaatcttgattatgacagtaatgctagctcttctagttttgagtttcataagggggaaagatcaggacataatcccatttcaaggtcaatttcaagacctatgccatctaagtggaatgatgctgagaaatggataatgaatagacagaatgtacaagctaatcataatcatcataaaagaaatgctttacaaaaccaaactaataggatgccaaattcaaatatggtcagagttgctccagagtctggtaactgtgatatcaaattgttacttagcagaatggcagacaccaagagggttgatttctgtcaaaccgcctcacattttgggttcgataagttctcgtttgtttcttctggtaatcaccccattttggggcaagcattggttgatcaatctactcagagtaaggatttgaaagaattaggggagttaatatgcccgaaaagttcatcagatgagacttcaggtttgtactcacctttttttgtcctatgatcaagttctcatgtgtgattctttaacaatagacttcagtttcatgaactagtattctatagattctgattctgtgaacttgtaataatagtaagagcatagatagatgaagaagatgatatctttgagtggttcattatgtagggattcctgccataagatcagtctcaatgagagacatgggaaccgaaatgacacccggtacaagtcttgagccttcaagaactgctactcctgttggtgcaaccaccccaattcgcagcccaacttcctcaatgccatcaactcctagaggaggtgctccagcttcaactcctacggagcttgcccgtgatagggaatcacaacatccaactgaaatcaataagaaagaattgtcagaagaagaattgaagcttaagactaggagagaaattgtagcactaggtgtccagcttggcaagacgaatatcgctgcttgggcgagtaaagatgagcaggaaagacaaagatcttgtgctgaaaaaactaaggcagacgagctagcacgtattgaaaatgaaaagagagcagctgactgggaagaagccgaaaaatctaaacattttgcaaggtacttttcacgactttaagcattttcggcatgaagtagaactgtgagaattcatgtactaatatggtttatttgatcattttggtattaacactgtacagatttaagcgcgaagaaatcaaaatccaagcatgggagagtcagcagaaggcaaaattagaagccgagttgaggcgaatagaggtatttgacacttctctttgtcacttgttttccatgatcatcaaaaatatgtttgtcaaagctataaaaatgggaaaatgcttccaacatttgaaactctattgatattggtgctacttcatttggccttggaactaacattacaacacaatctgaatattttaggctaaagtggagcaaatgagagctcaagctcaagcaaagatggtacaaaaaactgcaatgacaaggcaaagatcagaagaaaaacgagcagcagccgaagcaagaaagaaccgagatgcagaaaaaactgctgcccaagccgaatacattcgccaaacaggaagaatgccatctgcttctcaatacatctgttgtggttggttaatgtgatgaaccaaaaaaaatcaatacttgaaaagagaaaacagaaaaagaaagaaaaaagaaagtggcctttcttgtttgtattaggaaggcctttactttacaaagtgtgtggtagtgataatcaagtttgtatgtaccaagtcaaacattcttgtttgtattagtacatttagttcccaagtatgaatgaatttgttcataaaagaaagaattcaagactccatatttagtctcaacattccaaacatgaaagacttcatagagaacactcatggtgatcgataccactatatcttgattagttagtataaatttagtagtggaatttacatattccatcttaaatttaaatacacacaacttgatactaaattatgtgtaagattgtattcaattttatataaagacttatttctttattttatgtgtaattaatcattcttttttcgtagagaaagaaataaaattatatttatctccaaataagtaaatatgttatggcacgaatcaaatgaactaaatatacctataaaaaaaaattgatatgctagtcatatccacacatagaaaaatgattctgtattagtaaaaatttatcagtttaatttccttttcggagttgttttcatttccaaatagtgtttgattgattacgtattaatcaagggtaaatggcggcaaaactcccaatactttcgttttggtttcattaaacccccacaa

SEQ ID NO: 300206 - DNA, 1330 bp, Cannabis indica
acataggattttaatccaacacaaacacctcctaaattacaacaggaggttttttttgcactttacttaatctcacccacttggctacataattggaaaaaagaaaataagtataaaagaagctgaaattctctttacttgaaatgaatatgttcaaatgggaatttatgagattatgtataggatgaatatgctttaaataaaatatattgcttgcatattggattttcatataatgtaattaaataactatataatattttgttgcttaattttaaactaagataacttttgtacttgtattaattaatagttgtgacctcacactttcaatatcaatacttgttatataattaaggagacgccaatttagttaatctaatcacaagttgggtattatttagtgtttattattatgcaaattggtaatcaaatcttgctcttttggagcataatcaaatatttggagtttaaagttaattttttatgttaaaaagctacctaacttattttaatattaataaaatatgtgaaaaaataatgaagagatgatttataatataactcttaatcatgtaaaattgttatacatataaccctaagcaataagtataacaatttatcagtaatattgaagagtacgagagaaaatttaatagcgctaatcattattgagtttgagttttagattaaatcttcataataggtttgaacttttttttataaggaaataattatttaataaaatagaaggttcatttggtaacttttacaaaatacatggtctaaaatgatattaacttagtttaaaagatcaaaaacaagcaattgtactttagccaaataagggaaatgttatctcaaccattctcagagccctaaccactaactcataataagtcaagaactcataaattttggttgaggagactaccttaaatctcgagtaatatacacaattcttaggtagagcaactcgagactatagaaccaacacttgaagaacaatatgaacttgaagcgaaccaagactcaacctaatagatcatagtcctcaatagttacaaataattgagagattcaaaatctaaaataatttcttattcatatgaacttgttcaattctctaaacatgaatacgagatatttaaaaaaaacaaaattatgagaaattttaatttaaagacattaaattattttctcaaatttggacaggtaccaaatttaacccgaacttttgaagtcttaaatgtctatgatttgaactaacaaaaatttgaaagatatgaacaagaaaatggacaaaagtgagtaaatacaagcatacaga

SEQ ID NO: 300207 - DNA, 2104 bp, Cannabis indica
gttaaaaaaagtttttgtttttttttttgctatttaaagatgcaatcatggaattcgccagaattaagaaaattcgatgcatcaaggcgaaaaaactaaataaaattcatataaaggaaatcaagaattattttcttttctaatgaaaaaataaacaaaattctcaaaaggatttaaatcccttgaaaaagcacacaaaacatcagatccaaaccctaccctaaccttcgaatatatttaagaatctaaaacattgaaaagtagaaacaaaacaatctacagaaacttaaaaagaaagaaaaaggagaaagagcatacccaggaagagaagaaagagtacgcagttgtggtggtagaatgaatcgaaaaatataggagtaatttttgggatatgaaaatagcaaaaaccggaatgaaaagggagaagatgataggaaaattgatcacaccaaatagatttttgtgaataagctgagctgagctgttttgttgtgttttaggtctctttcatctttaactcgctatatatatattcgcaaacgcggtacgctatttaaaatttaattaatataaaaaattagaaacacctcttcggagttgggcctaattctagaaaagctgaaccgtcttcgcacgtgccacacgtgcaggattttcatcgagcgtcagatcaatccttcaaaatttaacgttttttttttttttttttttttttttctgaatagagtactttagaaaggaatttctttggataaattttacttagtattttttttactgattttttttttttagtttttactgtgtttgtttgttgtgaagtgctaaaaacgatagaatatctgtttaaatatcgatttttctaaaccaactttcggggtaagaatttcattcaaaattaaattttggggttagaaaaaaataatcatttcatggacttaagggtaattttatattagttttgtcggtgctgtttttctgattctttttaaaaaaaatataaagagaatgttctgagttttaaataggaactttatttattatgtttattataccaaaattaataaccaacgtctaacacgtaaagctaaataaaaaaagattttgtttgatactaatgaagaaagagaggctgttgttacattatagttgcaatgaatttttattaggtttaccattttaaaaaagaggaggaaagggaaactcagaaataagataaaatttatcaatttatttttaggaaaagatgaaaagtttcttttccagagaaaaataatggaaaagttgaccatccagatcatgtgagaattttgagaatgtatgtgagatttttttttttctttttaacaaagtaaagtaatagtgtagagaaagagtcagagcctttgaattttaaaacaagaggaacaaaaagatcatcaaaaaaataaaaccagtagcgcagcggaaactgtttagtgttggcgcaaggtaacggtaatctttagtttaaaaggaaattagaagccgcaaaccaaactttctaaaccaaaacctgtctcactcactcactcactcactcgagcccacactaattaaaaataataataaaactaaggaaaagctatggattgtagatgtgtatacacgtggcagaagattataacatgcaacttcagatgggttaggttcacgaggaatacacggttttgatcgccttattcgaaggtcttaatctctgtggtcccatctctcaattatatcagtcattattatttatttggtgttattttaattttttgaaacaaatatgatttacttttacttttagaaaatacggtaattaatttaataaataaataattatcgactaattttaaacaaagatatagtttttttttcttttcgttaacattatcaccacctcgccaaactattaccacaccactattacactaaaccaaacaaattagaaaaataaaaaaaataatataattaaacaatttcattaagccaacaaagaggaaaatttcctttcacaaatctttatctcaaatcagaaataaaaaaatctataatcctgaatactacatattcataaatcaataataaaatatattataaa

SEQ ID NO: 300208 - DNA, 1548 bp, Cannabis indica
tctctctctctatatattatataaatcaataataataatagtagtgaagggaggaggattattccttaatacctataattaactgatcaatcatattcataattttgaggttattaattaaaaagagtattaataataacaataattagcactgatcatgtttttcgaacaatcaatatatataagtggaaaatattttgatatggagacatacatatatatgtatataaacattaattgtttggttatatatatatataattaattaagatatatatttaatgaaaaaagtagattgaattgtgttgtataagagttaagaaatgcacgtgaagatatagaggtatgtcgagccatttggtgttaaattaataaacaaacaaaaagagccaattctaataatgaaccttattgattctttcacgcatcccacaagatttgcttcttcgaataataataagaagaagatgatatatatatacatacatatatatatattatgcatggctatcaatgacacttttcattattgtgtccaacaattatgatacatatagtattggtccatagcttcttgtttttatcatgacagttaaaataggctcttttatttattagatattttacgatattatacaatcgatcttctacattattattattatgattatggaatcaaagtaaattatttaaggatctaaataaatatgatcaaatatttagtttcgatattcgatatatatattgagagattttgtttgtttatttttgtacttagttgcatatgttgaaataaaatcaatgcgttgtcatttataaaccagaccaggcacgcgtgcatataataataataataatgataataatctttttcttttaataaagattaatattaaatattaattaatcttaattactttgggagctgtgttttttatgaaaaataatagtatgtatcgtttgaaaattaaattatattttgcatggaaatataaaattaagttttattgtacttccattcaaaacaaaaaaaaagttttattgtactaaattaacgcataatttatgtttgtgcacatagtttgaggtttgttaattataatttccaaacattattggaattaagtataatttatgatataagtttttaattttaaagtttactatattaatttaataattattataaaaaataatggttaatcaattacatgcaatgcaagattaataataaaatgtaaatttaattcacaccaaatatatatagcaaatagtaattaccatttgtgtgtgtaattttgttccacatgatcactcgtgtaaatggaggttcatattattacaaatatttgtttatacatgaaaaatatatacaaatttcctatgattcgtaaatagtgatatttatatggtttacaaactcaatctaaataaataagatatattgtaattgaaaacacagacttagtttatttcaaaaataaaataaaaatatacggatccattaatgacacaaaatatgatatagatactaaaatcaaaataaac

SEQ ID NO: 300209 - DNA, 3929 bp, Cannabis indica
agggttattaaaattgttgatactcaagtgaaagaaacttgttctttcacattcagcattggtaagaggtatcaagctcaaattctgtgatactactgatatggatgttcctcgtattatctcaggtagtctatgacaatttgatgcatgtgctacttggcgtaacactaatgagaatccatgggaaggcagcatcatcaccttgcttctgataactaaccccacaacatcctaatgttttttccccagccccagcttagctcaggtatccaaaataaataaatataaataataataaaaaaaattcatctttacctctcttcttgattttattccggaagcttcttttcctgctaaacgctgtctcctattagccagatgaaaataaatgcgcatcaatacaaagaatgaaagaaacaatagttctttaagcgctccatttgcattgtatgtacagttgaaccaattaaatttttatatgttcggacaacatgataataaagaatctcttttggaccttcaaacttagctaacatatatctagtatattagttgtctgccccccattaattcatatttatagaagaaaaaaacgatgtctgatcaatattcactaagttgttcccaagcaggagctacaaaaaaattactgaaattttaaagattaagttgcaggatagaaaaaaaaaaccaaagaaaaccaatctattctaatcagaggagaatgaaatatgtgaaaaagaaaaatgtcactttacatgtatcagaattcagaatagtgagttcaagaattaccacagactgcccaagctcccctgcggactgaactgcagcaaccaagtcccggttggactcagtgtaaaagctagtgactagtccatattgacctgctctagccgtgcgaccaaccctgtgcaaaaagtctacggccgaactagcaaagtctgcctggtattataaggaaagaaatacaacagtttatgtttcagtatagattaataaatctcttcaaaaaatgtaccatataccaaaatcgcagatttcttatctaaggccatataccaatggaaagaaatatgtctaattttgtaatctccatccctaagaaagcattttaatacattcaattaaatttcctaaagcataacaaggacattcatttaaatttcctaaaacatttcaagccattcacttaaatttgctctatttctatgtttgcaaggagctttccacttgcctaatattctaaccaacaaataggcatgatcataactgacttgctaaaagtagacagacctgaataacatgtgagatatttgaaatatcaacgccacgtgcagcagcatctgtgcacactaggacaccaccattttcttgaaaatcatctaatgtctttgagcgctcctccaatgagcaatctttatggtaacgataacattcaattccagcccttcccaatatctttgctactgcttctacagcctctactgtatttgcaaaaacaatggttcgttgaccaccaccttcaaccgattttgagttggaaccttcattcacagctcttaacagttcgtctacctgagtatcaactgagacttcaacccacttctgctttaatctaaaataaaaaagaaccaaaaagttaattcatgtgaaagaaaaagttactaaatgcttcagggcaaatgaggtcattcaaaaacagaaattggtgataagataacatgatacgctagccaacaaaaaagaaagaaattaagatcccactaaaatagtagtcagcaaaaagtgaacttcacctggggttgtgacgatgaaggtagttcccactgacccagttggcgtctggaaacatctttttcaatactgcaccagcagttttctttccattcacaggaagtgtagctgctataaagatgaactgtttgctacgttcatactcttttctcactctcctccagcctgtctttttggcaggtccagcatcaacttcctcaggtaagtcatcaacatcatcctcaaaactttcctcctcatctgagatgatttctgtttttgaatcttcatcatcctctgcattttgttctgatgatttatcaaataccaagtgcataggcaacttaggtgtagactcttttgaccaagacaattttttttcatcatagcgtagcatgtgtataagacgtataactttattctggaagcccccacatagaagcatgtcggcttcatcaaacacctaacaggacaatggtagtacacacaaacacacacagattatcataatatcttctctccctcataggtagcctaacatggtatggtcattgacttaacgcgaagtgaacaaaacaaacatacatggcacaaaacttaccacatatttcacaccacgtaaaaatgccatctgacgacgtttgtgtggatcaatattatttaaaagtgcagcaggagttgtcacaactatatctggtttattgaccggccatccctagagccaaagagagaaccatattactaaaagtacgtaatttcaaaacgcacgggagaatcagttatacattaacagacacacaagtgataggaactaacttcattgtgcaagaattcaatagaaaacccagcaatgaaacagtagaaaggactaagtcatggctgccattgacacagcctttgtattgattaaaagaagaaaaaggaacagcagtaggttcactacttaggacctatgatgcaaagaataaccctcgaattctacttagtatcctatatgtactattatattcacacacacttaatacaaagacccatatcccctattaatactagggtctaacaccagaacagaagcaagcacgtaatcatatacctgtcgtccgcagacagctgcagctacgagaagtggttgaccattgtcatcacaaagaccatttgccatacgaactacttgttcgcacaatgttacatttgggcagagaacaagactaagcttatgggatggggactctacttgttcagtctcagtattccccgaatcaacttggccactgcaaagtctatcaattagagggacaagatagctatgcgttttaccacttccagtttcagcggcaacaaccacatcctttcccgtaaagatagacggtatggtagcagcctaatatgaaaaccataacaactacgttattcgtgtaattttttcagcaaccaaacaggtggtgggcaaacacaacagatatgaattaacatgataatgagccataaagtacctgaaccagagacggttggccgaacccggcattaaaaagcgctcgagaaaccttatccgaaacgcctagcgatgaccatgaaacgctatccacggcgtaaaaggtatcgcttccaactccgtcgttgaaggcagctgtaacagttgtcccaaatgccctgcactgtatgtggccaggtgtcttcagccaaaaccaggggattcgaagcgacgaagaatatgaggcagaatgggagagaaatgaatatgagtatcttaaatgggagaggaactttgacgacgaagacgacaaaggcgataggttgcaaaactggagtactgcaacaggccgatagagaatcattctggataatagatcagttcaaaatacggctttttttatcagtgaagaaggtggaaaaggagtttaactttgagggaccgaagaagaaggaagacaaacccttgctagaggtttagaaatccacattacaacctttattcaagaatacatttaaccaaataaattagctaattagtaatttttctctgaattttgacatatactaaatcatgttccttgaacttttttagtcattaaaaattgggttaatttcacaaatgcacaaaaacaactaaaaaacaacaaaaatacagttttacgaaattttaaacattttta

SEQ ID NO: 300210 - DNA, 3009 bp, Cannabis indica
gtaatgctttaactttctacagtttgaataataaaagcaatatgagcagaataacaataaaaactatttaaaaaatacaagttcaactagacaacctcaaggtcaattctaataaattgttatttttgagacaattaccagtcatatatttcataggaaattatcaaagcttaacagtagtagatcaatgaggagaaatgccatcagcttaaaaatatagatgaagagaaaaagaaccaacaaaagtcaaagattaaaaaaagaatattccatcattgaatttttcattttctgaagactatatgtacaaatgtatatttaatagtatcaaaagagaaataatagtagtagtgcagtgaacagcatattaatttaaataaaatggaataataaattctcaagacaacatatacacttaattcgctgtgatatattgatgaggtcgaaccaagtgaagctaattatataaattccatagaaatatttcttgaatcacgatacacctaacaaagaacaaaagccaagaagtataaaactagcctgatgagtttcaagttagagaagataaaaatgttatcttagcagtagacttcctatgattatcatcctgtccatccaagtacttatgaatttaaatcagctaaggttggaaggcaggtattagcacagttgccatgccactaagtgggttcaaaagagagatttctctaagttaggcttatgccatattcaacaacagttgcaagacaaaagattttacttgtataattacaaaagcaaagttatgacgttatgttcaagatttaaatgacagaagcgttaaccttttgggaaaagacaggtgtagctaaagtttgatgctaaaaaatacttagcacatactttcatcaacgacatgtcaatgcaaacacctccattgggagacaaggtgtgtccttcaattgatgtggctccaccatatggtacaataggaacctgctcatgaattaccacaaatcatttaagtatctgatgaaattatttatcaaactccagcaaagtagagaaagcaaataaagtctggatacatagacacaaacaaagcactatcttataaagcaaggagtaagaaccagacatttgaaagaattctttgtatatggaagaaaagaaaacttaaaagaatgcagcaaactaatagaaagtggagaagaccaaaccttatgcttatcacatagcatgactatcttggacacttcctcttcacaactgcaaaattacagcaaatttggtagagaaaataagtgaagtatagaaaaacatgacaagagcgaagaaaggctaaatggacacatgcaatagatcacaaatttaatatgaaactcaattagcagtactaaagatattttatgaaacaaaggaaccactcaattagctttaagacgctaggtacactaataaactgcagataaacaacggtcacctgggaaaaacaacaacatcggggatgttaacggctttgtggaagctatgttgtggtttaccatgggtatacctctcatcatagtccatggtcatgttatcctgcaaaatagattatattatacatctgcaaaaatgggaaatggtataagagataccatgagtttcaaggtaagatataaacacacaaaagattcatagaaacagtatactcttacttatcttttcctatcttaaaacaattaaatcaaacatctattaataaattgaataagagtaacaatgatacttggcatatagccttcaattcagcaataagctcttctggaacttccttgtgcgagcccttcaccacatagtcggtggagctacctttgccccccaaagtgacacctctgagattaaaaaagtaactacaactcatgatgaaccaaatatttcataaaccgtgagctgataaaataagtctttttattcacggtatatctataaaattaatttatttattacttaattgaccatagaccaatttccctttttacttaggagtattgaacaatcatcccataattctgagtttcatgttacttataccaagaaacatgtcaaatatggaattggaaaaccctatttcgattgaatgggataacattttttcattctatcaaattcacataccacttaattatactaaggcaaattgaaacacaaccaaataaaagaataataaatataactatgttgatcaactaagagtaagaacaaagtatttaaaaaaagtatgcaaaacaatacaaacatatgaataatcaatcattaaaacaaatcaaaaataagggaacacgactcactcaccgagaatcacaaaaggaaggattcgaatcagatgtgagggaaagtgagccagctgagaatgcaagcgccaagggaagcagagagctggaccaccacaatgagaatggactagaattcctgtaccgaaaatggaaatcattgatggtgggcggtggtggtacgttgagtgagctcctggtaaaggtgtgggaggcagagcttcggagattgagtttgagagagttgtataagcatttggagtaagagcgaagtgaagaaaaccatgaggacgatgacgacgccattgatgaccacgaaagccttaccttaattgaatatgagcttccatctttaatggtttaaaagtctcaaaaaatgtttcacgtaatctaaaatcatttggtaccttttatttacaaattttagacacgtggtacctttttcttacacgaaggaaaagtggaggggaggaaagggtaggagatataggagtgaaaagagagtcaattttgacttgtttagcataaaacaaaggggaaatttgatttttatacttaaaaaattttaatattttattcttagaccaatacatttcaaacttaaaaaaatatgacactttaatctaaaactcaaaaatacccctctcataactcaatcccatctctctctctactcgtctacaacccaaaccgaaccacaactcaaaccccccct

SEQ ID NO: 300211 - DNA, 1586 bp, Cannabis indica
gggcataaaacccaacacttttcccctttaaatgacccttaaagtcttctattcatcaagagactgtaacttgtgcctttgaaacaaaccatgatctagggaataaatcgagaaaagaagcaaatgtgtttgagatgctcttcaacaaagtaccaatcaacaatgtcataggcttttctcaagttaattttcataagacatctcgctaagatgttttagattcagtaagggcagaagctgtgaaagcggaggtggataaattgactgctaatgatttccttcgggaagccttatatccagtctagcttgcaaaccctattttagtttcgaaaccaaatgtcacgtggagaatgtgcatcgcctttactgacctgaacaaggcctgtccaaaagactactttccactttcgtggatagatcaaatggtagacgccacgttcgagtacaagttgctcagcttcatcgatgcctaccctgggtatattcaaattaaagtgcatgtcatggatgaggaacacaccaggttccaaactaacaaaggcatttattgctacaaggtgatgccatttgggcttaagaatgtcagagccacctatcagtggatggtcagcttaatgttcaatgatcagttagggaaaaatatggaggtgtatgtggacgatatgttggttaagtctaagaactccaatgggcatggataagatctcaacaaagcctttgtggtaataaaaaaatacgggatgaagctaaaccgcaagaaatgcaccttcagagtttccttcgagaaattcctagggtttattttcagctgtcgtagaattgagacaaactcagaaaagatcaagcccttcctcgagatgccttcgcccaagaaacataaggatggctaaagtgttactggtcgaattgccacacttagcatattcatttcaaaatctatagataagtgtataccgttcttcaacgcgttggaaggcaataagaaatttgaatggactgaagagtgtgaagtagcttttcagaagttgaaggagcatttgactcaagtttccattttgtcaaagcccgtggaaggggaagttttgtatttatacttggcagtgtctgatcatgatattagtgtcgtacttgtgcgagaggaagaaaaggtccagttccccatctattacgtaagcaaaagattgatgggttcagaattcaggtaccctatgatcgagaatttgaaatttttcttactgactgtgcctcaaaaactaagcccaagccataaaggtactaacgaaccatcccctctaccaggtgcttcaaaagtcagggtcctcaggtagattactcaaatgggctatggaacttagccaatttgatacccagtaacagccacgagtgtctattaaaggtcatgaccttgctaatttcatagtagagtgctctagcttgaatgaccttttagagatccagtcctggaatttcctacctagatggtctatgttgtgagagcgtcaaatgaaaagggagctggagctgggatcattatgatctctctgtaagggcaccaactctagagtgctctacgttttagttttttt

SEQ ID NO: 300212 - DNA, 3835 bp, Cannabis indica
ggctacaagagggggacatgtgcacgaaattctttatggcttccacagccataaggaggagaagaaattacattcagtgcattaaaaggagtgaagacggtatttgggtaagagagccaaaggacatagccaaagtatttatagacaacttctcccagctgttcaattcaaccgccccacctgtatgccaccgtcgaatagaatcttcaatccctgcctctcaacccaagattgctgtgatctctccactatcccttcggctgaggaaattgcatcagcactaaatgagatgggcaaggataaagctccaggcccggatggcctcccaccaagcttttattcgcaccattgggacgttgtgaaagaggacctgatagagatggtgacttatttttttaaccatggatctttgccacattacatcaatgacacatcctttgtgctcattcctggtaagagaggctttatgatgattaaaattgatatggaaaaggcttacgataagatggattggaatttcatcattcaagttctctcttctcttggtttccctcctttgttcttaaattggataaaggcctgcattactgtaaaggagatcaaacttcttcttaatggctcggttatggggaagttcaggccttcttgcgggttacgtcaaggagacccgctctcccccagtctgtttataatcgcggcagaaactctatcgaggcttttctttgaaatggaaaataagaataggctaaaggggttcaaaatgggaagacaaggcgactccgtcacccatctcatgtttgcggacgacgtcattctgtttggacaagctactttgaaggaagccaaagcctttatggagtgcctcaatgagtattgtagttggtcgggccaatcaatcaacctcatgaaatcatcggtcaccttcaccagaggggtccctcggtctagaatgatgactatctctcaattccttgagatgaagcgaatgcaggcagatgctatgtacttgggaattccgctcttcagatcttctaaacgaacaaaagacactgagtttattgttgagaaggttttacaacgggtccaaggttggaaaactaaactactttcaagtgctgggaagtcatgcctcatcaaatctgtaggttcagctatctcaaactatgtagtcgtgtcggatgtcattcccttggcctcagctagaaaaattgacaaggcactccgtgatttctggtggggtgatcagccagggagacgagtaatgcatactattgcttgggatgtcctatgccgccccaagacatgtggtggactggggtttcattcaactgaatcaatcaatgttacctttctcatgaaatgggcttggaaggccctaacggacagcaatagcctctggagtagagttgtgaatgataaatacattctcaatcgcgagttcatggatctccaagcttgcgctgcggattctacactgtggaaagtaattttaagctccagatgccatttatccaaagggctatgtcggagaattggtgatggcgaaaccacctcaatttggttccacccctgggttccaaatggaattctccaaccacaaccccgtttgaatgctaccgatggtatcagcttagtgaagaactttatccatcacaaccattggaatgaggctctgattcggagatggtttgatcatgaggacgccaaaagaattcttaatatcacgcttccaagcatcccctccccggattcatggctttggctcccggaacacaatggcaaattctctatcaaatctgcttatcgggtagtggaaaatgtggtggctaatgatactagtgatgctaagtggcgaattatctggggggctagtatgcatagtagacttaagatgctatggtggaagattttatccaacaacctcctcacccgaagcaagctaagttccatgttctccattggtgacactaaatgtcctatgtgtaatttggcagtggaagattctcttcaccttttctggaattgtccctttgcaagggccttgtggtttggttgcatttggcattggagaaccgacacaacaacactcttagattaggatgcttggttggtatggttcaagatggattctaaccgtccaagtggactcactttcaatgctttcttagaaggggctgctattatctttgagaaaatctggaaggagcgcaacagcagaattcaccatgcaactgaaactcctatgcctactgttctgtttcatactaaccaaagactcttggagatgctcaatatccactccccggagatcactacgaaccaatgtgttttgcgccccccctggttggacactttgcaacaccgatatcgcaattggggatacaatgtctgctggggctgccatttttaggaatgaccaaggcatagtgtcgcatattttcactaagcgcttctcttactcagaatctctaccaggggaagttgctgcattggcttggggtgctgaatgagctcataggatgaccatttctaatgttgtcttcctaagtgactcagtcgaagctgttaattcagtttgttgtaagattgtgcagggccgacccacctcacttcaccataatatacaagacttggtcaggatatttcaagacactgctaatcaacttggcctctgggaggtctcttggatccctcggaggaacaatggtgtggcgcatacggtagccaagtgggcactcgatacaaaccagtttgggtttattgatctgtccaattttgacagttccctgcttcactcttgagcagatggctgttggtttcttttcctttgttgtcttttgtttttcttaggcttgctaatcttgttatcttaggttcttccctgttttctgttttgttcgttggtatttggagtctagcttcatgctattctggtttttttgttttcagtttcgaactttgttcaagtgggttgtttttgttgtttgaggcttatcatcagcccagtaataaaaaaaaaaagaaatttaaaatatacatttcttgtttaaatgtataatttttgtacttgttttttttttccttttttgctcggtttatgtagtcggagcttataataatagaatataattaatgataataaatttaattccaagacatgtaatcttctattatatatttttcttttcagaataacatgcctaattaactatctaatacttcaataaaaataacatatctcaattttttctagggtttctctctaaattttttagccaccgtttgatttttggagtaagttaaaaaataccactttgattaattaattgataaaatttacctataattttatatttaattgaaacatacatctttttatatgtattatacccaaaatatcctgacataaaagagtcacatggagagtatgttgaagtgacaggggcaaaattggtacaatgtttaaaaaaagaggtaaaaataatagactttaaaaaagatggcaacaataaaagaggacattataaaaagggtatagagtgtaatttcttcttgatttttttgcttgaccagggctcattggccttatggtggctctcaggaccgaccctgaaggtaggcgggctaggcatgcgcctcgggctcacgaacgctcagggccccgaaattgtgaaataaaaaatattaatatatagataaattgttaaataataagaaaatataacaaaaattatttggtgtagtggtgtataaggtcttactctaaagtaagaggtcatgggatcaattcccaacctctactttttatttttttaaaaaaaatatttaatgtgta

SEQ ID NO: 300213 - DNA, 4842 bp, Cannabis indica
tacagtcatccaattggattgaaagttgagcactcaagattcattccctgctcagtttaatgataccgatcatttaaaaaatacatgtaaaagtaaaaataacctgcaaatttggccgtctagcagataaacgtccagtttctgtgttgatgttcagtgaacaatgaatacgcttatccttgcctgatatgttactaccctggtacaaagaaaaacaatattccaattgagttcaaaaccttgatgggacgtttggtatgagagttagacttagtgagaatgggcgttcggtaaattaaattttaatgaacaaggggtttgtgtttctaagtaacaaacgccccatgattgttaccacacaatgctacatgagtaaaaaattactatggtgttctgaattataattacaaattaattatttgaacattataagtatagcctttgccactcgagaatcgataaactggtccatagggacaaaaagctagcaaccaatattccacatagatggccaaaaaccactgtttaatggaagcagaaatcacctgcaaagggaggatgaagtttgaaatcagtgaatcaatggcacaaacttcacagagagcagcaatggcatggcaagcttctttcccctctgcctcatcttcaaatgcggcaaatgctgttccataagcagatttgttcacatctagcttttcttgctcttgtttttcagcaacgtcatctgtaatgacttcaacatcgtcttcagaatcatcaccggctaatgagcgttccgcataatccatgaaatcaaattctgcagagaccttcccagctaaaattttcaacgcacttatactaactgatggccaaccacttgctgtgaacacctcagccggaagatcagcatcaattttatttagtgtaatattacggaattttgttggagcctttttcccttcttcaattattttatcgatatttggaattttaagagtcttctgcactggaagactgacatcggggtccttgctgcaaaaagtaacaatcgagttaaattggaatccaagcagactggcagtatcaatatagactagaatatgacacaagtaaacttcttatgcaagcagttgagagttcaacgccactactcgcacttctttctcccatctccttaaacactatcacgatcttcagagataatttaattttttatccatcgatgacttccattttctttaaaattatgcatggccgccttgaggatcccagacatatcaagaatcaattcaaaaataaattagaaggaaagtcgaattgctctcaacctagcgaataattggttatgctttccatgtatatattttgtgttctgacaaaaagaaacctaaaaataatctaatcaccacgaactcactcattgcattccactaagcaaaacttttctggtcctagacacaatcttcagttagaaaaactcaattaagaaaaatgccatataatttcataaaaataaaatcaaaagatgagaccaggattctatcatgtcctcattccaacacatcaaagaaaggatactccatactccatgttttagtcaaacatgcttaatatgtattgagatgcaacaaaaagccagttgaacaaacacctaaaattcttctttatagtttacctattctggattccgccgaaaaggagctggcgcaactgagtatcacttccaacattcatgtacttagcatctggacagtacctggaagcccacttgcgaaacctgttaacagcaacctcttgctctcttttcgctatcttttccacctcagcaagataagcacgatcaaccaacatcccctcagtttccattttgactagaagctcaccaaatggtttccagtacttctgatagaaatcaaacatagatccacgttcttgttttccatcaattgcccaagccttgtctgttagctgttttctcaaactctcatagagcttaagtgtagttattgcatctaaggcagaataacaaatccatggtatccgctcttctctttgaagcacgtcaacaggtgcaatggtagttattttgccctcagatccgtctttttttaactttttcttgccaaatatggttttcattgatactttaccgatcaactctttttcgttatacagctgagccccagacatgacctttgagtcacttgtaagtgcctcgagagaataaccaccttttgcacgccttgaggaatcccaaagacgagccatgtgcattgtatcagcatgaaaacccgcaaccttgagcccatagttctcaacaatatggtggtcaaagctataattgtgccaaacctacatagtagacaagtaactttcatgattcttcttttttatttttaacgtaactagggggctaacacatgcaccccaagaccaatttagtctggtgaaacaaaatgatggccaacaaaattaagtcagaccaatttactggaacttagtgtcactaggttcaaaaaaaggagatgaattacctttttaatggagggatcttcaaaaaagggggcaaacacagctagaatttccttgccaccaccatcaagaacatcaacccagatacaagacttcccatttccaaaatctgcttccggtccacaataaatactaaaacaaataatctctccatgatcaactggtgtttcttgcttcacatcaatattcgctacctgttgttgacatcttgttagaaattatgcaatgccacaaaggccgagcaatatatttgagattgcaattagatactattcctatcattagactcaaatttgtgtaaataaagggggaaataaaagtgcaactcaaagttgagtttcgtacctctgtatcacaagcatgtacaagatgcctataccaggttgtaagcatccaaacaactttctttgcaacagggacactatccacaataaaaactttgctataaaggctagtaaggttttcctgaagatttgaaatcctttttggcttcaccttctgcgagctttgtgtaagtggcgaatccaaccgtcgtggagtatcagtttcgtgagcattcttcttctccagtagaagggaaggaatagcttcagtggtagtaacagcattccctccactttgagcaaatgccttatcctgattgagtttatgtaccacttccagctgtgaaaccccattctcaatatcaagcagagaccttctactaccctcttctgtaaaattaggctgcatcatcacagtgtttcttgaattttgtatgactacctcatttgtcgccgccgcaaggtgcatctgaatttttcccttgttaaaatcattgctatacgaaaaaactgaaaaatgttgttgattatcttcttttttagcacttgttcttcttccatctgtacagtttgtggtagggctgcctcccactctacctctcttaattgtttcagcttgttcttgccattgtaaattaccaggctttctttcaatcaatgaactgctggtgaacaacgtatcctttctaatatgaagggaattactactactactactgctgctacacatagaagtcccagaacaactctggattttgcatatctttcccctgcaatttatcataatcccaataaataataataataatacacaaaaatgttacaaataataacccctcaacctatcatgtagtttgaaaatcttatcagtaagcaaagaatagattaaagagaaaaagaatgaagctttaccggtggaaggaggagttggaagaagcccagaagtagcgagcagaggatgaagccattagagaagaaaaataaagagaagaagaggagtgtcttagtcttagaggtgtggtgttgatggatgagacaacagtagtagccatggctgcttctgcaactcttcccatcagcttactcctacaattggtcaaacaaggaggagccagtgtgtcaacagactacagtcccagtcccagtcccaccatcatcatcatcatcactgtaaaagcatatttcttttctataagttatttcaacaaacacttagaaggcattccattattatgttttcatacaataaacttgttatacatatatatgtatgaacatataatagaaagcagaagtgaatagaagattactgaccttgaaatatggaaggaaggaggttggaggtgtagggtttatgtgtttgactctagtactggccatggcagaggaggcaaagcttgggttgggttgtggtaagggtatattcggtaataacacactttataaaaatgggtagatagattccatttaatggattttcatatgaagaggtacttttcctcaaaccctaaatacatcatttttggtgatatatcaatctatatatctatatataaatataaaggaatgtgaggtggcattctaagaattcatttctctatgttttcttttttgttatttttttgtatttcttaagaaactttgttaattttaactcaataatagaaagttctttagaaaagcaaaaatcccacatcgtttagaaaatattaagaatgttgtattataggctatatgaatgtgtagtaatttttgtgaatgttgtataatgggtgattaatagtattaatctagcccacatagttatttttttaaataaaatatatattattttattaattatttaaaaatctaacaaatgaaaaaattattaatttattttcaaaattaaagttttttataaattatatttttttaatgttagcaaatctatatatctatatgtatatatattaggttattgttacgttcattgcacgtatacttaattatagtttttattttt

SEQ ID NO: 300214 - DNA, 2135 bp, Cannabis indica
caaaattaaaaaaaaaaataagtagaattttagtataatgatgtgagtctacgtgtaatatccaagtaataaaaaaaaattgtaagagcacacgcagctttggaagtagaccttattgatagtgaaccatcctttgatctttcaacgagtcctgctggcactaaacctgtaagcttgtttctccccaggtttctgcattataaaacagaaaacagaggtagatcgaattatatatttggtaatccatgcattttaacatgtatagatgaaaactagagtgtaaaaatataacttacaagacttttaattttgacaactgagaaagaaaatcaggcactgatcctgttaaattgttgtttgacaagtccctgaaatatttcacattaacaatatatataataatattaaattaattaccgatggattgtaattaaataagattaattaatcaggtatatattactcacaaggactccaactcagtgagttctgagatatgtgtgcttatctcgccagtcaatccactcgaagataagttcctatatcacacatatatacacataattaataagatttgaaattcataattaaattaattaacgaagaagaagagtaaagtagttaacttacaaagatgtgactctaggaggatctgaaccgtcaaaattacagttgagacccacccacgagtagtttgatgggagacaaggatctccatcccaatttctcttattaactctataagctgactttacgttcgttaacgcatccactacatacaatatatattataattattaattatataattaacaaaaccaacactaatcatagttaagttataattaacgaaccgtcagcttgggccgtttctggtagagagagatctataagagaatagagctcgatggcattcaagattggaggtagagtcgaattccaggctttgttgattgagattgtatagttcaatctcccagtaaatggtgaaatgctgtagatagtgtttgttgacaagtaattgggtacacaatttttgtataagttgacactgtttagtttaatatcaaatgctctagactcattgggcttgagtttttcaagttcagcaaaatgcaagtagacataaaatctgttactctcatcgctggccgtcacaaaaagctccaaaggtgcactctcattgatggtcgtcgctgcagttctcattatctgagaaggtactcggaattcatttgattccacactcaacgacgtcgttatggtcgtccaaacactatcgtcctgaaaactcccccatttccgatcaaaaacgtcttctggaaacctaaaagaaacaaaaattaaaaaatttgttcctttttaattcatggatcaattttttatttttatataaatataagaaatatgtcatgattcaacatgaaatcaaacacattttaattaataaataatatagtaaccccaatgctaaataatattataaaaagataaataaaataattaatcacttaatcacctctgtgctccattagtagttgaaccaatatcgagtcgatcaaccatagccaaagatacaaattgatcaacctcataggtattgtttttcaaaggccgaagttctattgcgttaacaaaaggtgtccctgttccagtattgactagacaaacacgaacataattctgtaatgggacatggatgatctcccttatagaaggtgtagatataccctctactttcaccgtatcccaaaaattagcacccaagtggatatcaaatttaggggtattatttttggcgtcataattcccgtacagaaaagataaccttatcaaatactttgtacccttttttatgtttatagtgtaacagtttcttattccatcaggaaagcttctgagtcttactgcatgttgttgaagattcagtctgtaaagtggcagtatgctgttactcactccactactgttgatgaaaggttcgtctgagatgtaatttatgcctgttgttggttcggcgaagctggtgtttttgggtgatccacagtctaagctgatgaagcctgatcgataatatatgcataagagtcttaattaattaatattattattattattttataagttaatgagta

SEQ ID NO: 300215 - DNA, 3270 bp, Cannabis indica
gctcaaatctctcttctctgtactcatttttgttggtagagaggtatgtgatttcacaatttcaccttttacttgcttaattttattcctttcgtcttcattttgattttgaaccccaccagacgaagaagaagaagaagaacccgaaaatgcatgcatagctagccctacttcattttcctgttttcggattgaacacgacgattagtgagtctagtaaattagtcgagtaacactccctttggtatggtttctgacagttgattagataacagatatgcttcgtattctcagtagaagaagacttggaatttcagtactcagttatgaaattttcgggtcaaactcgaattcttatttgggctttcttgctactaatactactattactgctaccttctcttcatctgtaacgactgttctgaaaaaatctgaaaagggtaattcttctacttctacggtagcttaccttgtaaactcatgtgggttgtccccagaatccgccattgttgcttcccgcaagttaaagctcaaaaacccagaaagagctgattctgtattggcattctttagagagcacgaattctcggatacccagttctcaaaaattgttaggttacggccacggattctttcagcggatccgaagaaaactttcttgccaaagtttgagtttttctactcaaaagggtattcaaagaaggacctggcgagtcttatatatgctgatactcgtattttgtatagaagcttggataagaacattgcacctatttataacctactcaagagtgttttgcctaatgagcttttggtctatggttcgaagcaccaaagggtatccttacttcaaaattggaaatctgtgattgccaatcttgggttgtcgaaagatttaggtttcactaatattgcttttctgttgcaaaattttcctgagattctgatcctgaaacctgaaagatttagtagtattgtggataaggttaaagacatgggattttgtccaaagaaattcactttctggtttgcagtttgcactttctctaggaaggattttaacagaacttggaacaggaattgcaaggcttacatgaggttcggttggtctgaagatgatattctaaatgcatttaagaggcacccgaattgcatggcttgtctgaaaataagatagagaaaacaatggattttctggtaaacaagatggggtggtcctcaaaaaatattgtaaagtgtccggtggttctgttttacagctttgagaagagaattctacccagatgttctgttgttcaagttttattgggaaagggattgatcaaaaaagatatcagcttttgtggtgtgattcaaagtgttgagtcaaagttcttgaagaagtatgtgaccaagtatcatgagcaagttcctactcttttgagtgtgtacaaagggaacatagatgttaaagatgaataacaatagaaacatgttttcacctttttttctttttgtgtaaacaagagtttggtatgctagtgataaagcaatttgaagcaaataaacttttcttgtgtacttgtgttttatgcatttgttgctatatgagcttttgagttctgatatgctgctagtgcttgagtgcctgtaaaatttcaatccttttcaaaagtttgtttttgtgaaatatgattatcttcttcttcttggtttgcagcttcaataatattgttgataacttgatagttgtttttgttgtttggttgacttatcatggtggttaatcatatatttgattatgtaatttcgattattctgaatgggtcattattgtcatttgaattattatatcatgttacggtcattagtgagtgcaataaagaggttcatttgattttgagttagatttgaaatatggccatgaaagtgtagagattaatgatgcttgtttatgggaccaaccatagaaaagactagatatgatggttgatgaagtcaaaaatatgataaacggtcaatttagctcaaatttatagaagaaattttttgaggatttacagtgcgaaagtaagtaaaattacttgatgaaacaagttgaacaaaaattcagtaagttacacaataagtatagatagtttagtcagttatggaaacaaattgccaaaattcaataagttacgcaataagtgtagatagtttagtcgttatgaaaacaaattggatttggatggggttatgaaacaaatactatggttttattttttgaaagaacaccttattcattaaccaagaaagatagatgtgaattaacaaactaattgtttggctagaaactctagctattttagctaatccatctacaaaagagtttagacaacacttaataaagaaaaaattatgttggaaattagctcactaaactagtcactagcagaatgctacagcatcagttcaacacctatgtatgtttttctaaagttgacagttatgttagttggttgttttatttaacggtctaaaaatgtcaacacatataaatagacttaacaactatctctcaagacaacttcatcacttagaagatttctccgtattgtctagaactctttctctttctttctctctcaaattgtatttttgctctggaggattaaggtatggagaagggttgtaaaagttttctagcgttttttatccagactactcagtgtgagattttttgtaattagtgttgtacaccaataatgagggtaattgagtttaaaactcttgctataatgtgatgaatatcaataaagattcaatctttttgttgccattgattttgagataagctcccctgttttattcattttggtttaaatttttaattctggttgaatgtgtgaacttgtgattcttataagttgttatgaatcataaaatctagattaatgtgaatctaattcacatcaaaatggtatcggagcatgggttatagtttaaggcttcaagatccgcattcaaagtctttaagaaccatattcaaactttcaagatgaatcagattcaacttccaagaagcaaatctgtaatggctactattagatttgaggtggactaattcaatggctcgaacgactttagcttgtcgagaataaagatgaagattttctggtgcattcagggatctcagaggcattagatgatgaagctatgaatctcatagaggacaataagaagaaaactgagatcaaggcaaaggcacatagtaccattcttctaagtcttggtgatgaagtgttgaga

SEQ ID NO: 300216 - DNA, 2258 bp, Cannabis indica
tacaagaaaagcatcttggaggactctccaagcaaaaattttaattttttgtggtatctggagagaccaaaaataactccaccattaagaggcattagaggatggtgaggattgattaagttcagccaaagatgaagcaagatgataacctgattttactgtgtagatgcccgtatgatgacgatgccagattagaatgtttgcatttggaaaaaaactcaagggaagagtgatcatttggtcaacatctaatagagaaaaatattaggtaagtaactcaacattccattgtctatcatcggtgataaagttagccaccaccccgtctagaggtcctgtataacgaatcaaaacaaattcattgtgatcaggaactcatagatcaaaaccacatctgactcatctaccctcaccaatcttccatctcaaatcatggtgaacgaccataatgtgcttccaaggaagaattatttagaaagactttcaagaactttgctttaaagagattgtggaattttcaatattctttatgcttagtgtgaagagtctcattaaaatgcacaatcattcttaaacatatataattccttaaaaagaataaaatcaatttataatatcgcttaaactaaatgatgctcttggatttgtcacaacttatgaaataaaacaaataataggaaaaaaataatataataatttttcttaggttgaataaaataaaaattatatagattaagataatattaatattaatatttatttatttatttaaattaatatagattaagataatatttatttattaaatattattaaattttattataaaatttaaatagttatattaacagtattgatattgttttaaaatcaaatttttaaatgtttcaataaatatttttaagcatttgtcataattaataatttattctatttctctattcttttcttatttacacattattaattagattttaggaaactcaataataagtaaaaaaataaatattagagagcttaataaaaataaggcagatgatatgtggttcagacgttaaagaatcctaattcacgaatcgatattatttagaaaataatttcataggagcacaacaatagcggtgctctctctattttagcaatgttttaaacttaagaaataaaattggggatccctttacaataagagtgtttctctatttatagacaaggacatcatctgatcttattagcaatagtccatttaattaagtatctaatgaaacatggttagcctactaatggggctaattacattttcttaatggaaagtattcataacattcaactgaattgaaaagactcattgggataatatgtgaagttgatgtgacctattctctattgatgtgacaagcataggtacaagctgtctcttttaatgttggaaaaaggaaatgttagaaaatagattgggtatatgtatcccaacatttatatactgcctttctaaaggtcttatctttaggtaaaaggccctacctttccaagatgtacgaaaggaacgggttcacaatacccttttgacatacgaaaaatattgcccataggtcttctcgcccttatggtaggaatcatgctagtgttatatgagaagcatgaagtcctaaagcgataagagaatgagtttatagaaactcttaatgagatctatactctatgtagagtaaagtaccgagctacaggagtactcttgatagactcacctatgtgaatgtgggagggggccgcttcctatggaatttcgggtaaaatttctagaacgttcactatacttggaaagatgtgcatggccattaacacacgagcttatttgaatacatccttgaaagattggtgagtggtacgatgtaagagacagagttcaagacttcgagttactctagtaaaatctaaatcgtattcactacacaagattaaaatcgaaagatatctttgctgaagcactttcttatagttgtttgatattgctcgagaaattttttttaaaaatttcaagtgggggattgttggaacttttttgaaatcgtataaaaataaaaagtgaagtgtgttagtaaatggagtcccacatgggatagaaacacttcattagaagtgtaaataatgtgcaagtttgacatttgggtttgggtcccaagaggtacccagttttgtgcgcatgggtgaggactctcacactcgaccaccacacgcgcgcgcgcaccgccgctatcatc

SEQ ID NO: 300217 - DNA, 6849 bp, Cannabis indica
aaaataaaatttaataataacacgatctaaaagtgtcataacaaaatttggtatattttttacatctccaataaagtgctataaatgtggtgtattgctattttttaggaggaaattacattgtatacctactttatttgttttgatttttacctccattttcattttctttaagatatatccacttttatagatgatgttcatattatactccttaagttaatgtaaattatatgttagacttaagtggaaggtgggggtatatttggcaactcacttacaaaagtgggtatatttcaatgaaatataatataaggatatttttgattaatggacataaaaaagggatatttttcaacttatccatttttttttagaacattttactaaaatttaactccaatggtgatgtaaaatgtgtgccaaatttagctcaagctaaaaataatgctaaatttagtacaaacaataccatgagtcaaattttagtccacaataaatattacattttctaattacttctttaccactaattaataatatttattgactttgtttggtatatttttaaatgaacattaatggtaatattggctttataactaatttgttagcacaaatacaaaaattaggccaagtatagctatatggtatgttttgggcttaatttaactcaaaatatacatcatccattagagatagtcttaggaattatttgaagttagttatattaaaaaaattatcgaaaattgagttcaaggtcttatttgtactactctaaaaatagaattcattttgtcatttaataaaatagagaatttaatcgataacttttgtaatacacaaaattcaaaataatcttcaccttttgcttttaatatctattgatgcttgattaactctaacaatctcaatagttcaaagagaatttttaacggtcaaaaaaattcagaatgtatgattagtatatgttaaagtttaggggacaaaaatcttaattagtctttttctaatatgtaattaattataaatttaaaatatgatggttttttaactttattttgaaccaaggtggggtcttgggccttggcccaatttgcctccctcttaagacatcttacaaatccatataaataagaaaaatttacttttttttgttatttttatttatttttagcggcataagtacccaatgtttataaaactgtaattttctttcagttttatcagtacagactctgttattgtctcaaacaagacacatataagacccaaattctaaattatttagtctagacgaaaatatatagtattagttatttccaaatatttttttaataattttaaaatggagcctgatgaaaatagaaaaaaattatagttttataaacattgggtacttatgtcactaaaagaaattattaggtttaatgcctcttacaaactcaaaattttgggtacttatgccctatttacccttaatgtaataatacaaaatgcatgattttttaatatatttatttagttgaatatttggtataaattattagaattgctacaccaaaagtaaaaaattttatgccaaattattgtagattctataccaaattatgtaaggaggtcttataggttcattagagcttgtaataatcatagctaattaataaaaaaaatatattaatcattgcatcaatggtcaatctctgtaaactattataaaattatacctggattcttgttatattgatctcttatttttgtacactctttctcatcaaatactataatattgttttgggctctttattttgtaaaaattattaattaaattctttattttttgagataataaattaaaccatatatttacaaaaataatttaaattagtacactaagctcaatttttaatttttatttttatttttttattatttttttttttataaatctaactttaaacaatttttgacatgaacaaatgcagaatgtaatacctggtactattttattaaagtttataacactttgagattagtttattattaaatttattttaacaaaaaattagttatagatactactttacaaatccaatttgttatttaacaaaacaaagaatataatcaataatttttacaaaacacaaaatttaaaataatatttactcattattttatttctcaatatctcaaacactccttttatatatttattttattgttttaaaaaataaactaattagctaattcatcttgaatgttatcaattaaataaagaaagattaagactaattcacacatatcattatattatcaattaactcactataatatttaatatatttcagcaattaatggtgcctaacacccttctcgatatcatatcactattaatataattaagtatgtatctcatataattgaatataataacttttaaaaagtattgctaaccaatcgtaaagagatacatctaaaaagaatcatggtcaaagatgatcatcatcatcagtaaccctaactctcctgtgtatgaatggagcaaaagtacttgaattgttcatctccggcgggtgccacgtcatgtgcccgaactcctccctaacttgccctactccggcctgatgatcttgctcatccactaacccaacaccgtgttgcaccaccaaaaccgacgcctccgccgcgaagcttgagcacaccaagatatcccccaaaggacccaattcagggtactccgaccagtcagatagcccagacgttagcggcgacactattcctctccctcttcccaccacataaagatcatacttattttccgctgtgctcacaatcctcactatctcttctccattatcaaccacttcttctatcaacatgattgaatggtcatcctttgactttagcttaaactcttctatgtattgatcatccaatggcttctccttctcattgtccactatggcattgagtattccatcttcgccgtcaccaaaagtattagggctcatttctacaacatttttattaggaatgaaccggtaaacagtcaagcaaaccctagggcttttcgccatcctccatgcatacgctagggcttcccggtcatcccttcctccaatgaagatcatggagaattggttattgagagcagaagatcgtgtgttgaagccacggtcgaagaatatggcggcggaacatggcgtgttgtctagtacattcttgttcacagcacgaaacggagagttggcgttgctatcagttcctccaccaccgtccgccgtggaatggacgtggaaagggaggattatgagtgtagcgcgcttgtcctcagcaaggctacaaatgtcttcatgcatggtgttataggcagagacggcggtgagtggttggacggataaattctcgctttctaagctttcgaacgcctcggcaattccttcaacttttccggcagcggcggcgccgcctaccacggcggtgccggggatgttttccgcggtcttgcaagtgtcgtggacgattagcatggcggaggcgtggccgacaagctccacgaggtggacggcaaaggcgtaaatgggagattgcttggtggggttggaggaggcgagaaggttgacgaggccaccggcgttgcgcgtggaatgcacgcaggcaaggattcggaactcggagtttccttctatgcttcttatggttttgtatttgtattgactaagactacgctttcttgaataagtcaaagataaaattggtcccaccacagctgtcattatcaatagggcaaatactaatattgtaaatgtttgcatgtccagagcctgaaatttttatcattaattacaaaattaataaattaatattttcaaaaaaaataaattaatattttaacataaaataaataaataaataaaaaaaatatttaacataatattaaaacccttctaaaaaataatattaatgtgtttctaaataaaatttattatttattataacaagtgttttgaatcgattttatattagtatattgataattaaaattttaaactgtttatgtagagtgtatattatagctatttaaaatattctaaatatattaatgtgacgaaaatagagttcaaatataaaattataattattgatatgttgaaagtaaaaatggttatgttgcttttttggatctgtataacttccttatatttatatggctatatatatatttatatataaacttaccaacatgtctctcccagtgctgattataatgagtgcaagtaagcctttagtattcaacaaaagccctagagccaaactatcccttgccttcatcttattgagaaagtaagccacaataaaagtgctaatcactttagccgagaatgccaaaaatatcaccaacgacaccatccctaaccctactccccgtcgaaatatccaatggacatcggttctcaaccctatgcaatagaagaagagcggtatcaacaactccgaaacaaagtcctccatgatctccatcactgccctcttcaactctccttttggcaagatcacaccaaacatgaaggcaccaaagatggagtgagagccacaagagtctgtgatgtacgcgctgaggactacacccgccatgatgtacatgacatggtgttgcgtgtagttttcatcctttacgtacttactaataaggtacttgactgctggacgaagagcgaaaagcgagaatatgatgaagatggtagtggtggtgacagtgaatatgcgacctctactagaggtcgccataacaagaataaataggaaccaacaaatgatgtcagagatgacagacgaggttaggggcagttcgacccacgtcagtgtggaggagtttgagggtcagcaagaaggccagcaaggtcaggaaagttagttgtggctagggctagcccccaaaagaggggcccaaattgatttggtgagtttctcgagatttctgcaaaattctcgagaagtaagtggtgtaaggcatagcctagtgggactgggagaatgatccctgccaccgcggtggtgacaggctttcgaccagcttttaggatgggctttaggtccacctctaagccgaccatgaacatgaaataaatgatgcctaaggccgctatgttttctagagtcataattgtaccaaatggagttaggtgttttacagcaaaatctgtgaagccaatgccagatggacccaacaatataccaccctgccgaaaaaaaaattagaaaggttatgatatttttttgtcgtatataatagcataattatttttaaaattttacaaaaaaaaaaacaaattactattataaaatatcgctaactaacagtgtatctatcaactaatcaatattttttgttaaaaaaatataatcgaaataaaaatacttacgatgatttcagcagctatacgaggaatatgaaaaggcctaacaagaagggttagaattcgattaacacaaagaataacaaaaagttgtgttataagagaaggaagagacaatgatgaagtgttctcagatctccaaatccctgttaaatgtgttacaacttttctaaaacacaaattaatgtaattgaaatcttggctcataaaacatggttgcacaagaaataaatcctcatttggatccgtttcattacaatacaacaccatttttctttttattaaattaacaatttttcctaattaaatatatatagctaataatctttcttaatttctctcctatttttcgttggccgcaatcaccaccaccgacgcgtcgtgattgtcacccccatcaccccgccgccctcgatgaacagagatgagaatttagctataaaaaatatgagatttttttttttctttgttttattttctattaggttttttttttcttataaatatttatataaaagaattgatggggttttagaaaatgtaggatggagcacctaaatagggtttattcacttctgtctttcttttctttcttcattgttaatttgttttggttgttttttgttttaacattatagttaacttaaacatatatattaggttagtttgttattgtcaatatggctaagttggattttaagttttatgttctgtgttattagctaattttatacaaccataatattaatacctatcatattttgtatatcagttattattagcttaattattatagagttttgagtggcatgcatatagtactagaatttttttatattgtagaaagaaatataatattttttttataacaaaaaattaattactgttatcactaattttattaagtcacaacaaatgttattccctgaatgaactccctttcatcactcactacaatattttctccttatattattatatatattgcgactaaaatgtctgtgctttaaagtattagtcacaaaaattacaatttgttgtaactaaatatatttttaatcacattaatacttgttgtgactagaactaaattagtgacaacttatatttaaatattatgctttagacaggagtaactttttgttaggactaaaagtcacatttagtcacaaaaaatttaagttgtgactaaaatattgttagtaaaagtagggatattggcggctaaaccacctgaactttacggtttgtaacacttaaccacaaaaactgaatttttggcggctaaactacctaaaccctgattccgttttgctctgcacacctccgtccaaaaatcaccgttaagtgccacggtggactgtccacgtgtacacacttgtacacgtggcaaatttttagtagtccacgtaatattagttttaaaaaataa

SEQ ID NO: 300218 - DNA, 981 bp, Cannabis indica
ttcttgttctttttttttttggtgctttttttgaatacttaagagcttcttgttctatccattccttttcttttttggtgtatgtatatagtgtggatgatgcgtgtacaaatccaaatatttgtatgtgctcttataaacaaattaaagtctcgagaacgtggtgtagttttcatgaagaatatccatccccatccccactaattaagtaatttctttaatagtgctttcgtgactcgaaactaggggcactactccaagttgcttaattaataatcactaaaaccaacactataataaatatatatcacaattttatttatttatttatttattttataatattggtactcttcgagttgttaatgtaagacaatttttttccatttatacgaataggacctgtcttacgttcccatttcctatcttcctaatccaaacattagttgtccggctacttcatcacgcattcacaatagttattacttacacacccttttatgaatatataaatttagatatataatgtactcttattgcacaattttattgactaacgaaattgtaaatcacgacattagcaagagaacaagaaattagcacctaattaattaataaaattaatagaagaaaatttaataaaagagaaacgattaagcacgatctcaattctcaatatatgcttaaaatatataagttggaatgtattagtcattacaagaagtatggtacataaaataagtcccaattggaatatagtagtgggctagaggtgaccaatgtttctcaatgacgacaaatatttggtatgaaaagccacatgaatacaaataaagtgtgtgaaatgaaatggaaggaacttagagtatgtttggtattgttttctattttttatttttaaaaaattgtttttagaaatgagaacaaattaaaaatagtttttgaagtttttaaaaacaagtcatgtttggttagtgtttt

SEQ ID NO: 300219 - DNA, 805 bp, Cannabis indica
gagttctctacttgagccacttttgatgtagttgtcgcgatcaagacctttgaagaaccatttttctgtggaaagcttcatcagatcatgaagagaaggagattgtttttcagaatctgttgccactgaataagcaggcatgatgggcttcatcttggctagactcttggtttcatctccatttgaggcctcatcagaaggacagactttctccatgaataatgatgtacctttttcttttgtgtgtatgtttgtgcgtgaagattaatgggacattggtcttctttttatgtagggtgtgtggagttattgcattgtttcatgtatggaaagatatattttctaatatcgaaaacactactgtagcttatatgtgtttcttacgtaataactatcgttgaagagttgaaagattcttcattttatggtatgtacgtatagagtgacttgattcattcatattgtataatgttaattgctaatcatcaatctaattatggtatagaaatttcatggtgaagtataaggtaattatagttgtcaatgaccaacccagataatttcacatgcatatacatgtctctaccattttgagtaacttctcattcaattctaatatatcttatcccgttgtctctcacacacttttacaatgtggatttgaacatacgtcctacacccattcaattacctacttcaactagccaacctaataaataattggcaattttcacctatatcaacatatatattacacaaaaaatttaaggctaattagcaatttttctccgaactttgacatgta

SEQ ID NO: 300220 - DNA, 1678 bp, Cannabis indica
cttagattaacttcacccttagagccaaatgtggatgaagagaatgcaagcttgatgcaagctgatggagcgaactttagatttaacttcaccctttagagccaaatgtggatgtagaaaatgcaagctgtatgcaagctgatggagcgaacttagattcaactctaccttagaccaattgtggatgtagaaaatgctcctttgaatgaagaagagaatacagacgtgaaggaaagtgatctaccgagtgccttaaatgaagaagcaacaactgctgaggattctgcagtggagcttcgtgatgtatgttattcttcatgatttcactgtctcgttaattctttgtttcctcctgagatgcttactcatcaatttctctttatgtttccgagttgcttactcagttatggcctatattttgcaggattatgaagaagatgtcttatacgataatgacacaggtttaattctctttcttcttgattttttcttgggagaaattttttaatctgtcccagttggtcatttcatgtttagaacctgcattgattaatcatattcccaagtagcccttgaagaattgtgtgttaatttgttttcatttggaagagagatgctgtcacggtctggtgatatggtgctactgtataaatctttgataaaatttgcctgctcttctgttgatgctatttcttgctgcaataccaatatagtcgagtcacattttgtctggtgcattgttttctaatttcttaggtttttgtgatcataatttatttattttttcttcccctcagaatttttgaatgtagacgatgatgacgtagaagaagactacgatgatgataatttgccaggtgctgaagatcctcgtcttcttgaaaacagtggatggtcttctcgaacgcggtaatattccttgatcatatttagtaatgtgaaacaatatgtcatctcctgtttgttggtctacttcctaaatctaatgctaagttctagaaacatctcttttttttttgtatgaattatcatcatcatcatcatcggtggagggaaactatctttaacaaactctttctctggtgctttcgtgtatagggccgttgctaagtatctccaaaccttatttgataaggaatctgtgcctggaaagagagttctcccaatggacaatctattaatggggaagactcgcaaggaagcatcaaggatgtttttcgagacactggtaagtagtaatcaaggactaaatatgctgcagtgcatatgttaaatttctctttatgtcatattgattcatatgttaataataataataataataataataataataataataattgcaggttctaaagacaaaggattacatcgatgtagagcaagcaatgccgtttgacaacatcaatgtaaagcctagaataaagctcatgaaatccgacttctgagaatcttacaataggaaaaaggcaagaagatacagtttgatacgtagtttggctcatgatatattatgatgatgatgatgatgatgagggtcctttattatcaatttttttggggggggtttcattagatttttttttcttttctttcattcaaaggtggttctctttttttgttcttgtcttataattattttatttttcgttttcgattggaagggaagggaaggaag

SEQ ID NO: 300221 - DNA, 5358 bp, Cannabis indica
gtaattgacactcataaactaataaccaatcaaagaaggcatacgaacagagctatccaaagcttgaaggactaaaagatagtctgtttcaataataatgtcttaaacaaccttcctcttgatccaacttaggcatccttgatgctaacaatcttagcaagctcgggttgagcaccccctggagtataaaccgagaaagcttcaaccaagaaaccaccctcattatgataacaacaccagaaccgtatgcatttgcaacctcaaatacagcactgttgaaattttaaatattttcaaagattataattttattttataaaaaatacgaattatcaattcatattgtttatactgaaattagctcaacaattaatttgtatttgcacttcgaattctttacactaagatcgtcctaatcgaaaattacaactctgcttaattacataattcctcctaaatgatcggtggttctctctctaacgacagtctcgaactcgagtgtgtttttggagatgcaattcaaaagagttttgactgggctagtgtggttaagaatctatccccccatatctaaaaaaaataaaagataaaaaaaaataaaaataaaaagtgtcttcctttagaatgttggggtctgctatttataagcaggaatttggtatcacacaatcttctttctctcttctaattggtccacgtggctttgttctcatatttcctcacatgccttctcttctgctctgcttatcgagctctgttctccaagttgttccgaaattggttctgctccaagttttcctcttctttcttaagtgaaatagtgtgtgttatgttcttcgtgtcatattaatttattagctttcatggttttatttgttggtttttatagtccaaatcagagtagaaagcggaagcagatttataaaattgaatagtttttttataatttgaaccataagtcccaagatttcaacgtatttacaagtattaaatctacactaagagtttaagaataatacatcttttagaacaatcagggcatcctcgtatctttacgtataattatcaaacatccaatccatattataatgattgttataccaattttcgcacggggtgatgtggcattcaataagtgtgacacgtggagagcatttccaaagcctggacgggtggttttccttcaattgtatgtccagatagttttatgtgaacttgattaagttaaagcctttagtaggtattgttcggacaaaatctgcatgtgactgttcgagcaagtcctcaccatctagtgaagccaaatcctccaagaaggataacacggctgaaaaagatctttaaggatattttccataaatatattcacagtaatacctcaattagatttatggggttgacacacgttaagagaaaatattataggaaactaacttagtttccccttttatttctaattgttttgggaaacttgattcatgtatattttcctataaatagtggaatcatttcatgatttggggatctgaaatgatatatttttaagatcaattatgctataaaaataattgtaagcttttcttaaggattgttgacaaactcacttggtcaactccctgtgttattgataattatgtgaagtaatacaagtaaaaggggagtagcttattaccataatcacgggattgaaccattataaatcctggtgctcttattgcttaattttatttaataattatctgatattctatcgctttaaaaactcaacgtcgttagctaaaagcgaggtcaacattttggtactttcaatgagagcgtgtttacaccaaaagtggccttgatgacgtggacataaatgtttgacatgtggcaagaaaaaaaatatcccggagttgagtagccccggatcatagcaagtcgacttgggaggggtccttggccttacactgaggttgacttcaagaacttcagaatgggtgtttggatcctatcaagttgtttttgactcactatcttttagtattttgtaccatgaagcatccaagtccaggtcccgggagctgaaaatacatgaatcagcacctcgaaaatcaacctaggcacttagggtttcacccagcgcccaagttgacaacactaactagggtttcagtttccgggactgtcttagtgcaaatgggtcaaactttgtattgagacatgaactagacataccacaaatatatttgaagcatctgaattagattcagagaaatttcatttttgagcacccaaacacctgtccgagcaccccaacgcccaagttgacaatctatcaacctaggccatttccaagcatatcaaaaattcgactcatgcatattctctatcttcatcaaaaaaggggaaacaagttcttttggggaagaaacagcccatcctgggtgtcaaaacaagggactagtgcccaggttgacattttgtcaaccttgggcgattctaaggagttttttttcgaagaatcttccggacatattcttcattatcatcaaagattaagattcaactatctccagagatcaaaaagaacttccagatggcctgaaactggatccagcgcccaggttgacacttgttactaggcctagcacccaggttgacatattgtcaacctggacaatttccaatcaatttcttgaaaaagtgttccaggaattgtttccatcattagaaataacaaagatacaattaaacttggggagaaaactataagcccgagcgcctcaaagttgagcccagcacccaggttgacctagtgctgggcctagcacccaaattgacaatcaacctgatgcactggtttcgatcattcaaatgtcaattctactataagcattctctcaaaaatagttaaaaatggggtaggagacctcatccccaagttcaagaaccttggaagtgcaaaacaacatcccgaaagctctaaaataaggaccaagcacctaggttgacaaatggcctagtgcgtgaggttctgcttatccgattctgattccgtcttgacccatcgtctagtttttcatagtaactgagaggcatgaagtcagaagagtcaaattcacaacttcatattttcacttttccaacaaagtcaattacttggaaattgggtagtttcgagtctcccgttttcgttgaatagcaacatctccgagaactagtgactagctttgccagaatagagaaacagtctaagtaatgtccaaatattacttaagaatcaaaaagtacatccctggcacgttttctaactcacccagcgtgcgctggatgtcaacatgggcgctgggatgtcaacctaggtgttgggcccagaaaagccttcagtaaaatagccataactcactcaatactaatctgattgacgtgataaaacttgcatttcaaagttgtttcaattctctatcaagtcatgtctcacacttcaatcacaattataaagttatcgactccaaattttacccccaagggagttacaaatttaagctaaaacttacccgaagcaattcctacagacgcgactctagctccaaaaaattgatgaccgaccttcggagtcaatttcacagttagatcatcatttacggccgaaaatagcctaaatgtatttttttcccatattttttggattattttattgtcatttttataagactttcttcccctgtaaagaagagttccactagcttatttttcacattcagaaaagtacccataaggtcagagcatctctctttagtttgtctctctagaaattagagctttcacacttagccaattttcttataattctcttgagaaataaaaactcgaagtagacgtagctccattaccatcgtgacatggagagtgaactactataaattttgtgtgtctctctaaattatttacttaaacctattattcatctcgccaatttagcaagctggccacttttcagcatcaacagagcaaaagaacatgattttgtaattttgattcgctataagttgtcaaaaaaatggtcatgtatacaagaaggttgcaatccactaaatcaactgatctaatggccacgaatcctaatcactactagaaaatgggattttagtgacacacattaagtaactctaaaagtgtatagtgacacttcaacgcgcgtcactaatgagggtgactggaagaacaatttttagtgacacttcagacgtgtcactaaaaccttttgcattcattttctacgtgtcactataggcgtatagagtcaggttttgtcagactaaaaaggtaatagccacacacatgaagtgtcactatatcatttttttttcttttttattaatatttttggggatatactgacacacataaagtgccactatattaaatatttttctaaaaaaaataatatttaatttgatttgatacagatctggattaagaatttataggggtataattaccaatttttattacaaattatataaatacaattttatttaagtaatataaatacatttagattaattacaaaaaaaaaatacacagaataattataattataattaataatagtaatacaaatgagtagttttaaagaaaaacatactaatctgaactaaaaaaaataaaaataaaaaattatatacaaatcaatatatgactataaattaacccagaaattgatataaaaaaacaaaaaattgattgaaaaaaaaaacccagaaacagcatgacttccagccaaaaaaatcccaaaaccatagcttcttcaatcacaagccatgaaccctaaaccattagaacctcaaacaactaccatcattgtcaacctgcaaaaaagaaaatgagtggttttaaagaaaaacaatactaatctaaactaaagaaaataaaaataaaaaatcatatacaaatcaatatatgcctacaaatccacaaattgatataaaaactaaaaattgattgaaaagaaaaacccaaaaacgggtaatgatttccagcaaaaatcaaaaaccatagcttcttcaatcacaagccatgaaccccgaaccattagaacctcaaacaaccaccatcattgtcaacagaaacaagacaagaggaagctgggcagaaacgagatggtgatgggaaagccggggctcggctatggcgcatcgcttaataaaaacgagacgctatggcttgatacgattaacgttggccatctcgttgttgcatccacggaggcgagaggaagttggggttgtatgcgtcctaattacagattgaataagaaatacagcaaaagaaaaacaaaataccatctttattcatcttaatactatcaaaacacac

SEQ ID NO: 300222 - DNA, 2280 bp, Cannabis indica
tgatagttgttgctagctatccttttcaagatctcaaaagcttcattgtaagacttgaaaagaatggctccattggctgaagcgtccaacaccatcatagaggctgcattgagaccattgaggatgtggattttttagtggtggtcttccctttttctttcatacaacaggctatagtacaaaataacacaaattaatacttgaagaaataaaattccattgaaataaacaaagttgtttgaacaagaaatacctgtgttgtagctgaattcttgcaagttacacatgagtgccctgcttgcttacaattgctgcaatggttaggttggccaaaccttcttgttttaattacatttggggcaggttcatcatgttcctttcttctagctttctttggtttcccaggtaagtttgattcagctggagggtaaataggatttaatccacgttgcggccaatgatcaggactaggcattggctgaataacactagcatattgagcttggaaagcttctttcttgtaacaatcatcaacaaatacactctcctttagttaagttgattgttaaactttgttgatcaagaaagttaacttggaatgtggctgccatctgccatcgtacaaaaataatatttggcgacattcttacggctctctataatatcccaaatgcgtttcccaacaggatgcttccatttatgaatactctcccttctcttacataacatagagatcaaccaaaatttgattttttccaacaaagaaatgataggcttgtcccttgcatctaatattgcagcattgaaactctcacatagattgttcaatagcatgtcacattttgcatggaatctaaaatgtgacttactccattcggtcggagccttcttcttcaaccattcataggccttttcatttatttctttcaattcagccatctttcttatgaaatcttctagtgtggtggctttagcacaagcccacaacttttgttttaatagaagaccaggaaactccttcttaaagttggcatgtaaatgcctgacacaaaatctgatctctccaccatcaaagagagatcctaaagcattttcaagtcccttctgcctatcactgatcatagtaaatcgtgtagggtcagtcacattcaaattctcttttaacaactttaaaaaccagttccaagtatttgtattttctttttcacaaacagcataggcaattggaaacattaaaatatttgcatcaataccaatagcagcaagaagaatacctttgaaatatcctctaagaaagcacccatctagccctatcagtggtctacaagctttaaacccatccttactagcttccaagcagatataaaccctctcaaacaagcttttattgttgacaatattgcttttaataattgttgtgctccatggattttgttgtataatttacttgcagtaatcctctaaaatagcaaattgttctttcattgatccttcaagcattgcttttgcttttctccttgcattataaaacatccacctggttgtgtttgagaatttagttttcgcagtcagctcattaaagttactgtaagacatattgaggttcattctaaagtggtcgagaaagtgcttagccaaccaagccccagtgatatgttcattatcaaaaacaatcccacaatcatgaacattctcacatgtattcaccatgaaagttgtattgtcttttttctaaacccgagcatataaactccacttgcaaccaggtgccttacaaacagctttcactctaacttgatcattcattacatatttgaactctttgttattatgtataaagtgctccaccaatgcttctcttagctgtgtcacacatgcaaactctaaatagggttcaaacttaaagtctttccaatccactttcgggtagtactcctttcttcccttcctttttggtccatcatcatcatttgtatcactgtttaaacttcttaaatcatcttcggaaacataagcacaatcaaattgtgcctcatcacctctattgcaaacattattcactggaccccaccattggctaggatttgtaatgttttcatcttgttgtcgtaattccccctcatctaaagcatactctgttggattttattttaccaggatcttagatctactcacaagtatgttgtttaacaccataaatatgaactttctaaaacgataaaagaaacacatataaagttaagaaaaccttacattgatgcagcgaaattaatgtctcct

SEQ ID NO: 300223 - DNA, 1059 bp, Cannabis indica
ccacgtggcaatccctgattagtccaagtcattaatttttattatttaaaaaaatttagttcaaatatatcaataaaaaaatgacacgtggatataatggtttaacatttaacggttaggtacttacaattcaaaaatataacttaggtaggtattattaccgccaaaaattaaacttaggtatttatatacaaccgagagttaaacttaagtatttataccgcaaattacttaataattatattttgttaatccgcattagctttttcaatactacttagtctattttatatgtatatatgagataaaaaaaaaaatataagtgataaataattactaaaaaaatatttggaggatgattaataatatatgtaagtgggaaagttattgcagcattatgttaaaaaaaatatgtaatttagctaattcactaagagttatctttagaaattattcaaccaaattagaatggaaaagcaatgtagaagatgaaattttaagagcttggaagaaaccaaggaagatgatgagaaatataacatattaacaatggagaagaaggagaatgtattttcgtttaacaaggtttcagtacattaatattccaaatccctaaagaactattttatacggagctttaatggcttagggtagttagagagttttatattgttaatttgtagaaatataataccacatataaggtgctactccttttattattaattaattttgagatagaatctcatgcatcttacaattctaatatggtatcagagccaaataatactcgttagactttagagtatccgatctaatttcataaaacagttcaaaagagttgattgtgattcgaggaaacagtgaaccaaaaaaggactattgtgatccaaaagtaccgctcatccaaaaagaatagcaaaaaagagccgcttgtgattcagtgagcgaaaagtgtgttatgaaaattatgatcactacgcaagtatacgcagtcaagtagtagctcacgcaagtgaggtcgaaccacagggaattggactaattactactaaatta

SEQ ID NO: 300224 - DNA, 1209 bp, Cannabis indica
ttttttttttcttttgcttttttaaagagtcaaatttatgtatttttataaaattttgaaagtttcagaaataaatataaaaggaaattttatatagcatatatattaaaaacaaaaataagtcatagaatttcaggaaaatatttccctccatattttcttttgtctgttctcccataaaatttctcttcagtaaaatcttagttccaacaaagcattaacctttccatcttcaactgattttaacattcatataatccaattcataatttaaatatggtaaacaaactacatcgattgcaatttgaaatatgtgggtctaatcagtatcataccctgaaatcaaatgcctcaatcgtacacacacacagacacacaaacacaactagctaagatccaagtaacgaattaggtcataatattcaagagaaaattcacaaatcacggaatttgactatacagaaattatgcaaataaaaaaaaaaacacggaagctaaaaccagagaaaagaaatgtttgagcaatgaagaactggaaagcaaacaagggaaatatgatcaaatggtacctctctttctgtgtgtgtgtggtggttgaatagctttggtatatgggtaagagcaatggtgttattccccacattaaccgagtttggcttcggaggaaggaagtagatgtagattgtagagggcagctgaacctaagtctttaaagaacaccaaaacaaaggcggagaaaaactatggcctaaaaccgctctaacgtacccttttgattcttttttttaacccctttttcatgcaatctgtttttgtaattatttttaatgagaaattaaaatgttaggtaagatccaaactagtaattttggatattcaatccaaatataattagagtaagataaaattaaattacttttattaataaatatgagacctttttttttgttaggatacatagcacattgatttttgtgtttttcaaaatcaaccaatgtgttaaaaaaaaaaaaatcaaccaattgattggggacaaactcacatagagacaaggggcagtcgacattcgactctgaaaaaaaaatgtatatatgaattagttgtgcatgcacttagggtggatgatgaattagcttaaattaaaaatttttttatcttttgatattaatttatataaaactctgattcttgttaataagagtttaattt

SEQ ID NO: 300225 - DNA, 6821 bp, Cannabis indica
aaaaataacagtaaaaaagtaaaaaataccgtatgacagtatttttgtaaaaaaatgacaaaagttagtataccatgtaaattttcctattaatttaagtgtgtgcacttattattactctgttaattaatatatatctcactaagggagaaaatcaaccaggagggacccctagctagtggacttaagggaaaaatcaatgcgaaaaagggaatctcaatactcgcattaactctcaaaaggatgatcccgtacccagaaagatattttgagcaaaggtttatagctgaacttattatcttacgaaaagacataaaaaaaaagtatgtcggagaaaaaagggcgacgaccctgagtcaaattatgaggactgggagccatgcgcgaagaatgtcttagaagttgaactcccaaaaatttcaagatgccattggagatactaaccacagtgaccatctgtcactatccaacagggtcatgacagtattaaaagttagcaacgatgctaaatgtttcccactgatcttagggggatccgctgaagagtgaaattttttgtattgaatttgtaacacttggttgttttgtgtatttattctcatattgttttgttctattttattacccaggaatgttgttatttttattattttaaacttttagttgtattacacgtgtaacgatgatatgtttatggagtattaaatttaaacaaatagtgatatttagttttatatatttttcttcatattttaaagttaatattaattaaatttaggtgtgtaattaggtatctaattaaaaaattgatccaattcgagtagtaattgaattggattaacttttgagttctaattgaattagatcagatgataatttttcaaatctttaattattaatttaattaaatcagatattaattaagagggattttagataatcttttacagtgagtcttgtcttttgacatggtttgttttgacatgggtgttgtttgattttttaattggttttgtttgggagtgctgattgggaaggggtcttttgttgtttgtttgtttgtgggtactgattgtgaggagtatttgttagtgcaactggcttcaagcagtcgtcagagtttccatacagaggatgatactttttctattcaaatagaagaggaagatttagagaatgtcactgtaaatgtaggaggggtggatgatggtattgatggtagatggtgcttggtgggaaggtttttgtcttctagaatgatcgactttgaaaaaatgaaatattttggcctccttatggcaaccgggaatgggaatgtacgttaaacaacttgaaccgaatcgatttctatttcaattttaccgtgaagtggatttgtagcgagtgatcaatgggagtccatggacatatgagaggatgccattgattattgagagactaccagttggaggggacccgaagtcattgcctctcaattctttagatatttgggttcaaatgcatgatatggaaccagggtgtacgaatgtacagactgtccagaatgtggggaatatgatgggggaatttttagaatctgatcctaataacttcttgggtgtgtggaggaattatcttcgggtaagagtgaggttggatattcggaaacctttgcggagacggatgaaactcatgaaggaaattggtatgtggttctagattaattttaaatatgaaagggttcctatgttctgctttatttgtggggttataggccattctgatagtttttgtaacaagttgtttcatcaacctttggaacacattgttaaaccttatggagaattcatgaaagcacaacctcaacgatcacataagaatatatgagcaaagtggtttcgaaacaggggatggaatcttgagatggtggccggtggcagcagcagtggtggaccagctccggcaagatctagttctggccatccttctggtattaatcactcaattaattacggtgatcaattaccacaaaatcagggtacatctgatactatccctggtgcgcatttactacagaataggggaacaactaatggtggttaaccaaaaaataatctcattgctgatatggagattggagttttgggggataatgttagcaaaaatcagggagaggcaattatagatgatcaccatgacagtgtgataatatatgatagcaaaaaaaaggaaagttggtaacatttctaatgaatagcttagtgagatgggccaacaaaaagatggatattcaaaaaacttgtgtttggcgggctttgggaatggggctcgccaatcattatgaaaattctaagctggaactgccgtgggcgtgggccgccacggaatgttcagttccttaaagacctggtttttcataaaaggcccaatgtgatttttctttgtgagacactttgtaataaagctaaagtggaggaggtgtgtagatcgttgaactatgaagggtgttttgttgttgaggctcaaggaaggagtggtggtttggccttactttggatgaaacaagatgagctaagtattgattctttttcagcaaaccatattgattgttttatctgtctggagactctaataagttcagatttacaggcttatatggggaacctaatagaagtcttaggaaaaacacctgggatttgatgagaacgttgaaaggaagatttaatgaaccttggtgcataatgggagatttcaataatgtacttcatcaaaaagagaaggttggtggaaatccttgtcctgcgtggttattaagtggttttcaagaagcagttactcattgtggtttatgtgacttagagctatgtgggcatcctttcacatgggagaagagtcgggatacgccaaattggataaaagctagactggatcgagctatggtaaatgccgaatggctaagaaacttctcactcgcaaaaatttataatttggaagtgtcgccttcaaatcatagtccgctgctactagatgttctttcttgtcataaaactactgctgttgctccatttcggttcgtgaactgctggactagttcgcctgaatgtgaggaggtaattcggtaatgctggagtgattctaatggagctggaattgatgaaaaaataacaacatgtggccatgctcttaagagttggggtaagaatatctcatgtaacttctctagccgcatcaacaagtgtaaaaaagagttgaaacaactgaagcgtagaagagatgatgcagggaagaaactcttttttaacatgaagaaggagttgttttctaccctaaattagcgtgaagtcttctggaggcagcgatcaaaacaattgtggcttcaatcgggggaccaaaatagcaaattttttcactctaaagcttccgctcgaagacgcaacaatcaaattttaagtttaaaagacgctatgggcaatatgaggagttgggaggatggattgggaactgttatggttgactactttaatgatatttttcatgctgaaccgggggcttctgatgaacttctggagtgtattcagccgaaggttagggatgaacataatgaacaactacttgtgccgattactgatgaggaagttagaattgcagtgtttcaaatgcacccagacaaatcgccaggacctgatggtatgaatccaaatttttttcaaaagtactgggatattgtgggaagggatgtgatatcaacggtgaagcaattcttcttagatgagattatacctccttatttaaactcaacaaacatagtgttgatccccaaaaagaagaaaccagaacagatgagtgaattacggcctatttctctttgtaatgttattgctaaaatcattacaaaggttcttgcgaataggttgaaaggtttgttgaatgagattattcctgggaggttaattactgataatattatggtttcgtttgagatcttacattatcttaaaaggaagcaacttggcaaagatgggtatatgactttgaaacttgacttgagtaaagcctatgatagggtggattggaactttttatgtgcaatgctaactcgtttgggctttgaaggaaaatgggtttgactcattcatggatgtctctcaacagtgaagtaccaaattgtgagtagtggtaatgtgttgggtccgattgtgctaagtagagggcttagacagggtgatcctatttcaccctatctgttcttaatatgtgcgtaggggctgtctgctattattcgatgatttgaagagaagaaatggattcatgggtgtagagtagctaatggggcccctattgtctcacacatgttgtttgcggacggttttttgtattgcaaagcaacgagtggtgatgtttcaaatgttatcaaattgcttgaagtgttctctaatgcttctggtcagaagggaaattacaataagtcatcaactttttttagtaccaacacttcaactcagatgagacatgaaatatgtactagaatgggaatacaagaagcaactgaggatatatagtaaatatctgggtttgctgagtaccattggtcgcaacaaaaatgtaatcttcagctaccttaaggataaagttcagaagcacattcaaacgtgggataataagtttctttctaaagctggaaaagatgtgttgatcaaatccgtggttcaagctttacctgcttatcctatgaatgttttcctaattcctgcaggtatcaataatgatattgagagcagtattagtaatttttggtggcaatcatccaagaacaaaggaattcattggttgagttggaaaaagttgtcaatgcataaaaccaagggtggtatgggatttcgcaactttaaagattttaacttggctttattagctaaacaagaatggcgacttctcactaatgaagataacttgatgggaaggatttttaaggatagatactttcctaagagtaattttcttaacgcaactctcggccataatccaagttacatttggagaagtgtgttggaatctcaagcagtggttcgggctggtgcgaggaagattttgggagatggacaccatgttagtatacttgatgacccgtggctggttgatgctaatgacccctatattcactcaactcatccagctttgattgggaattcagttaagtctctcatgaagattgatactcttgaatgggattccgaggtgattaaagatgtgttgaatgagagggatccaaacatggtgtggaaaataccattagctaatggtgtagggactggtacttggtattggatgtttgaagaggcaggtgtgttttctgttaaatcagcctaccggcatctggagcaaataaatgacagcaacatcagtggagatgatggagaattttgggggagtttgtggaaaattaaagtacctccaaaggtgaaaaatctgttgtggagagcttcctcaaattgcctcccaacaaggtttcaactctccactaagcatgtcccaattgcatctgtttgtccaatttctgcaatggtgcaccagaaacaatcttacacgttctggtcaggtgttcctttgctcgaagctgctgggaaaggtaggggtgcccatggttgctgctgggacaatgatctttgctagctggtttgcagaaggacttaaggtatggactgaggccgctggcatagaagcaacaatgatttgttgggccatttggaaagtgaggaacgagctggtttgggattcgaaacagcctgctgtggtggaagttttatctgtggctaagctacactttgttgattggtataatgctcaaaaacatttctctcttgttgcagagaagggtgtctctaatagagcatcggttgagcattggacccccccgattctaatacaatcaaagtgaatgtcgacggtgcaatttttgctagggagcagaggtttggagttggtatgatagctcgtaatgagactggtgtagtgctaaaagctaaaacaataaacaaagctgggatgtaacaacgtcacgtggtggaagtaattggaattaaagaagctctaagttggatcaaaacgaataactagagtcaagtggtggtggaatcggattgcctttgagttattagggacttaaattatgcaacttatatggcttctccttatggccatattcttttagactgtaagacttttgtggcatctatgaatgatatttctttcaattttgtttcacgatctgctaataaggttgtgcattctttggcgcgatcttctttttttgaggctgattgtaattgctatgatttttctttacctattgtaatctcatccttggtgatgaatgatttaagttaatgaaattcacttttcattaaaaaaaaaattaattaaatcaaatgaagaaaacaaatattaaattgagtcggataccaaatctaattaaaaggcatttgaattatgacacggtgtaattaaatcattataattaattatatatataaaaaactaaattgtaaactttcaatgtaacaaacataacaataacatacaaactagctaggtcaacaaaggaaatatatatgcaaacaaccatactatacttagtgaaagcaatataatatatgggacaggatttggtcccgttatgccaaaacagggaatacaatccgtgattgtactgtagccgttggattaaattggggcatgatctaatggctggggttaaagtaggggtatttagggggggaaaaatggtaaccggttggttttttgtattttaaattaattaatttttgaaaaactgacaccgattg

SEQ ID NO: 300226 - DNA, 1804 bp, Cannabis indica
tagaatataatttacttggtcccaagtgtattcttggatagaagttctactgtataacaatttgttgcagcttgagccttactttacattttactgtaggctgcatctgggactaaaggtggttcaagtggttcccctgtcattgattggcaagggagggcagtggctttaaatgctggtagcaagtcatcaagtgcatcagcatttttctaccactggaacgggtggggacattttattcgatcactgaccgtattattattattattattattattattattattatttaagatgatgatgatgatgatgatgatgttatttttgtaccatatgtatgctgtattttatactggatgtttaggatgtaacgcagatgattttgatattctttatctatgcatctctgtttcttataaacaatgtactattaattttagaaattcactaattcagtttttacttacaactatggtaattaatttgcaggttgtaagggcgttgaagtttcttcagaacagcagagatctttcttgtaataaatgggaagcagtttccatacctcgtggaacgcttcaggtttctcattctctgagttcatctagactattattataaacctgcaagttctatttttactatattttgaaaaagagaaagagaccacttgtcttagattggcccctccccgttatgtattggaagccctcacttgtggcggaggataaccatggttacataagttttagcgaaaattatactaaaatacagcaaccaaaagaaatacacacaaaaccaaaattactgaaacgttttccttctctacagcagtggtttccactccctaatcagctctaaaaaggataattcctcaaaagtgtttggttttataaacccaagtggctgtccaaaacttaattttatcccaaagaaccactctgaactttaagaatcttcaaaaaccctcgaacttctttccagccaaacagcccaaaatgttgccaaaatcgccgttctccaaaggaaattgctgggtagctctgcataatgaatccaaccccagacgacatagagacccaatttattcttaaccttgcagattgtatgaagtggagaattgctcctatttaaatatccatcccctcttttttattttatattttacaatccatccttagtgttgaaagtttatgtagtcatccaatattttgctctaacccaactagcacatatttctgctaccatatcaatggaggttccactatatctctgcaatcaattggccctaaggataacataataccccacattgcacactgtccttcctgaaagctcccaaatttgcatttctaccttctactcaagcccaaaatattgattatatacccagctgtcttgattccccatactaccaaactatcttataagctttccacctgtgtcctctctaagaaagctcctaataaccagccaacaatccagtcttatcaatgaggttccaatggttcctgtctgtaagtaactctagaaatcatggaagtgtcacattcatttgtaaaaaactcatatttactttaataaccttataccacaaagtttctgctccattagaaatctctacagccatttcatcaataaagctatgttgcaattcaaaggatgatgttagagctcaaccttctgaagtctttagggttgcaaatagacccctatgaaaccagatctccccagcatcactcatttcccagtggaaaaatctcgtttggtatgcaggattggactggacaagattggattatgctga

SEQ ID NO: 300227 - DNA, 4181 bp, Cannabis indica
gtttaaattatactttaattaaaattatgatttagattaataaaaaaattctaaataaaaaaaattaaacatgtgacattttattaacatctaatagatcagttagaaaaaaggaactaacatactaacaaaatacatgaccttgtggacttttatcagtaattttcaaaattaaagacttatctacataaccataaatttttaggattttcccataaataaataatattgtgttttttttagggtttcaatatttgaacaacagaagagagttctcctccactagttttcatttgcttgggaccaaagaaataattttataatctaaaaaagaaaaacaattaggtttaaccctcaaattaactcatttctcacagttgtattgtatacgacaacacacacacatacacctctttaggttctttccctttccttactctcttcttcgtcttctccttctttcttcctggtaagttttttttttcctccaagggatcgggaaagtgttttgattatttgttttataaaaaaaaaaatgaagtttttttttttgttctttacataacaaaatcccatcttttttatcccaatttcagagagaggatactagaagatggtggaattagaggagactcataataataataataataatccatggataacggctgagcaaatccctaatgtggaaattcattctgaatcgacctttttggagagagatgatgcggctgggttttcggctaccaagcttcccaactccacaaccgtgtctgattggaaactgggtattgccgagcgagctctctctgcagctggtgctgccttcctttccgccattattgtaaaccctcttgatgttgtcaaggtatgtaacgtgttcctttgtttgatcaagttttctggcaaaactgaatgagggttattttgtaattagggaaatttgtttaaagttatggttttttgtttagttaactataacaccttcatttatatagtgcttgaaattgtatatagtgtacatctttatgttttttgattagattatgatcaatgtttaatctaactacttgtgagttctataaattgaactgatgaacattcccacctcatattttccagacaaggctgcaagctcaggcagctggggttgcttattctcacccattaagtaatatcacgagtcggatggctttttttggcccaagcatggtatgaatgtaattctcaatggatttctgttgtgtacaattatagctgaactagttgaggttatgtagtatagtttttaacttctattaagccagtgccatggagatttcttattatgaactagcttataggttctatggctcgtatatgctcaagcaatttcgtatgattctattagttggtgctcatgagttcttatatcctctaccggtatctgtatctattaactttgttttatcttatggtttgcagatgtttgcagatttaaggtgttcaccatcatgtgcacatgcgggtgtccatggtactgtatcaatatgccctccacattgttttcgatataaaggaacactagatgtctttaacaaaatcattcgacaggttggtattttctcctgttccaatcttagccttggtattttctttctctcacgctgttccaattttaaagttggtccttatatattcatgtgaaaaagggttagcctgattgttctaaaatattgttggactctaaactgcattaattgtctttgggtactgatttacattgctttagatttgtttatatactgccaatgagtgtgtgtggtctggggtgaagtccatgactccatgtaaatgtatctttcaaaacagaggaaagacgatattgatttccattgtggtatggattgtatgatgtgaaaaagggttagcctgattgttaataaaatattgttggactctaaactgcgttaattgtcttttcggctactgatttacattgctttagatttgtttgtatactgccaatgagtgtgtgtggttctggggtgaagtgcatgactccatgtaaatgtatatttcaaaacagaggaaagacgatatttgatttccattgtggtatgaattgtatgatatgattcatttggtttatggattaaaaaaaatctacacttgatgtttaatatttatgttaaggctgtctatctgtttataagttcctatttagtttactgggttttgcattcatttttttttgggatgtatttttattggatttatattgcaggaaggattttcaagactttggagaggcacaaatgctggtcttgcgctggctgtaccaacagtaagttctataattgcttgttaactggttgttattacattttctttgtatctgccatcgtaaagtgtacatgcttgtatgctttgtgatcttgatacaagattcttgtttatctttggttaatcaggttgggatctacctgccttgttatgacatatttcgaaattggttagaggtacttagcatccagaatgcaccaatcatgactccttatgtccctttagtggctggatcattggctcgctcattggcttgtgcaacttgctatcctattgagcttgcaagaacacgcatgcaggtaaaaacctgatcttgatgcctattttatggttattgtttattctggtctatattttgtattttcatgtgcaagagatcgctcttcatttattgtctgtgattattaaattttgcggatctctttgcttattttattcatcactttgtttgatgaataggcttctaaggtgactcaatgtggcgtaaagcctcctggtgtctggaagactttatttgagattctatctcatgtcaaaaccacaaataatatgcaagaaaactgtaagtcaattttctacagtggaaacattcaccgtgtaaactgttttccacggcagaagtattaggattaggattaagattacctatgtttgagggagcagcaaatgatgtgtaacacttttatgattgatgtggctttcttgtaacagtgaaaggctaccgtgtcctttggacaggcatgggagcacagcttgcacgtgatgttcccttctctgcaatctgctggtctacccttgagcccgtgagtttattttctaattattatttagattgtgtttttgctactttttttggcagttaacattttccccaccttctctatgtacagatcaggagaaaacttctttgtctagttggtgatgataccagcgttgcaagtgtattgggtgcaaatttttctgccgggtttgtggcaggaagtcttgctgctgctgctacatgtccactagatgttgcgaaaacccgaaagcagattgaggttcattctttatcccattcagttagaatctgatgacttgatagtaaggcttccattgacaaatattgtttaactttgccaccttttctcatttactgttttgtattcccctttcaaattcacagaaggatccagtcagggcattgcaaatgacaaccacacgaacactaaaggaagtttggaggtattttttcttaatttataaacaagtatcttcactatgaaatcataaatttggaagaaatcagattcgggtcactgctatgttctgaatcattagccaataaaaattcaaatgtttctccgttccataatggtgatctagagtatagtgtgttaagttgaactgaaatttctatttattaggtgtctggtgaacatctctctcaattgactgatgcattttgttaatttggacagggttggagggatgaaaggactttttaccggtgttggtcctcgtgttggacgcgcaggtccttctgttggtattgtgatttcattctatgaagttgtgaagtatgtgctaaataaccgctatgctacttcatgatagagagaaaaacacttcaagacggggattttcaaacataacaaaaaactcgttacagagatgctggatctgtttctcgcaacatttttgttcaagcgtacttagttgacttggagttcagtgagacaacattcaagcgcggacggctagtagttttcgtccgaagggtaggatacagataacaacaatgtcaataatgttatagatactataaagttttttggaaactctctttccctaatgctaattaggtactcagcaaa

SEQ ID NO: 300228 - DNA, 3103 bp, Cannabis indica
tctcaaaaaataaaaggcctcaattcagatgaggtgttcctctatgcctctttaacggttgacaccatttggcggatcagaaacgaaaaggcacataataatactctgtttgatatttttcagtgcattgacaatattcgctcttcttatgtagttcaccatgcttcggtgttcccttgctctcctccctgcttagcggttgtctggagtcctcccccgcaagattggatcaagctgaactgtgacgtaaaaatgggtttgactcaatgtgtatcgcagtagttgcaatggatcatctgagcaaggtaatctgggtttatactgttagagtagattttgcgaatgctttatgcggtgaggcggcggcgtgttgctttgcgttggatataacgaagaaccatgcttttaaatttattatggtggagagtgattcgaggatagtcatcaacgctctcaacaggactgagtccaggtgggagcttgagaactatgtctcattttgtacatactagtagaaattgtaattttagcgtccataatgtggctaagtggatatttacccaccagaagtttggatatcttcctattcattctatccctaaacaatttatttataaattaccctaaggtctaactttatttaactaatatatgcacgtctttattttcaaaaaaaaaataaaaaaaaaaaaaataccccaaaatgatatctgcaatgctcattcaaaaaactatggataataatctaaaaaaaaactgaaaactatatgtgagtttttcactccaactagccaaatagctgtaaaccacactaaaataatctacataaataccaaaaatcagacacatttgcattaaaagacaagttcaagtaattcttttattattattattaaaaaatacgcgtttcagtgtaaaatagagaacgcgttagtatatttaaatttaaaaataataataataattacatatgacggaaaatttccaaattgaaaagccgaaaaaggaaagagacaagaataaaaaaataaaattaattaattaattgtgaaaaacggtgcgaaaggaaagtgccagctgtcaccgtagtatggtataaattcgcgggacccacctccaccgtattacattccattcatattctgacacgtgtacccttcggaaaataataaaacgccaaatcagctaagagccagctgtcaccgtttaattttagtttggattcgcgggacccacctccaccgtattaattaacgtccatttatatgctgccacgtgtatacgttatacatatttttaattccatttaatgatgagaataattgctttaaacagtggaaattttatttaatttaacgatataatgattagtgataaattattattatggaatttaatttaatttttttttttaaattgctgcaataaattttataaaaatatataataaaacattttaaattttgggtaatcatttttattgatgagtccgaaaatagaaatatttgaaaaataaatgaaaaaagattttatgtccattcgaaattaatcttagccaaacagaaaactgaattggattagacttgtctaacaaattcaacaaacataacttaatttatataaaacaaaataaataaattaatttgaagccatttttatctttgttattttacttacatgtttataataatttctatgaattttgaatgtgaaaattaaagtaaaataaacaagtctttgatgtgaatactaagttattatgatattatctatagtatagttatatataatttcttacaattttcttaagaaaattaaataatttaagatggtgaaattgtaatttataatttagttagtttattacacacggagggttagagagttccacattgctaatgtgtggaaatataatagaatatatacgaggaatgggctactcctcccattgccaattggttttgggatggaaccccattcaccttatttcccaaattctaacagtaaaagtctaaaatttttctttttgaaaatgggtgataaattgtaatattaaaaattatatttgttactttaaattatttataatttttttttttaaaaaacaattacaatatcattctaaaacaaatattgacatgaaaaaaataaaaaatacttcaacatatattttcaaacaaaaaaaacgaaaatagaaatgaaggttagatgttaacactccacctcaaaacaataataataataataataataataataataataataaggttaattatgatttctttcttctcgaatattgatatgtgtaaattgtgcctttgaaatttgaaagattattataaactctttccaaactattaatattattgaattcaagaaccccatctaatttcgtttaaagttttaacatgcgacaattatcctgtattaaatcgtactttaaaattttaactttactaaatcatattttttgaaatttaacatataccaaatcatgttcctaaaatttgacatgaatcaaattgtgcatttgaactctcctccacgtcaagcacccgttactaaaattgaacagaagttctcaaattcaacaatctcaattcaaaataatttataaaacctcaaaaattttgagaatatgatttggtaaaaataaaaattcgaaaacaaatcccaattaactaaataataatgataataataaaccaccacaaccgctcttgaagggattaaaaaataattgaccttctaaaggctagcttgttgtagtatgtactatgtaggtagtgtcatatatgtggggaatccttaaggtgattaccgatgacccaataaaaagtttaagtataagatccttttaaattgtcaaagtgactcaaggggcataaaagaaatatgtaccgcgttttccttttttattcaacataaataataataataaaactaattaagatttttactcttcgaactttgacatgtactaaatcatgtcctcttgaatttttatagtcgttaacaaatcttcttgaattactgagattgttgaatttaaagacttttgttcaattttagtaagaaaagtctaatatgaatcaaaatt

SEQ ID NO: 300229 - DNA, 1456 bp, Cannabis indica
ttttaatttttttaaaattatttatatgaaccaataaaaatgtaccacgtgtacactatatctacgtggacaatccaatgtggcatttaacagctaaatttagatgaaaattgtaaattgttaacgatatagtgattttgggggatttgccgttaaaatttaagttttaagagttaattgttggagaaataaaactattaagagttttaccgcaattaatgcaatttaaattaagatacttatagttatacttctcacgtaaattactaattttttcttttctagaatttataatcggttgtctttctttctaatttgattaacaatcagtttagattctttaagttttttttttttttaaaaaagtattgtaattcattgatacacaaataagttcaaattataacttaagaattagtgatggtataacatgcatgcttatgtgtcacaccatttgcttatcttgatatataagcgaaaattatagggtaatttgacttttgatctataaatttaaaccaaaacaagaaattgacttaaatttagacaccctctcaaatgtgagctcatctttcccctaatcccaaaactaccccctaataatatttcccacattttccctttctcttctctttcccttttaccatcattttttctcttcaacacaacaaaaaaatcatcatcttacctgtttttttatgccaaatcaagtagaaaatgcagaaatcagtatgaagcctagctttactacttagttccacaaaaaataggagaaaaactatataatttacaaagtttggagatcttagaggaaatcacaatgggtatgtgattttatgttcaactttgttcttacggtttattttattttatttttttttaaagtatattggatttttattagttgtacgttgatttagtcgtgtgttctgttaagtttagtgtggaaaaattagatctacaattttgtgattttttgggttttttgcatttttttttattaaatttaatgggttcgatatgtgctcaatagatttttgctctagagattagaggtgaagttttgataatgctccccccctttataaaaaaaaaaccccccttatcaaaaaaggtttgataatgctcgataagtgttcaataattgctcgatagttcatatttgtaagcaatgttcaaattgtttgatacatgtacgatacatgctcgatagttattcaatacatattactaaattttagaagaatatttattttgtttttgtattagattggtgtattgtatgtttctctaatcttcgcttcgatatttacctgttctatttttattctttttttagtaaaaattgtagttattagtgttttctagtataggtgactacatttggaacttgtaattctaaagtatttaaattttcttaacattgtatatttgtattataatctataatctaaca

SEQ ID NO: 300230 - DNA, 3512 bp, Cannabis indica
tatcgagtcccatatagtttaatataataacttttaaagagtatcgccagccaatcgcaacgcgacatgtcgagaaggtgctaggcactactggtgcctaatagcaatgctcatatatatatatatatatataaatttatatctagaaagtagggctgttttaaattagaccattttgggcaccagtggcaccgcatgattggttaacgatattctctaaaagctattctttaatttatatgagacccgatatttaattacaccaataacaatataacaccgaagaaaatactaaagaccagtgagaacttttagtgattctctttagatcactatctatatacataaaaaataaaacaaataatggtttgattaagaagccacatggcatgttaaagatgcggctacttgcatactagtttaggacctttaggttggccccacagccacaaatcaaagagaaagaaggaaagtaacgcggtttacatttacaactcaccaatttctagtgaaatgaaaccatggaaacagctacagaaaggcaaaaatgctcattatatttatgttggttgattgctgctctatagttttcaaaagaagcacaaacaaacgaaacattggcaaccaaaaactaagagcatgtttattatcttaaaatttcttatggatttgattaaatttcttctaaaattcatagaggaatgcttaaagacgacccgagatgagtgaggttcggtcaacagaaacccgcctaaccacaatactcaagtccagcttactcttcagaatagtgcttcacaataaaagaccaataaatcttctaaagctagttgggtattttatagtatagacaatgacaacattcttcaatcacctggcacctcaattctcaactattcaaagtatcactaaactaactacacatgacaaacatttggacaagatttataagcaatagcagtctcatcaaacaataacacatacatatacaaaaaaatcaaactaccattgcaggggtatcacaagttttccataatagaaatatactgaacattcaacactaggatttaccgatagcacgcttgttaaggccatgaaagaaacggtgtttctttctctttgaatgtcgtcgcgtattctttgacactacgtaagggacaaactgtacctgcagatattaaaaaatgtttcaatcttttccctttcgaaacaaagcaaattcttctagaaaacggaaggccatataaaaaataaaggatacatagataagaaacctttgagttgttccgtatgccaaaatcttgaagtttggccttgtcatctagtagcttctcgttctggtatgataggcaagaattcccccatacatgcttcctacatgttcaaattaatgacgattaatcctaaccattttaaacaaaacacgataaataacgacaacagtacaaaaacaacaaagtaaagaaaaacgatagaagtgaattttgttccagcaaaaaagaaaaaccacagaagtacaattaaagaaatggcaattatcccttcaaaaacaattgtttactagcatcaactaacaagagaggaaaaactagtaaatttacaaaactaaccatgaaatatgacgatgtcccatattggattgctccacctcatttacattttgcttgattgcaagcttaagatccttgacagtagcagaattcatcactgccacatcttgccaaaaataaaaaatatatacatacaaatgattccattatcagttaaatgagccgagcctactagtattattattagctttgaacagatgttcttcattacatgttttcctagaaaatatctagttgaagaaaaactggatatgacagaaataaagtaccaaaagaagtgtcatcaagcttgaggatggtgatccgcatggcactacccaactcgaggcttatgagggtatctacttccaataaagtcgggttattggagacatcagccagaattggatcttccagaagagcagccagtgttagtgatgacatcaaccttgccgtcttcatactttgactattgtaactttcaattatcacattttcttcttcctttgcactcgattctaactccatcagattcagtggtgaaagaagcaacccaacttggattgtaggatctccaactctcacttgcctgaaattcttacttgggagttaattgtgaaaaaaggggtcaacaaagtccagttgaaaattagattgcgttaggttgggaggactaaaaaaataagaataggaatgagaatgagaataggaataaaataaaatttaaaacacataaaatgaaaattgataaaaaaactattgtaatttttctcaatggtttttccttctatttcaaaatggaatagtaattccactatagaaaagtcattccattagaataaaattccagtgctttaaaattcaaccaaacaaagaaatgaagtgaaaattaattcctttccgttctattcaatttcattacctccaaccaaacgcaaccttagaagcaaaaggggctcttagggaaatgattaaacttatggttcacttggtgggttttagttgagaggagttgagattaagggaattagtagtaaattagagtaaaaactgtaccaaatcacctaagagagcatggatggagcatgtaagtaatataaaaatttcaattcaactaacatgacaaccaaactaaataagtattgggcatgcaatacacataattaggtgaatgtaaggcaatcctaaaatatatttaaacacaattttatccaacagaaaaattatcgaaggcaaaatatcctaaaagaatggcttagaaatctagcatctaccaacgaatgaattataacagccctccgaaacttgaacaaaactgggaattagtcacaaaaagagataaatcaaagttcattctgtatgataacatgattaaccaaaggcatgtatcactaagaaatgaaaggcgagaaggaataaaagaagtatagtaacaatatatttaattaaaacatataaaccaataatattcacacagtcattttatcaaacaccatatatgtcaactactacaacaacataatattaaccttagacgtaatttcccatattaagaaacatcaaagacatattcagaaatcaaaccccaatgaccctatactgtatgtaacatataaattccagtaaatcccaataataccgtatataaactatacatgagagaaagaggcatttacggtgtagagtgcggtggctgattggaagtgattgaccgccaataccaatatagtggaagaaaatttcttcaatcgcgagcggggcgaagagaacagaggagagaatgtgcgtgtgtgtgtgtgtttttttcttctctatttttatggatggatggaaaatacgaaggatggagagttgcagaatgtaatccctccaaactgtttacaaaggtagagaggtgaagggtatagattttcctacttccag

SEQ ID NO: 300231 - DNA, 1239 bp, Cannabis indica
tatttatgttttgttttgcagatcaaattggactttcacccgaggaagttatatcaaagatcatggcgaatcctgatgttgccatggcatttcaaaaccctagagttcaacaagccattatggatgttagtgttttcatcagtgcaaactaaacattttggagatgatcttgatactaactaattgtcatgttgctttttttgcagtgttcacagaacccattaagcattgcaaagtatcaaaatgacaaggaggtaatgccattttccatttgtccatttctttgactgcacattaaagaatctttgagtcttgatttaggattagaaatatatagtttgatttgaaatgatgtgattttgtttctttcccttatgttttaggtaatggatgtttttaacaaaatatcagaactcttccctggagtaagcgggtcgccatgatggtagcttagatatattattagctttgggagtagagagaggttttacattggcagaatttggtagaaaaggaggcaaaatggttggagaaataggctgaaggtgtttttaagttgtatttattttaatttgtactttgaattgtgtattttaaggtttctgaaaatttaattttctgaggtagcagctccaaattttgtggccaatttggcatgtgaatcaatgtgatgtgttcctaggcctagctagtaatagctatgtcgttcaaatattgactaacatacctattctttaacaacaccaattttcaacatgtgcactactaacagatgagtataatacagcaatcattctcatcattttttagtttctctctttattaggtcactcactcaatatacaaaatattagattatagcagtctcaattttttagtccatatgaatactttattatgtaaagataaaatttaaatattttattctacgtgattgttttttcttataaagattagattaaaaactcttctagatgcaaagtttatggattctgtacccaagtaacttgacatcagcaagagtaaagattttgtggcttcgagccaacacactacttaagaaattgttcaatattaattgtgatttactaagaaaatgttgaaatttcagtcacgaaattgcaagtcacggttctcggttgcttgtagactcggtggatgccacgatcctatacaaacatggacgttagcggtccaagcaaaagattttttttgaccaagtttgtctttattttattt

SEQ ID NO: 300232 - DNA, 5003 bp, Cannabis indica
acggagccaatgttttcatgtcgcgcaaactcgtgccccctgaaatcttcgatgctcttcgcgacgctctaaacaacaacggtgcccaggttttcctttgttccgatccttctcgctctggccccgacgatttccacattatctcttctcccgatcacgaaaagtttgaggatctcacagccaaaggttgtaacttgctcggcccccaatgcgtattttcgtgtgctaaggaacatcgggctctccctaaaaggcaagggttcacctgctgcctcgcaatggagggcgtcaaagttctggccactggttttgaaggggatgaaaagggtaggattgagaagttggtaacgtcaatgggaggagtatttcattctagagcatcttcggatgttagctttgtcattgcgaagaatgttcttgccgggaaatacaagttcgccgtacaagtcttgaagaaaccagttattacagcggattggttgtatcaatgctggaacgagcatcgaattgttccccatgaatcgtttagagtccttcctttttctggattgaccatttgtgtcaccagaattccagcagatgaaaggaaggaaatggagaaaatcattacacaaaacggtggaaagtactctgctgagcttaccaagaagtgcacacacctgatttccgatgctcctgaaggtgacaagtataaggtggctaggagatggggcaacgttcatattattaatcgtaaatggtttgatcagtctgtagccagaagagctcgtctggatgaagagtcctatcctgttcagggtggtggttctgtatcctcaaagaaaagaagtgtaaaaatgcagcttagccaaggcaaagatatgggcaatttgcaatctgcaccctcatcatcagtggctacacacaccaattcatcaattatctctagttctgggtttgtgttggattcagatgtagaagctaccctctctcaaagtatgtgctctacattacctgttgctccagtcaattctaaacagcatggtggcgaagaacagagtgtagcgaatgattctgagcatgaagacagtgacctctacttgtcacagtgtagaatattactcgttggctttgaaacttctgaaatgcgcagactggttaacatggttcgtagaggtggtggctcccgttatgttttgttcaacgataaattgacccatatagtagttggaactccttcggagattgagaagaaggaggtaaggaatcttgcagcttttggtgtcattcatgtggttaggactacctggcttgaagattgtgatcgtaaaaaagaagagatacgtgttgatcaaaggcatgttgcacatgatttacttcttcctagaggagcacttatgggattggcaggtctaaatcaaggtagagtctctgctgctcatctgagcatgccatcatctaatcctttatcaggtagaataaggggtgaaattggaatgccatcaccattggagggaaacaaagaagaaaaaccagaagaaatcaacatcagtggtttcagctttatggcaacagcagcaaaatcagtgcagcacagtaacgttgctgctgtaaatgataatagtgagaataagaatgaggctccaaagagagtgcaatttgatttaagtactcaaaatggaaaagtttcaaatgtgtttgcaggtaaagtatttgaattttcaagttcctttcctgaaggacggaaaggtgaaattgttcagtggataaaacaaggaggaggtgatatagctgatgcttttctgaagcagagtgtgaacttcacagttgaatgtcatggtgtgataccaaagttagtttatgattcccaaactttatgtgtatcgagtcattggattcggtcatgtttggaggatggatgcttactgaatgttaaggatcacattctatattctccacttccctgttggattcctttccctggatttgaaaactttcgattttgtgtttcgcaatatgaagagaaagacagactgcttttgagaaatttgtgctttgttcttggaggtaaactagtaggaaggttgacaaagaaggtcactcatctcatttgcaaatttgcaagtggccccaagtatgaggctgcttgtaaatggggaatacgttcaattacatctgattggatatatgaatgtgtcaagcagaataaacttgttccttttgatcaattttctccgaaggaaatcactgctcaagatcaagaggctggattgtgtgctatgagccagttttccacacaagctgcccaaatgatgtctggagacatgccatcccagagtacaagtcgatcagaagagattaaaacatcattaaatggaattattggtagcagtaaagaaagtttcggaggagctaaacatactagtacattgcataaaaaggcaaggcttttggaagatagtggtaaattgaatatgctttcttctggggtacatccaaatgattccataagcaatgctaataattccatcagaaatgatgtggtggcaaagggtacagataaagtgtctcatgttgttccagatgtagctgcagcaattgaggacttgttagagcagactagtaagattcatgatcaaaagtcaccaggaaggactgcttgtgataaaagtgttttcccatccaattgctcaacccttggtcaagaccattcagatacacattccattgttggcttatctaaacactggttaaacagggaaaaggatgacaactacaattcatctggagatggaaaaaagggcatgtatgatggatttagtgaaacacaaactgactcccagattgttggttatgaagaagatttgtcaggcaggcaaatgcttattgatagggtccgcacccggagtagtatgacttaagatagctcctgtgaaaactaccaacattttgaccttattcctgtgagttttgcttctgcattgtaaaaggttcaattttttcttttttaacaaatgtaatgtaaagttttcaccttattcctgaagcacctatgaagaagtcataagctcactgatgtcaaagcttgaattgcttccggggaggaaatggaaactatgttaaaccaaactgaagaaaacaagcttattctgaaacaacttaaggtattaagtttaaaatttagaaaatggcatttaatacaaaagatctgtattcatgattttgtaaggtttcattgagacttgtatgatctcttcttttctaagtttttgctgatctttttttcctttcccaatttgacttagaacaattatgcacgagcattaggaagagttgagagaaaagttgaagacaaaagatgaagcggaggatctaactcaagaaattgctgagttaagtaccatataaccgtgcagcaaagaagaagtaacatataactggtttgatggaagaagagcgtgcttgcattgaacaagcatctctactggtataagcttactattactctgtatcacatgtgatgattgcacattttttgaaaatgattttcgattgggttgtttggcaaaatgacattttcttttttatagttgttttgcacagtggtcttgttttgtcacaaagtgaactacttctagttataagactccctcacaccctatcatgaatttcagatgttccacatgcttgtcaaaaaatctagatgtcccgcgatgcaaagtggctataaaagaacaacaaagacacttggatgccgctatcaaacatcttgatggagcatagaccctggtcacatgtcattagcaaaagtcaataattcctttaataagctttggagaaccttttggagccgtgttatttcttaaggttttacagattatgtattatggactgctgtagccaaagtgtacaatgtacattttgatgggatagaagaagttgaatttggtggaatgtaaatatttgctttttgtggacaaatgaagcaattggtagaataattgctcatcttcctgataagaggcaaccaagaagttcgttcaatatctttcctaagcttcttttaatggctttaattgtttttgtcaagaacattaaactagtttaagtcttttttttttttttgacatgtagtttaagtcttaaaaatctgttggacatttccactccattagatctgaatgctaaatacttgcattattaaatgacttttgaaaatattgttgaaatctactacacagaacaactccacctccttttttgggttggaaaaaggactaacactttttttctttttttaaaaaaattgaaaaaatgaactaaaacactcaattaattcaatactattagacaccacgttccagtgttccacacttccacttttgtatctttgttctggaagtagcttttggattatgaaaaagaaattcagtagtctaaaatgttgatgtccaatattggctcattaagactttgaatttcttttataccaagttctagtccaaatttattctcaatagtttacacaatttttcttttaattctctcaatttgatctgggtcttttgcctccctcatccagagctctgctcttccgttttcaagcttcccactctactttcttctttttaatgaaatagtgtatttctctttagggatttttacactaaatacctaaactgatactctttttacatttatacagatgtttgataatttttacatttatacaaactgccatttatttttctacatattttgtttgtttttatcttctaatttacgaaactacaggccacaacttttactaatacttacacatactccatagttttaaatattctctctacttcaatatcctcacataataagtgaatattgctcatttatttttttaaagacttattattattattaaattattttttaataaataatatctttattttattgacactatcatattttattattattgttgcccctgatttttcccaatatacgtggaccaaccgaataaggac

SEQ ID NO: 300233 - DNA, 4861 bp, Cannabis indica
atttttattttattaattaaaaaataaaaaaataaatatgcccttaaaaatttataaataaaaaacctattatattttttaataatgataatttagtcaaattttagtattctgatttcttttattagttatgtaaaaaaattattcttattttttttctggatagtttagtaaacaacataataaaatattgtttccgattatttaatatttttaactcatttatttctctccttgactattttaattccataaaatgtaacaaaataatgaaatgaagtaaatttttttttttatttcattctattttattaactcaaaccaaacactatcttagtttattgtacaaaattacatatttaaaatcctaacatgatgtagagaatttcaggatgattggttcaaatttttaattacataattgtgttaaatttgtgtaaaatttatgtgtatacatgtcattaatatgcataatttatgtgtgcatataaatgataattattatcaataataaaatttcttggttgaccaaaattagatctctctcaaaaagagggattcacacgtttaattttattattcattaatataatagcacaagtttcacaagtaaagagaaatatctattaaacaaagaaaaaagaatcttcgattcatggaattcacacatatctaaaacataaatttgaaccaaattttgtgttaattatcaaaaaaaaaaaccaaattttgtgttaaccaattgatattgatcatttaaaaaaatacattatataaaaaaatacccttttcatgaatctgcataattttattttagtaacaacgagattagaattttcaaaaagagaaaagaaaaaacttacaagaacactaaaaccagtgaccccggaaagggagatggctatggctgagcttgaaagagcgagctcaccaaggtgaccaaccatcataattgaaataacttgtaatagaaattgagataaaaccactatcacaagaggtcctcctaagaaccctaatctcttcacttcttcaaaaaaaaccttccaattccataatgtcacaacaatcttattttcaatctcaatatcaccattaatgtctctttgttcttcatgaatattattctttaataataagctctcttccatggtcatcttattttttttcttaaacttttatgttatgtgaactcaattggctcaacaagtttagtatttatttgtatagatcttgttcacaactttatattaaatttaatataagaagtagtagatagataatagtattataatatatagactgacatgcatgactgagatatattatgtctacttagctagcctttattgctatttatgtgaaaagtcaaggggtagattttattttgattaattaagatttttgatttttaaattttgatactaaatcatgttgtttaaatttttttaaagctgttaaaaattccttttaaaatattaagattcttacatttaaaaacttttgtctaattttagtaaaggaagtctaacatggatgaaagtttaggaggtatggttttgtacgtgtcaaaattcgaggagtgtgatttggtagatatcaaatttggagagcatgatttagtatacataggcaatcacgaaattatttaaattgaatgaaattggacaaaaattcttaaatccaataatctcaatagtttagggaatttatggccagaaaattttaaagggcataatttagtacatgccaaaatttaggatgcaaaaattataattagccttctattttagtttgaattttgggtgtacctgattgaaactcggtacccaaaaccctaacactaaaaacgagtagcttcgaaacaaattttgttgggaaaaattataactttatgctcagtgaaataataaagagatgaaacaaaaaatttttactcggcttgataagattacaaactcacaaagaaatatatatttcactaataactttaaaattacatacacttactatttcaatctctctacacaaatttcaatacaccattggtttcttccttactctctcacaccttacttctctcttaacaactcactttttttctcacacacacaaaattacatatttataatgttacaaaacttggctaccaagacacgctaaacttttggtcgtcaagacttgtttctcacaattaataattacccaaaaaaaagttgcatctttataaatatagatatataaataaattatataatttgagtcaaactccaatacattttcatacatccaaaaacccaaaaattcaaactcgaaaaaacctgaaacccgacatacttgcccaatatgcagccctaccgaaaatataataatgaactttttaaaatattttcattacccaacagttcttttgaacataatcgattcaaactgtctcacatcaaaaaatttgtaacattatttttttccctcaaagttgacactaaattttcaatatatttctagtgctctaatccattttttgatgtatccccaaataacctctcctttgccatacttgcctgaaatattaacaaacaaacaaaaaaaactaagtttagagtcttactaagaaggcatttgaattgatcaatatgtacaatgtaaaattagtatgatccactattatccaagactagagggtaatattggaataatatatatatatatatatctatataatagagatatagacaagagtaaacctgtttttcccagtttgtacaaccagtgacaagagcaagcaaagtggtttggacaagggcaccactttgtatgccaatccaaagcccttttcctctcatatttacccaaaaacccaaaattgcagcaattggaattccacatagataaaatgcaccaaggtttatgaatgcccctatgtgttgccacccacatcctctagcaatacctatttggtacacataaatatatgtatcatttaatagagagattatacttatttagtaccttaccatctacaattttaatattttttaggaaatacaaattaagctactctattagaaataatacttatgttatgttctcaaaagtcaaaatcaaaataaaatgagggtaatttggtcttattgaccaaattttaattattttacattttttttagggaaatacaaattgggttaatctactaggaatgatacttatgttgtgttctgataaaacaaaactaaaataaaacaagggtaatttagtcatatggatcaaattatttagatgaggtgtgtcaaactcagttcactaaatatgaaataaaatataattttactaagtattgaaagtgaatattttgcaaaatcaactataatgagcaaaataatctctatgtccgaacattaagcgagcataaacatataataagtctctctaaatgtcgcttaatgtgaatttcagcaaatttagtttgcaaattttacattttcatgttgttagtttataagtcgaaaatatgttgaaaataattctattattattattattattgcttacctgataggactccttgcatgctgtctagtacaacagataaacaaactagaggagccatttctgtgacataattcacaacttctttctcattactgaaagtataaccaaaaacgcctctgctcataaaaagtgttgtggttactatgctcgtctcggctatggctagaaacattgcagcaaaggttgcaatacgagctccttgtggattcccggctcctaattcatttgaaactcttgtactgtaatgaacaaagttatgtatttcatttgttagatcttattacaaagattaagattatcgatcatgtgttagaacttatgattagtattgtgtggtggagttaagtaaataaaaagagtatacatggaattattttcataaatgagtagtagccctagattaagacttcaattcaaggttagcctgaattaaggcgggttacagcctacactatctaggattccaaaagaagaaaaagttaaacacatacatttttttagtgtttaaaaaaatatacctattcttttaataagggtccgaaattctatttttcttcaggcccactaaaattcagggtcaacattcaattgttgtacaatattcatactcagtgattgttaggcctcaaatatatgagtcacaagttaagtagttcggcttagctcctatagggtcgattgtttggtagttagttaagttattgttattgcttttcagttagtgcaagctcaattttgagttaaggcaggctagtcccgtacttataatatacttctatacattgaaaaaaatggtattttttgtgaaattttgtgaaataagttcaataatactcacattcccctttagatatgatacatagacaaaattattgggaccatacttagggtcagccgaactttatgaggagatatcaaactatctcggagagtttggaatcttgtaattttgacctttaatatcaatagtcaatataatacttatgttctaatcttttccaagaattaaactagaacaatagtgtatcagtgttcaataaagagattctcaaagcccttgtggctagatttcgatcgttgattagaatagtgtttagtaaattgtgtttatatataaatagatgagattttaatgattacatcaaatatataactacagtagttatattttattttagttgttggatcattgttaaacgattgtgattaatttaaaaattaaataaaaataagtaataaattacatgtaatctcatactaacctaattttatttatttttataaataaaaaatatttataaacattagttgt

SEQ ID NO: 300234 - DNA, 985 bp, Cannabis indica
ttttaatctggatattacattggatcattgttactttaccccctcaccaacatgctattggttgcaaaatgggcatataaaatcaagtataatgcagatgggagcattgaaagacacaaagccaaacttatggctaaagggtacaaccaaaaagagggagttgattactcaaaaacctttgctacagtcactaaacttatttctgttaaacttatccttgctttggcagctatcaaaggttggttccttcactaacttgatgtcaataatgcttttttacatggggacttacatgaggaagtgtatataactatacctcaagggtatagtcctaagggggagcttcctcctaatgttgtgtgcaagcttcaaaagtccttatatggactcaaataagcttcaagacactggtttgagaagttttccacaacaatcattgaagaaggcttccaacattctacctcagattactccttattcattagacaacgggaaacgagtattgtaattttacttatgtggatggtgtcatatacttgctgggaatgatttgaaagccatgaatggattaaaggttagcctcaacatcaagtttaaactaaaagaccttggtaagctgaaatatttccttggaattgagattgctagaactgaacaaggaatttttctctcacaaagggcttatgctctacaatttcttaaggattttggctacttgggaagtaagcctgtaaatactcccatggaaactaacctgaaactaagccaagaaggtgaagaaaaattggatgacccaaaattgtataggagggtgattggaaagctccaatatttgacaataacaagacctgatttggcatattcaatcaataaatgtaacgccccgatttcccgagacgtcacactagctagtccgtttaaaaccatttaagataaagacaataaaagacttctttaatgaaaaataactaagcatgagatctca

SEQ ID NO: 300235 - DNA, 2497 bp, Cannabis indica
agtaccgaaaataaaattcaaactattatttattacttatatcataactgaacttgaaatctcattgaccaataatgcaggagatcgatttggccggctatggtgggataaaggagtttggctccagcatgcagcataaaatctatgtttgtaaggttgttttttcttttgtttattcatagctggtgtgttaagaacaaacaagacttatttgtttttgcaattgttttcttgtgtaaagtctttgtattatacatatataaataatataatatatattatgtgtacacccttaatatgtgtgtatgctgtttttttgtatgtatccaatttaagtgatagacaatactaaatgtttgtaatgcaagttttgatgttgatgacacatagcaacaaatgacaatgataataaatccttaaaaaagagtcctaaatactcttgaatagtgattttggtctatcatataaggcacttttagctctctttttccctttcttgtagggggtgttttccaagaattcaacttgaacaagatgctattagctgaactattatatatctatatatatataaatatatatatatatatatataaaaatcaaaatttggagatgaaagtgtagggaacttgtagggttatgatgttggatggcttttgactttgcaggtgcatattgtttggatatgaaccacatatatactttgtgctatgctagcttatcataggcattgctgtccttgtctttggcttaattttttcctttttttccttttgtaatttaacttaggctaatgaggggcgaaatccttttttattttaattttatacgcttaactctctcatttttattttatataccaattaaatttcaccgttaaattactggattattactgtgttcatttgtatatacataacgtattgtcatgtgtatacttgtttacacaataattatgatcaatattgatcctttaaagggtcttgggaatcttgttaagatgactatgattgggacccaattactactgtatataatcacacgcacacacacttgacacttcttttttactcaaacaaaaacacttaattatctttttatagcattatttagtctcctttatgagacacaacaatcttcatttgaaatctggtcattggacagagagagcttatattatatatgttttgattggtttggcaaatttttaaggtggcttagaaaagatattaaagcttagtttttgcaagggtaggatgatttctttctttgttctactataagaaacttaactcactttctcatatgtaaataatacaaagtggagtagactgcatattctgtggctaaggtcctaacactttaaatgtagacaattatgtttgtcccaatattttaaaagctgcttccttcacccataatacaaaagtaaataaataaagattgaaaagacattgctatgtcattctgtttacttataaggtacaatttatagtatattgacaaaaatattaaatattaatttggttcctgtgttttgttcacgatgcaaaaatttttattatgctttttaatatgactacgtatatatgaatgtgagtgtaattgatagactagtgaataatacacaataaatattatgatatttagatgatggtgtagtcaaaaagatgttatatatagtatggaaataagatttatggtgaccccaaaattaattaagtaagtttgatttaaaggaaaataatagttaagaataatgtagtataagtgaaaatagtaaggcacaaagactcccacacatgggaccatcagtcctacgtacgtaagaccaacaaacaaataggctcaacatacacttagtctaaatggagaatggagagaattccataggtttgggcatggacgatcgagtagtctattaattaaagcatgcattgtgtaagggagtacaatatatacatgtattaatttcagaaccattagagctcaagtcaagtatatatatattattaatatactcctttgaaacacttgtaaaggagttggaaccttgtaacattgagagatcgatggttttcaaatacaaaccattcatattttgttcattatcatataaaacctaattatatatatcaaaagaatctgttatggaagaaaatgtacaacacaaataataaatttcataaaaataatatataaattaaatttatgcatatacctacacaaatctacaaagaaataattaataatctatatatgcatgggaacaatatcgtcagaaagagattgttaaaagcaaaagaaaaaaagttgataataaaaatatttaaattaaagttcaaataaaaatgtaccagaaaaaagatcatgttgtaaaaaaatagtacagataaaaagataaagctggatatgtaatgtagggtttcaaacaataatatctctatatatgtatttaattaattaaatggattttttcattttttacacttcaaaa

SEQ ID NO: 300236 - DNA, 1476 bp, Cannabis indica
ccatagcttggtataatgtaatttataaagttgcaacaaagcttatatgctcacgtttgagaatgatcttcccgttatcattgctcaaaatcaaattggatttgtccaaggaaagtttattgcatacaataccatgatatgttaggatttagtgaggcattataaaaggaatggaaagaggcctaaatgcatgattaaaatagacctaattaaggaaagtatatgatacaattgaatgtgattttattgatgagatgttgaatgctttcgagtttccaaaataatttgtggacttagtaatggtgtgtgttcgaatgccttaatttagccttatgtttaatggatgtttgcatgggttctttgaagctagaaggggtttccttgacggagaccctatgtctccttttctctttatcctaggcaagaaatatctatcaagattaatgatgaaagttagggagaaagatgatgttaaactccatgagcgttgtgagaaactacaattgttacatctatgctttgcgaatgttgtactactttttatcacggagatttcaagtcaatctatcacatgcttcaaggtctcaaaattttttctcaataatttgggctacaaccaagcgaacccaatcttatttttttttttttgttgtaacatggctaacaatgaaattcagagggtggtggaggtgtccaattttggtaggagtcagttgcctttctaatatcttggtatttcaatttgtgccaaaaaaatacctattgccaaaagtgatgttttgatagaaaatatggtccaaagaatcaaagtatgaagcacaaggaacttgtcttatgtaggttaggaaactttggtaatttagtcctaattgttattcattcttattgttcacaatcacatcaaaagcttcttcaaaaagtaaactctatttgtagaaggtttctatgggaaagggtggatataaatggcccaagatcggtagctttggaagacttgtgtaaataaaaaaacaaggtcgattggggtttggaagaaccaaagaatagaatgaagccgtactaggaaaatatgtttgggcaagtgaaacgaagtagaacacacttttagtgaaatgggtgaatacagtatacattagagaagaaggttggaggagggcctatgacgcacctccctccagtagctggtactgaaaacagattatgcgagtgaagaacaaaattatagagatgaatatccttccaactgttacaacaggtacatatttgataaggaatggatatgctaatctgtgtcctgagtttctcctattaattggcttaggaaggtctagaatagactgtctataccaaagcatagattcatattgtatcttgtggtattggatagattgagatttaagtcaaggttgtttagatacaataatttcttggatgaggtgtgtccgatttgtggattaggtaaagaaaatggaaagc

SEQ ID NO: 300237 - DNA, 2597 bp, Cannabis indica
gcataaaacccaacaccaccatggttgaacgatgatgtgtggggcttgggctggtgtgagtggcgctactatggtaggcatggcactatgagagagagcagtcaagagagacggagatggagggacggtggtggagcctcttcgtcgacaatggagggcatggcactatgagagagagcagtcgagagagacggagatggagggacggtggtggagcctcttcgtcgataatgtggggacggtgttggagcttcttcatcgacaatggaaggacgacgatggatcaccttaagagagcaagaaagacaagtaagagagctagagaaggttcaaacggaatgaagaaggaatgaacgatatctaattttttttttagagttttaagtgagagagagagaaagagagtaggcgacgatttataactgttagctatacaatagtcggaaattataaatcaccgcctatagtttagctaacgattataaattgtcaggaattccaatctcatagcaattttaaactgatgagtatacttgatgattttttaaaatttgcgggaactctcaactgtgggcattgattttaaacactcactttcttctattagcgacgatcctaaaaaaaatgatttgagcaccgatgagaatagtcctttttgtagtagtattggatgacgcagcgaccaaattttgctagtagcaaacttagcaagggtatgaaaaacaacattaattactttagaataatgagaaagactaactgaatgaaaaagaacaagattacaaccaatatctctaagaactaagcctaaagaagagttcaaagaaacataattattaactttataatcacattaaggcaatcggtctcaagctaaatattcatcctaacctagtaattgacattatgttactgcattatgcaaagcaagcttcaaaattatagttagcataaataaaaattaaattaaaaattttacattactctaagtatttgtatattagctatatttttattaatattttttattttataatatgtgtttgtatttttattttagtattatcatcatcatctagttcatcatcacttatgattcccaatgatatcaatattccaagtaaaaagtttgcttatttggccaaatatatttaaagcaaaaaggttttttcaagtgcacaattacagtatacctcgttatgtccttagagaaacaaactcacccatttatttgataatgatgatattacttagttgatatatttttaaaaaattagtgcatttgtcatctcactatatatgaggtaaatatatagggtgccaattaattatgtttgttagttcgaatataaatagttaatatgtaatgaatttaatattattttcattatgtagaggcttatacgaaaaacttatcatgttgaaaattattcgacataatttggttttgagtgaagatatgagattcaaattgagaattattattttttatttataaatcaaatattgatacatattatatatattatatgtatatgtagggtcttaggtaacctaataacaccatgtgccacttttacatcatgttgctaatcatgttgctaatgagagacttaactatgataaaagatatatccaaatgagtatcttttaaaatatgtaagtaataattaacatattattttaaatgtgatcaattttaaattatcaaaaatactaacataaagtttaaaattaatttatacttattttgcagtatgatggtaagaccgagtatacaataaatgatattaacaccgtatatgaagcatgggtcgattactataccgagtattttctagtatagtttttttaattattttttctcttttttttttagcaagtacaattttaactaaatttatagttagaactaattgtaattgtcatacatatatttactaacatatatagtgatatattatgaattttattagataatattttactgcaacttacgtttgtataaattgtgaatacatccatataattaatacaaccaaagtaagggaaattttaaaaaatatatattaaaattattttttttgccgactaaaattaattacggcggtgtgaaaaatagtgttataattgacatatcttagtagtttcaaagtgtctagaatgcgacctatcttggcagtttatcaggtgatcgccgagattgctatctatctccacggttttagaggtgtgagaaggatgggacacctatttcattagttaaatgtaaaactggcgagatttgttaccatatctcgacggttcccaaccgttaaaattggtcattactctatctcagcggtctataaccattggaatagatttatcacaggattcgtaatcgccgagataagataattttcttgtagcggctccatttgaatgccagcggcctcaaaaagaataagactagtaaaagtatagggtgattttacaatgcaccccttaaaatggatgtactgatgcacctttaacttgtttcggcatctagaagaattttttagtctaatttttttttttcatattcatgtacgttatagctatttaagataatc

SEQ ID NO: 300238 - DNA, 5074 bp, Cannabis indica
tatggcgtcggttgtttgtaaccctttagcgtcacccggaatagcgtcggtagcgaatttcgccaataccgacgctgaaagcccttaaaaaccgcctctaaagcccaattttgtagtagtgcagccttaagtttttaggaactgtacatcgcaattaatttaaaaaaaaaaatacatgtttgttatggaagaacatgagaaattttttttctatattttttttacattttccttgatctccagaccaacaaaaaaaaaaagcaaagcgaagaatctatatcccacatgtggaggtaaactgaggcctgaaaactaaaagaggcatagatttggaatctgtcatatagaaaaagtgaaagatataaatataaatgtacatcagaaactaataaggacttcacaaaagaaaaaggctgccatatggaaaccgagagaacatctccacgcctatacatgtgggcatcaactacttattataacttagccacaaataaatatatatatctaaaccattacatgatggcccaaggtcctatatagttggtgacttattagaccctatacaaggtcaaaaatgtgtaaatttatataaatgtaatgtatatatgtatatgcaaatatttgtttcttctcatggtcccctaagatatatagtagtttcctaattctgtctcctcgaagttccacactcctttcttcatgggtactcttagtagattgtattgtactgcatatttgtttataaactaattatatgaatccttaacatgttatgggaatgtaatgcaatttatttttttgaaaaaaaatatatatacctatatttatacatttataaatatcttattgtttgcatgggatttttagctatactttttttgttaatttttttcttatttatttttattttcccatcattatatcccatgacattttttaaagtatgattatcccatcacacaccatgactaaccgaccaaaagaaaaaaaaaattgctcttagaaatatataaattgcataattgtaagaaaaaatgaaacggaaccttttcttttttaagggtaattattaattttctagctttattccatgttagaagaacagcagtcagctttggttaccgcaaaagcaaattcaaaaccccagattcctttcttttgaatgagtagtgaaaaggaaaattaatcaacccatgctatatatattatatatttaattatatgtagacactacacactgattatgattattgttagtgtcactcgttaatataaagccatgatttaagtatgattaaaattgaggaaaacaaaatgatcaaagaaactagaaggtaattacatattcgaatacattttttttatggatggagtctctcttctttttctttcattttgctttcaactgaaaattgcaggaatcctagctacttggactttatgcattgttttgagagaaattttgtcgttttgttgctccttttattctctcatatccatccatcccttcttcatgactagagttttacatattttctgtgtacgtttagttgtttttattataattgcgtaatcatttttaccacacatacaaataaatactagaaaacaaataagtacatcttttaaatataaaggcaagttttattttgaaaaatctgtctttcactctctgtctgtcttctacacacaaaaatcatcacaaaaagcatactgtggtggcacaaacttagatgtatatcacatgtgtgtgtgagtaaaacaagaaaagaaaaccacagagtactaagaacgtacgtaaattttccttgcgatgccaaaatatcataactaactaacctcatgttttaagtcctataccatatatatgatatatgctatatatataaatgtgttcgtacgtgacctcatgaaacccaaattaattaattctcaacgacatctcaatggtagtaataattatttagaaagcgaatgatattatttctaatcataaaatatatatatttatagagagagaacacgtactacgtatattctaataatcattattctgatatgtgtatgttgagttgatcattgtattttcagaagaataacagaacaaccattaattcttcaataatagatagcatttttttagatctcaaatgtaaagtacttgacataataatatatatcattattattaacttactgaagtctcaatgtgtgtgtacgtcgtacatatttatataaatatatacgtttttgtggtccattaatatactcttcggatttggaaaaagtgatctccaactgatcaataccactgaaacgtcaacactcgttatgttttgaaggcaaccaaaaaaaatggtggacgaaaatccatcaataatgaagtaataaattaaacccaacacatatatttgatcaaaaatatttatatattgactgatgatcatagatatatacatataacaaatttagctcaattcgtgtcagatacaatatataattataaatatgaacatatataataattaagtcctatactcctgagccaccacacacaccgaaagaaaatagaaaaagagatctaaagagagaaacagaaaatcatttcaagactatatgaagtgtctaactagctagaaaccactttacttttgagtgtggcatttctttctttatacccactctagctagcatatcaagaagacgtgaccatatatatattctaatcaattttccttccagtttccccttgctcagtttaattaacaattgaaacttgtaatacaaaatgttaaagagcaggtggtttgacaatggaacttttgtttcttgttagtaacgtatatatattaatttgtctatatatatatagctaagcgtagcgggaataagatacaaagaattgaaggcacatgtaataataagtaaaattaagttactatatgagatggttggtagaagaagtgaaagtagagaggtcggtccatgcattaatattaccaccactgccactactaccaccaccaccacctaagaactgatggtcatttaatccaagacttcccaaaaaatttctggacagattattcagaccagattggttatgaatattattattattcacctctaccttcacctcttgtgtctccaatggcttagattggaactgttcgaacgggtacgacaacctagttggttgttccgagttagatgccatgaaagggaattggtgaacttgatgctgcggcagtctccattgctgatgatcaccgtttccattaagctgaaattcatgaatattatcatcaccatcgcctgtgttccccaaccgcggaggaattcccccgaaattcaagccaatatcacttccagatccgtactctcctagatgatgatgaagatttggcagaaaaggcaagtggggtagagtctgctgtggacccaaattgcctaacatatctgcactactgccgctgccattagaagtgatgacagctgcagtagaacccaggcggtcggttgtgggggcggtagagggcgatttagatctgtttgatgatccttttgttctcttattcctcctgcaccctccgccaaccggcacgcttctcaaggctcctcctctagtccagtaccgacggcaagtcttgcagaagtgtcgaggctgcgtgaggctgtaattgttgaaatagcaaaatttagtgttggttgaatcacaacgagggcattttagggccatctcaggttgtggtatttttgctagacgggctcgatctgccatcgagcctggtcttatcgagcccgcaccacctccaccgccaacactttctggtgttggaagtagaggtgcgtgaacctgagaattctggtcattacgattgctattttgttgttgttgctgctgttgatgttgatgatcattatgattcggttgctgcagaatttcatcataaaacactaaagttaaaatcaaatacaaattaaaaatatctggtatattcaagaaggggatgagattagaaaggatatataggaatatttgtaaaaatatatgaatatttatttatgtggctttaaagatttttagcttttttggtgaagaagcaaactcaataatatttgagttggggtaagaaaaagaaaaattcataaaaattaataaaaacctgtggcggccagttgggtggatccagatacacatgaggaacagatgagaaagccatggctctctctttggagctttaaaaatctctctcttttctttttttgtaaaaaagtttagttgatggcttattttaggtgggagatatatatatatatatatatatatatattcttttgtgtggcttaagaatcacatcaaacgtttattaagaaagagtttgagagaaaggagagagatcatcagatggagatgtaaagatataaataagagggtttttgtttatatttattttgttcctttgttctgtatggtagtaagagtactactactctctcttatctctatttttgttttattaaattttagggtttaaagggtaaacgacaaccattttcttagtctttaagcttcttttttttctttatactgttattattaacactgtagtgcacccaaaaagattagtgcccatgcatgatcaagacagagagagaataattaaaccctaagtaaataggttaagatatatgaataataaaacaaagctgactatcaataatttgaaattaaaaaaataaaagttgggtaagaggtggggtttcgggtgtggaagcgtcacaatcgaatggacctttatttatatgggtctgttcattgcatatatttttttttttttttgcatggacatatattaataaaagtcttacattttttcaatcatttcttaatgtatatatcatcgtgtgtttgggaaggatggtcttactttacgtataaattggagccaaatcttctgtcccaatttttctctgtctctctatcccaatccaattaaaatgctccacctcaattaaatgtatatttcctaaaagagtgaatatatttttctttccaaaataaagagaatta

SEQ ID NO: 300239 - DNA, 1281 bp, Cannabis indica
agctccgactgacaccgccacgaatagtgcaaatgcgtgagataacgaagccgacaccaatccggctggcgtcgctgagccattgttggtcaacttgtctgcgccaaatcatgatcatacatcaatacaactttcataactttcatcaattttttaaaattctttaaaacataaatacgtagaaaaaaaaacgaggacacttactgtatgccatgccggagccttcaccggcgaaaacgaagatcagcattgagataaactcagccaaagccgccttgagtgagtcggcttggctgatctcagccggactacctattgcgattctacccatttcctttgtttataataatttttaaagaaaaagaaaatttagcgctgataacttgagctcttcgtggtttgattagctttagttagtggcagttatatagtgatgacgctgatgagtataaacgaattatctgaccggattagccggtttggacccattattaaggttaaaatgaacgacaaaaagttaagaccggtcaaataatgttcgtggttgccacctgtcaatgtccggagagccaaataggcgggcctccaaattgttttcgtagcgccacgtgtacgatctgatgacctgttatagagtggggtgatgattgaatggaaaaagtttcgattggagactgtcggctatgaaagtggggtccatcggtggataaatgattggtttatggtatttgcttcaccgaccattcgatttgtttatggttccactgacgtggaccgccacggttagccggtcccattatcatggactaatccactatttatgtaattaattaattttttttattattattagtagagttggtgaatgggtaatgaataactccaaagtatttatataaataatatttattataaaatattataattttttgaaaaaataaatagggaagagagaaaattttgggtgatgccctatttagatacatatgagagttaaagattgagaattaagaaaaatagaatattatatacaactactggtaataaataaagatttgaacatccatatatttattaatatttataacacttcctatttgatgcccataataattgtctcattaaaaatctggctgagaaaacactattagaaaattgagttttagtgacacacattgagtaattctaaaagtgtatagtgacacttcaacatgcgtcactaatgagagtggctggaaagacaatttttagtgacacttcatacgtgtcactgaaatcttt

SEQ ID NO: 300240 - DNA, 2290 bp, Cannabis indica
aaaaaaaaaaaaaaagaagccatgctgttattactgttatgtttcaaacctatcatcaatcaattatacacatggattttctttcataaaaggttttgctccacgtgtatgcatgtgatttattggttcactctaccccttcttagttgtcaaaaccgttagtggtatatattatttgtttatgaaattgggatattaatattgtgtgctgatgatcggtggtcactttccaaatatatcaattactttgatgtgctggactctcttcttctctttattccttcactttcttccatttggattggtgggagcgcgggaggttttcctgcaaaaacttcttcgattgatgcttaagttagaaagaattgtagtgaaagaagaaaaaacaagagagatttgaattagagagggaatttgcactgcctataaaatttgtttttagagacgattatttcagctgataataaaaaaaaatggtaacttaagcgttttttattagttttgggtttccgctcgttgaaaattggtatttatttgcagttattttataaaaaccgtaattataaaatactttaatatctatgccatcgatttttatttttaggtgtggatttaagtggaatgcgctagttgagggcctatgtcgttggctatttggtaataggtgaacgtgatggcagacgtatgtcacttatggagtcggttattaccaaataaccaacaacataactgacgacatggggattttataactttcttcgccttcatcttccccttttcgcataacagccaaccaagggaaaccagagcaaacccacgatgagtttgtaaagaagtatgataaatgtgagaaattttcaaatatttcttgagtgcatagagttaaaatgatgactttcccttacccatttgctaaatggggaattgacctcattggctcgctgcccgttggacgaggaggagtcaagtatgatgtcgtagctgtcgatttctttacaaagcggacaaaatctgaatccctcgcttaaatcaccctaagaaggttttggtctttatgataaagaacataattttctggtttaaaactccattaaaaatagtattagataacagaattcagtttaatagtgatataattattgaattttgcgagagaaataaaattataaaaagtttctcgtaagtggctcatccacgggtcaatggacaaagaagtagtaaataaaactctcaaatatgatatcaagaagagactcaatgcaactaaaggaagatgtgtagatgaattactacaggctttgtgggcccatcgaacaactaaaagaacacgacagtacatacactattttcactagcatttggcttagaggccatgttgccagtcggggttaatattgcgatccataaacatgaattatatgatcaaaataaaagccaagaattgatacaagaatccttggattttctcgaagaaaaacacaatgagtcataaattcacactgcagcataccaataaagaataattagatatttaaacaaaagagttcgagaaaggttattcaaagttggtgatttatttttgtgaagagtttttctcaatacttgagattcaacagcaggtatattcaatcctaattaggaaggtctttatgtgattaagacagtgatagggtcaggtgtttacaaattggcttggcaaaatgggtcattagtaaaagacacttggaatagtgaatacttatggtcgtattatcaataactatattaaaaataaattgtaatatcaagcaattatattatgtaattgaattattaatgaaatacatatttcttcaagtaacataaaatgtattttacattaaattattttagggatactattaactaaacaaacattaataacaatatttgatgtggatgaaaggttaaatattaatatacaaattctaacgaaatttttttgcaataaaattaggcaaaatacctaggtaaaattggtcaagaacagtataaaatcgatagatatatattctattttcgaagcaaaatataatagtaagtgctacaatgagatttctaagattaatctgaaaagtagtgataagctaaatgcgaatagaggaactaactacttgcttttaattttaaaaataacataagaaattaatgactaagtattttttttattgtcatatacgatgtacaaatttaaccacttgaggctagctcaagtggccataggagggtacgtgtgtgttggtggtcctggattcgagtcccaggttatgca

SEQ ID NO: 300241 - DNA, 1479 bp, Cannabis indica
tgtacacactaactaacataactgaattacctatcacaaaactaatacaattctccacagttaagcgtgcttgacctgggaaaatttcaggataggtgacctcctaggaagttttcccaggaagtgtgcgagtgaggacaataaagcacgctggaaacactcgtgttggtttgtagagtcagtcatcagtccatgaagcaaccagaatgacgtactcatgtataagagtcattcattctgtgggtgtaaggacccatagaggcttgaagtggggacgttacacaaatttacatgaaaatcgctaataagtttaggcagtgactaaacaagtaattcctctctattgttcaattgaactcttatatcttcaacctcaaatcaagactttcattaaaagcttaagattcacattcgaacaactcaactctaataccaattgttgacaatgctaattatctcttttgccaaaggcattcacaagaacacagtactctaaaactatactctcattgcgcactacactcacaaaactcaaacattcacaagcactttaatggtgttctacacaatcttgaagctcttagagcattttattcattatgtcaatgtacacattaagggtaagtcaaaatgagattggtcaaatctatactagacttaaccccttacaaaggacaaagccaaatctggctctaataactaacccctacaactaattgtacacactaactaacataactaaattacatgtcaacaaaactaacaatgtaaactacaaattatagaaacaatgaatataacaaaaaaattgcatgagtttctacgtgatataaactattaaagaagccctaatcaattgtaccaagataataactttataaaaccagaagttattcaatagtaattttgactatgtatgtaaccttatttatagacaacaaaaaggttcataggcacaattgagtgaccctattctttgttattacaataatagagatgttatagtgattaactctaattagaaagtaatcatcgaggccatgaaccttacttgctagacaaggaagttgtagtttgcacttttatcttatttggcagacaagtaagttttagtttgcacttattatataccactacatgtgagtgctatgacatgtaatggctacaactatacaataagttggcacacataaacgtgttaaagtagtgagtatacagattctattgtacgagaaatcttttgttgatcttgagtcgccatctaagaacgaatatcctcgcttaagagaatatttttttgtgtagaaagtctcaaattcaagatcttttcgcagcacaaattttctaaaaaatgaagtcatacgcatgtagattaattcaaagccagaccgactactccaagagcactcctccataaacgagtttctattacaaataacacaaaaaatggaggaaattagactatataccctttttata

SEQ ID NO: 300242 - DNA, 1455 bp, Cannabis indica
tttttaaaaaaaaatattaatatagtaataatttcggctttaaaaatatgaatggtctgacacgtcacacgatgttactgtccgagcattttgtacagcaacacaacacttcctctttcgtttcatttggggcataatatttcttacactcactcttcacgtgtgtctcacgtggtctatactcttccaattttataatttcgaacaaagaatattagaataaccgctaactccacgctcgaaggaagcgcgtgataatttaaatatcatacaatctaaatttcactgtcgttacgagtaattttttttcttcggttacgagtaatttaagtgcgtggatttttgttttggcgagtaatttacgtttcaaaatccggtgcttcttcttacctttatctacacgaatcagatgttttcggttagattttcttaataaggatcctaattcgtaattatattgctacttatggattataatttaaaaatcttatcctttaatatatatttctaaatatataatttcttggatcatagggtgggagagaacaattttataagctgttatattaaccttttgactttttcttttaagctcagaaagaattaatatttttcaatatatagatttgctacgatactcctaccaagcattatatgacatttatattagttttatttgaaaaataaaataaggccactaacctcaattatctaatattctcttcaatttaaaattaaagtggatatacacgacacagaaatgtaatttcaagttttaacataattttttctttttagcaaaataataataataataaaagtttaacgtagttttacttgttagttgatcattaaatttgccctaatgaaatcaccaaaaagtggtttagaaaagattttgcctttttttggttaataaatttaataaaacagtaccaaaacgaccaaattgctaaaaatagatcacttatattttggatctctattttgtattatcttaatatagtgagacgtaatatttattaacagataaagacttcattactggtacgaaccagatacaaggttgttgtgagtgtgacagataattatagtttattttcatatataattgtgtaaagaatggcacataattagttatatatgttactaatgtattagcccaacaaataattgtgatgggtttagactttagttgaacaataattaaactatttttatgtacctaaccctcggttaataatactaggtcgttggacaagtttgatcaataggtgatgatgtgtaattaagataattacgtacatgttatgaaaagaattgtatatattatagccatacgaattttattttaacatatcatagttgattgaacgccataaaaatgagactttattttccttataatataagtgttgggatatgattttgtcccgtgatgtactttcacggaat

SEQ ID NO: 300243 - DNA, 7995 bp, Cannabis indica
agttagttactaataagcagcccaatattgtgttttatgtgaaactttgtgtaaaagatgaaggtggatcatttgagtagaggtttgggctttgagggatgctttgttgtggaagcccaaggaagaagtggagggttggctatgctttggaagaatcaagaagaggttttggtgtacgcacttatgctttctcattaatcatttgaaccaactatagatcatgtcatcacagtgtgtagtatttgtttttaaatattttctcaatgctttttataccatgttagtattggtgattttgtgacttcgtcttttacttctctatttttaatatttattgctgtattagaaggccaattacttacacattagttgacttttttatagggcctaagccgtctgagttgtatggaaaaaatacgtggaagatagagaaattttctcagattaacaaaagggagcttcgtagtaatgcatttgaagttggcggctataaatggtatggggctataatttgtaatcttgtcatggattattcgtggttaatctatattacatataaatattagtctcttatatgtaagtcaatgtaatgatatttcatggaaagtaggaggcacttgtagaacgtgtatgaaatgttttacatgtaattgatatcttattgaagtgtatcttattgaaagcgtatctgatgcctcttttttgtctttctttccttccaagtttttgttatattttcgtagtagcaatatttgtacttatttaggatattacttttttggttttttttttcatgcaattaaaaaagtaattgtaagatgttataatggaattctggcaaaaaaaaaaaataaaatgttaaaagtgcaaaaattctcatctttatttggacaacaaataattggtgactagttttgttgtatgctatctttttcacgatgaacaaacacaaacctaagtcaagtagaaacattgtcatgcttgttattgtgacctaagcatttatgttggactgcaggtacatcttgatctatccccaaggctgtgatgtttgcaatcatctctctttgtttctttgcgtggctaatcatgacaaacttcttccaggtttgattttagaagaagttcaattgctaactattcaatgatggaattttgtcgaagcagttatgtgactgtaaaaacttttgatgtaaaacagggtggagtcattttgcacagtttactatagctgtggtgaacaaagacaccaaaaaatcaaaatattctggttggttgattgatcactaagttgcttgcagtgttttcaacatattgtactaagaagattgacaggatggaaattatgcagatacattacatcgattctggaagaaagaacatgattggggatggaaaaaatttatggagctgtcaaaagtaatggatggttttcttgactctgacacacttataattaaagctcaagttcaagtcatcaggtgttctattactgttatttcataagctcttatctttattacattgcatattcaaattcatattgaagtttctgtttgttattacgaccttatgaaacttccattttgcattttgttaagcagattttttgtaacctacactggtaattttagtattccctattgattttggttttgtagagagagagcagaccggccattccgttgccttgattgtcaatataggagagaacttgttagagtatatctcacaaatgtagagcaaatttgccgccgttttgtggaggagaaaagaaccaagctaggaaagttaattgaagataaagcaaggtggtcaaggtatgtttctttgctctttttacctactaatgtactaaatacgtttctgcatctaaaacactgatggttggtttttatcaccttaaatttcaacatttaggatttttattttgttgatggaaatacatacagtatgttattttatatttggttcacactggtaggtttttatttaatttacagtctatttgcaatgatgttgcagcttttctgttttctggtctggcattgaccaaattgctaggcgtcgcatgtctagggagaagacagattcaatactgaaagttgttgttaagcaattttttattgagaaagaagtcacgtcaacattggtaatggactcattatatagtggactgaaggctcttgaaggccagactaagagtaaaaagggtagggtgaaattgtttgaagctgaagaaatgccagcacctattgtccgtattgagaaagatacatttgttttggtggatgatgttttatcgttacttgagagagctgccatggaaccattgcctcctaaagatgaaaagggtcctcaaaatcggaccaaggttggttttgttagtacttgacaatgtaatagttatttttattttgtcaaacctttttgttttggtattttgtcagatctttttgttttggtagttgggattgcttaattctgttatgtatgttgtgcatcgtgcagcttatatttatcatgagtttaatgatgctacaaacttgttttatctgttagccacattaacctatttttaaacattactagctctacaaatcagcagttgcagggtgatcactgatttttgatcaacaattttgtgtaatttgtttcacaaggataatcttggtttggggtgtaaggttcacatttaaaggaacctaacatcatttacaagcaacacatggtatcctgtgtttatttgatcactaatgtttaccaatcattttgttatatcaggatgggaactcaggggaggacttcaacaaagattctattgagcgagatgaaaggcgtcttacagaactcggtcgtaggactgtggagatatttgttcttgctcatatctttaggtatcatctttgacaaatgagtttttgctaaagagattaaaatctaccagtttgtggtacttcattatttataagtgatatttaatgaacagtagttgtataatgctactggttttcggttagagaagccaactgtttttttattcatgcagcaacaaaattgaagttgcctaccaggaagctgttgcactcaagaggcaggaggagcttatccgtgaagaagaagctgcatggcaggctgaaagtgagcagaaagcaaagcgcagtgaaaaggagaaaaaaatctaagaaaaaaacaggttttacttctccctcacacatctttttcttcttcttcttcgtcttcttttttatttattattatttttctgtgatgtttacagatcaaggtagatcgggataaaagttatgaaaacatatagttttaagttttaaccttcgattgaaatttgtgcaagtagttcagtaatttttgaattgttgaagtcagcctgcctgtaggtgcagatttgagttatttgttttttgtctcttgcaaatcagttatggcaccttgtttagcgcttatttgtttagagggcagagttagcctctcatgaattccttaggttacacatgcactgaatgctttcttgctaaccaatatatttccttgccctttgatattttactgattcctcttgctgctttttgtacagggtaaacagaaacgcaacaatcggaaagggaaggataaagtgcgggaggaaaggcctggtgttgccatacaggttcaataccaacaagataatcctagtgatgaatgcaaaaactcaccgagtgaggaggcacaacctgcacttgaaaagttggatacactggaagatgtatctgacatatctgattcagtagatggtggtactgaagtccagccggattcagaagatagagatgctagtccgatcaattgggatacagacacatcagaggttcagccctccattgaagccagtagcagttgcatgctaactgtacaaaatggaatatctgataagaagagccaatctttaatggatgacagttcctcaacctgttctacagattccgtcccatctgttgtaatgaatagcccttacatgggaaactcgtttactagttttaaaaaccaaaaatcatctagcaggtagaagtttttccttgcatttatttttggctctcgggatgactgtttggtacattagtgatatggcatttcaaacttgcagaggtaaaaaccgagggaaaatagcatctgatgggaatagttggacaaatgaggtggatggtcaagtatctggtcccacaacagatgcaagggacacaaatgaggtttctggtagtgggaagaatggtgactcagagactgaggtggttcttaccttgcaagatcgtgctaaatgccttgagcggcatgcagtgaggaaggtttgagcattagtttgtgttgattttgttcccttacagtctttcttcttgtgtatttttttcaatattttggtgcagtgatttagtattttatctttgaaaatctcacctgcttcttttgttgcccgacttttttctttgttatcatcaaccttgcaaatcttaactggtatgattggatgctgaattctttgatctctttatgcgtttgatttgaaatgtatttaaagtcgctactttgtgtttcaccatacatagcaatgatgccacgcaggtccattacctctcttggtagattacctgtgttattctatgttctagccttattttaaaccgttgttttgctgcctcagcaaaccttttcattattttatgctcacaaacataacaagctcaagatttattctctttctttatgtaatatcatactataattttaaaccatacataattaatgatgtcatgtgaatctactatatggacagaagatagtccttgttatactttgtgcatgcccatttttgttataatctgaatcttgtttgatcaatattttgttccgtattgatgtgacggttattacttctgtaataggaagaagaatttgtttcactgcaaaagaagagtgtcaaagaccaggttgaaatagaaggatccttcaaagagaagagaacagctccaacaaccacccctggaagcccgcctaaaagtccaccctcaactgttaaatttaggcctgagtgtcagactagtgcaagtgtggattctgttcaagttaggaaagtaccattaaatggtcctcaaccaatgatggatagaggatcatcacctttgactgcatctcaagtgactcttacggctaaacccgagactcagaaggctgcagctcaaaaagtgactgaaaaagccgtggcgcaacagctgcctgtgatgtcaaggccctccagtgctcctttaattcctggtcaaaggccaactgcccctgctgtttccatggtacaaacatcatcacctctactagcccgttcaatgagtgcagctggccggttgggtcctgaacattctccagcaacacacagttatattcctcagtcatatagaaatgccattatgggtaaccatgttccttcgagctcagctggttttagtaatgctagctctccaagttcaggagggaaccagtcttctgcatactcacagcctcctactttggtatcttctccaatgtatttaccacagagctctgaaaggatggaccagagcaccatcaaatcatgctatccttttgccatggtgggaagggaaggattacataacggaccacagtggttggagagttctcaaagggaagccgaaaaaagcatgaattatgatcactctatgcttcttaatgacgttcaaaaccttggtttgtacaataattctctaactagcagctctcgtgatcatctgtctgacttttctggtcgcacgtctggacgacagccgcaaggtttgtcagcagcagatgaatttccacaccttgatattatcaatgacttgcttgatgatactggaccgtcaactagggcaagctctgttttcgagtcccaaagcaacgggccaaactcgttaaataggcagttctcatatcctggtgatttgagtgcagcaggcatgggttcctcttctagttcttgtaggtttgagagaacgcgaagctatcatgatgatgtatatcatcggaactacaactcatcgggagggcactacgaggctgccagggaattcattccacaggctggtcctttaccgtacgtaaatgggcagattgacgggttgattccaaaccagtggcagatgcctccggcatctgatatgtcattagttgtaatgaggaatgcagaatctgaaggctacccttactataatccagactattcaaatttggcttgcggcgtgaatggttatccaatgttccggccttcaaatgggcattaaaggtaaagcaaatgatggagtttggccaccactgtgaattagtaggcggatggaagggccattgtccattgtaataatgtactagaaaagaaggaaacgaaaaactgttggtccctttagatttggagtgaggttgtaagctttttctttttttaagaaaacattttgtaaagtgtttcttcttttgttacccagccattttctcgagtcgctagaaaatgaggcattttatttgtttgttcttaatgggggttttgggcttataataaaaatggttgaaaacgggcatcttacgaaacctatagccacttgttctcttcttcctcttttaattgctctgctatagctaaactggtctcaatcatcctccaacactagattaacacaaatgaagtgtgctaagaccattttatttccttattttcttgaacggcacgataattacattcagaatgtagctcaaaatggtaaaatgatttttttttatcttctcaatattaagacgatactttgcaatttaggggtgttcatctaatttaatgcaaaagtatggattagatcggttattttttaacattaaattatttaatacatattttttttcttcacataaacataattaacaataacataaaataaattattgttgttttaagtcttcaacaataaattacaataaatcaaataacaaataataaattcaaatgaagaatattaaaaattataggaaaatttgcggcaaaagtcttcaaaaagttcagtttgatatagataagtttccaatctcgaaaaatagtagtaatagtcctcaaagtcatgctttttatttgtgcgttagtcctaattttaactgagccgtttactttttaaaaattgtcacgtgtcgaaatattattgatctaaattattattttaatttttaaaaataaataaaaaaataaattatttaaaaatatatattttttcattttctttcttttcttcttcgtcttcttcttcttctcactgaaagcaccaccaccacccccaactgcagccgacgagacattagaatcccaaaaccccgatcgacgagaccttagattcctgaaaccccaagcgacgagaccctagaacctctccctctgcatatctcagtaaccaaaatacccaaaatcccaaatcttcgaaaccacatctcaaccgtcagagatactccactgttgaccgcaacctagatgcccaagatgaaccaccgccgatagcaacccaaatgactagaatcccaatcgttctcttctcctctcgagtcttggtgttgctaatccctttcttctcttctctgtgtcttttcttcgccggactcattctgcaaagtcctcattgtcttcttcaatcctcgatcttcccttcccttcacaggtattatatacaaatatatatattctataaatatgtaaattcaattttaatttatggagttagtaattatactaaaatttattaatgcattagaaattatttagggtggtggtggtgctagtttggggttgagggttggtggtgctgccagtgagaagaagaagaataaaagaaagaaaaaaagaaaaaagaattattttcaaaaatatgggaaaatattaaggttatgataaatatgacataaaaagtaaattaatgcaactaaatatggcat

SEQ ID NO: 300244 - DNA, 2060 bp, Cannabis indica
tattcaactcttatttataatcacaaaaaaattaaaaggtttttcaggacataaactctaacaatctctcacttgccctaaaagtaaattgggcatctcctttaatcccatattagttatataacccataaaagattttgctagtagcgtctttgtgaatagattttccaggttatgttttgatgcaatctttaagactgtcacatcacatctttctactatatctcttagaagatagtattttctctcaatgtgcttgcctctcttgtggcttcttggtagatcctgagggaaagagcctgtatgacacaagagttatgttgaaataaaactagattagatgtattgtcaataaatgcagtaatggaaaataggttgatattaaatgttagtacaaaaagcacgttagttagagtgatgtgtctgttgatttggacaataccaatgccttgaactgggattgtagtgccattaggtaaaagaacatgatgtggaaatgcaacagtaggtgtaaggaaagaaaaacaatgtttgttggagcacatatggtgtgtagctccactgtcaagtatctaagaaaaagatggaaaagaaaatgagttaccagccatgttggatgttgcagggacattgttgggatcatcttgtggtggtgcttgactcaattgttggctaaggagtgaaataagttgttgacattgggtagaaagatccaactgggaagtagcaacatcattttctgaatcagtgctggtggcaagattggtagcaactgttcctttgtcaattattttcttatctccaaagcctggtgggaaaccgtggagaactagcacttgtcaacgtagtggcctagttcatgatggttgaggtttctttgagcgtggaggatttgtggatgtggagggtcgaactaaagatgctaaagaaggcaaatcagatgaaccaaggattcgttgcctttcttcttggactatcatagcaaacagcctagacagattggggatatgttcaatcaaaagaatctgagcctgtacagaagcatacgactcattgagaccagttaaaaactgtaaaatttggttttgattgtagtaatcaagaaaaagcttcatagcaagacaagtgcaagtggtattgggttggaactcctttagttcatcccaaattgatttaaattttgtaaaataagaggtgacagattgatcaccttgctgcaactgagtaagttgagtttacagttgaagattcgaggtccattgccctcattgagtctttcttgaagatcatgccacatgtctctagcaagatcaaaatacatgatgctttgtgctatttcagaggatacagaattgatgagccaagacatgaccatattgttacaataaatccaagaattgaaaagaggattaccatttgcaggtcgaggtagagaaccatcaatgaagacagatttattttttgcagtcaacgccattgttatccttcttttccaagattgatagttagcactattaagaactattaaaaccagaaccaaaccaaggtgatctgcggtgttgaggaagaaaggactagaaacatcttcatctgctagacgatcgacagtcaagaacgacgtctaggaatcacagtttgacgaagatcactagcaggagggtctggagaagattggattggttcgacaatgtcctcgacgttttgagaacgtgatcttgaaggtggaatttttcgtggagcaacagaatcattgacgacgggagcaaaagtagcatcaagatgtgatttggcttgagtgtgctcatttgtggatggaggaacaccatcttgtgagcatgtggagggcctcaccattgatgcagtgagcgtgttttctactgataccatatgaggaagaacagagtaaagcagtaaaagcaattgagcttttattttattactatgtgttttgaatgttacaagtgaatgtatatacataggcacgaagaagctaagttagttagaggtaggggtgttcatcaaacgcccaaaccgctcaaactgcccgcaccgcaaaaaaa

SEQ ID NO: 300245 - DNA, 5844 bp, Cannabis indica
tctcttgccaaacaagtgaatttattatctccttctacttctcttcctcctctcctttccatctctcctttctattcacccacttctatctccacattatataagactatctctcctttctattcacccacttctatctccacattatataagactcgatacttaacaatataataccgatgaaaatactagacactattaataccttttaacatttctctaatacataatagcaatgcttattataatttactaagacttctagttgtgcatatcgcgtgaatattattcccttcacatcttataacacggtgttaaggagtaagtagttagtacttcttagattagattggttatgtacagctgtatattgttgtgattctgttatgaacagctgtactctgctagtatatatgtagtagacagtaactcaattataataataataataatatcatagatttaatcaaaaacataaaataataacatatcatagattcattctcattcatttggttgtataattctccaatacacataacggccttatcagtggccacaagattgtttctactcaaattagtaaccagataagagatagagaatgataaagcttcatgctttattttgaaacataaagacaatgacacatgcaataagacccacatatgaagcaaaaaggcaattgatagatgctatgctacaaaggaacattatcacacacaatagggtggttttaaagcttaataataaaaacaaaaatcaaaaacaaagaataaacaataaatcgatttaagcatgggcaaatcagccatttttgcatgtgtattttattagaatcatttactctcataatgttgttgctccatctctacacatgcctttattcaatcattttctgggactggtgtagatgctgcttctgcttctgctttgtcatggtgaaactttaccacaatgcatgtaatattgtctgcactgccacgagtgaaagcaacttcggttaactttcgagctgctgcctctggttcttcttctgtacgagcaagcgaaacagcatcctgacacaatgcaatgtataatttatgtggtgctactaggctgaattggagtgatttgaaagttacagatggatcaaatgttgtggattttcattttctcaccattgttcaagtctaaatattgttttaacaccaatttacccgtaatcagaatatgctatgtagacataataggaagagaaggagcatgcttacctcatttgctaccacatcccacaatccatcacttgcgagcacaagcatttcaatttcttcatcaatctctaaatcctataaagagtagcaacacaattattagcttttttcaaatggcacgagtagaaattttacatttgaaatgctctatagcctatgataacattcaatgcataaagatacatctcacatattgctacagatacaatactgttaacgacacgtgtgcatcatttggacccatttacatgaagattcccacgagaaaacaggaaaaggagtgtagtgtacttcatgatttttttaaaaagattgacaagttggttcatacttctacaagtattaacttagaaacactctacgaattttgagtggtttccaagaggaaattaatagggaaaaaaaataatcacattaatagaataatttgtctttgtttaaaggacaccttgatctctggttctgccacaacatattgcttcagcatacggttgccaaaagcccgggacatagctaacacacctcctactctccaagtacctgacaagacaaccaggagaagaaatcccactcagattcatgaatatttatttccacattctcataaaatgagttcacagatttctgtacacattggctagcctaaaaccaagcattgtgcacacttagtgaatgacaaggcataagtaataatttataggttgtagggactgaccaaggcacttcaaaattgagctgcaacatgcatgtattcttattcaaagacacaaactaataacaagcaatacaactaataagagactctacagaaacaaatttgaaagttctaaatcaacattataagagtttcgatagaagaacggccaatcttgcaatatgtaatggaaatccgcttgtaaatttacagggacaataaattggttcaactaacgtgaattattggcttaaacaatttaaaagagccaactgcgaagttaagataactcagtgatccaaattagagagtagcagcatcttacagaacagaaataccaacatagggaaaagaaaaagtatttcatttagttatgggaagcacagtacacacctgcccacattaccacaccccctgcattttcaattctcctcctctcatcacttcgatttggtttatgatcatcagatagaggaatagctgctcaaaagaaaatgcaacttatttttaggcacattaacagttccaaatttctcagtttcaactttacatgagtaggcaatagaacatagtcaatatgcttatcattgtctaatgtcaattgatatttaacacattgtgaaatataatattgcatacctagtccatccttcgagataatggtacgtgaatctccaacattggcaacatatagatggttaccaactaagactgcagttgaagcagtagagccatcatcccgataagtatccctttcggaatccaaaaaatcactatcagtctgcttatatgattcacctgcaaatttaatcaaattacaaattagaacagaaaaagcccacaatacagggtggtaaacaagtctcttgtagaatcccacaccttagaagcagtttatataaacttaaaaaccaatctatggagttaagccagtaccaaacaggtatttgattaacatttaaaagatatacagtcctgcatctaagcaaagaaacagcaaattaaatgactgtatagagcaaaaaacaaggtatcaaataattgaacatacttatagccgctttggtatctgtcataaattgcgggtgcttcatgagattctcaaaaagatgtccttttaaatattcagcagcacgagctccaccatgtcctgcaaaacaatgaaataacaattagactactccatactaggtacatcggctttaaaataaaaatggtaataattagccaatagcaaattgtcagtgccactttatcttataaatatattcacaaagttgaattagaaccccggaagtgtagagaagccaatatcaacctccgtatatgcattcagtaatgtttagcttgttcttgtctttctactccatatctctaataataatatagctctcaaatagcaattgtctgaccttcccagatgaggtaaaagataagcatcaacatgaaaggccacctattttcaaacccctaaggtcattcaacatgtctcaacatgcagctagtagatcataatttccacaatggcaacaaagactgattgttttcaaataccatgacttgataatttgatacatatccaaataaaacactgcctcctaatcctatacagcagtattagtctcatttggatacccattttaggaacttcttgcatgtcttcataaatatttttttaatgattctagcgtgtcatttaactctatcaaaaataagaataaatttgtttggtcaatccaatatacactcttgagaaaaataatctaaccatcaaatattccaaacaggcagactgttcggccgtcaatctttgttgtcttaacatcataaaaatcctccatagtcattctctttcctctgaaacttgagtatccccagctcaattttccatcttcactgtcaacaaagcaaaaacagaaaataaatttagtccaaaacaaaataactttactacattagaacaatcaaataaaaaatttgggtatgcagaaaataacatgattctagagtaaaattggaaaaggatgtgacgtaataaactcaagtattatccctgtccactacattctgcaattgcaacccagcatgaccaaataatatctatgtggaaaaaaactcacccaaataatatccttagccactaaattatgcatttgccacctgacccgacccaagattaaaatctatgcttagaagagaaagaaggttactcttctttgtgtttggtgctgaaggaaggagaaaagaccaaaattgtctcttgtttggtatgagagaggagtgaacgaaaggaagatatgtaagttgtagaatgaccctctaccatttgagtggctaactctctcatgaaacttttcaataccggcaggactgaaactggataaagatgatggtttgaagtccattataagtgcgttcccacccaaaagtcattcatatcaaacaatccctacccaataatctctttccttatacttacccctcctaccggaaacactctgaccaatagtgaactgaaaaaatgctcccaaaatataagataatattttagaaaaagaattttaggtgttgtttaaaccttttccatcctccagtggcaaatccaccttcatctttctctggcaacatatcaataatggtcccctgtttcgttgatgaccctgtatcaaccatcatccttaagcttgttttaaaatgcctattccaccaagtcgttaagctgaagccttcattcaatctctttccagtactgcttacttgcaacaaccccttttgcggaaatgcccctagatgcccagcttgaacaatcacattcctcaaacagcctttgcataacatttaagtagaccgccttggccttcaaagccagatctttcgtaaaaagaaaacttcccctgttcaacaaaacaagtaaggaccttgatcgatatgacgccataaagatgacataaacaaaaattcaaattccaatatatataaatacatttcagtcgccatcgagatatcattacacagcaattttgactaatcgcacaataaatgaagattaggtactcaaaacgaagaagaaagatcaaaaatcgaagttgactttaagagaactactttttgacaatgatctcgactttcccagttcagcttgtaagaaattattaaaacgctcaatatcaacaaaaacaaaaacagttattatatcataaagctatgcaataaagacattattacagatttttgtattcagagtgttcaaattcgagctccgaaatagttgtggaataagttcaaatatacccgatccgatctgatgattcgtgaaagtgaagattggaatctgagataaaggtagtttcaatcaacaccaccgcgtatacatctaatctaaatatatatatatatgtacggtatacgtttaatatgaaaaggtatacaataatagttagtttctctgtcaaaagaaactaatggaagaatctgaaaaccctagaaaggaagagagagagagaagatgggcaccttttgtaggtagctatggcattggcagtggcaccgaaccgaaggccgctggcaacgtgtcatttctgatctggtatcctcttcttttgggttcacgatagctttatgactatccaattatagtgtgacacgtgttcaattcactttgtttcttatcttggcaatgatccggtgctgacaccattattttaagtacttttttttctgtttttggtagctcttcgggtttaataagccagtgaatagtgatccctattcctatagaatacggatactagcttgccacgtagtcaattatttgtccatttttattaaaaataaaaataaatgaagggaatagagatggttttatttttattcaaatcaatttttttttttttt

SEQ ID NO: 300246 - DNA, 2983 bp, Cannabis indica
gagagagagagagagaagtcacttaatctagcttgatacgtactgcatgaactccgaatctgactccaaagccgccatggtttcaggcgataaaaccacctcaagatcaacggtccccgatccttctcttcctggaaacgccgagatcttaccgtcgaatttgttagcccggccactccgaaccgcgagaggtcgtccccacccaaaatcgttgtcgtacattgggaatctcggggagctacccataatgatcgatgcgccgtcggggtttccaagcgggaaacacctggggttgctttcccattcctctacgaagcggcgcaccattccgctatcgtgggccttcaagtttgtgttcatctgctccgcgcaccagcgtagatccctagacaatacgtccccggctgacgcgtaagtgggaacgctctgtattgcgtttccaaagtagaatggatccaacttgggctgaagcctgtggcgacaattgaccgccattctaaacgttgtcgttttcgagataggcaacttcctagcacgtgtaaccgcgcgccagaggagtgcgcagagtgattgaaacgacgaaatctcaatcgtcgttttggtagaatcggtcggtgtcaaaactgacgtttttagccaattctcaatgatggatgtgactttagtcccattattgttatcgttttgtccaaacgtgtcgttgctcagcttccccaaaatctcaaccgcgctgagctggcaatcaacgtttttagtgctgtttttgttcgtaacgtctttcagtttcaaaatcgcttctctactgaaactgaagattcgctccctcaaaggcgcgtcggcattgaaggtgaccttgggcccaccttccggcaatttcagaaccgccggtgaaataagaattgagtcccgggtgaaaaccggctgaggccgagttatcctcttcgcgcctctacagacatcggcgaagatgttgaagaagttccagaacgaggttccgtccataacggagtgattaacagagcaaccgatgaagatcccgtcggctagctcagttacctgtacggccaagatgggcttgaaatgacccatgtagctgacagtcctatcgaaggtgaagaactccttgaagcaatctggcacctgggtggctcccagaacatcccggacgaataattgcccagcattagcatggatgaagtcgacaccagcgtcgttgcacgtgatgaaaacgtgaccatcggaatctgtcgtcatcctcccggcgagagggggaaatcgagagagtgtttgagatagaccttgcttaagaagctcgattacggagtccgtcgggaatggaggacgagtgaaaaggcaacccttctggatgtaatgacaggagagcataggaaggtcggagacagagagtttgaggtcttccattgttgacttttcatcggggaagacggtgcagttggagatcatcttaacttgatcggcacaaaaagaagaaggcattttcttttctttcttttatagtggagaaggtgtttgatttggagttcgctatcgatgtgggataattatatatgtataagtgtttcactctctctcgctctcgctcttggaagtgagggggagtgagtagtgagtaaaatgagaggatagtgaggacatatatataggagttggggctgagatgttctctctctctttagtttgtgtccaagttggggttggggttgggttcatgcatttccttgcttaggtggttcctgctaatgttagcctctttattttagtcattttaacgtcatgggattattttatttctttctatttaattaaataatttatttattctttgtttgtttggggattttttttatggatgtctatgtgatgacattatttaaagagactcttatttaaaatatatataatgattggcccagtgttctgtttttaattaacacatagccaaacatgtcttatcagtaattttatctttgaggaacaaagttgcaaaaatgtttattgtatatataactattttactttttatatttctttttaaatatctgtgtataccttttataattttaacaatattcaattatattcatcccatcaagctcattattgcaagtcaaattttaatttaacaaaataatattatcttcaatttatttatttagtttttattatatcttctaccttctacatttcataaaatttataaataatttcactttttaaattcaatcgaagtttattataaaatgcttagaaattaattataattttttagtcataaatacttctcaaaaacaaaaataatataattgtttcaatgacttttataaatatttgaatataaaacaattaaaaataaattaaagggagtgatgttctcttagtaaaattaattaactaattgaaagaaaactaaactcaattgtctgtaatatttggtaacaacattgttattaatattttaaactgtctaataccatatgaacgtagtattttataattagtggtttttatattatctatcaaatctaaatatatgagatccgatattaatatgtataatagtatgacactctacttgacatcttgaagtcacctagaatttctcatttggtaaataaatataagaatttctcattggcaaatataaaagtctcatttaagtggatatatatagcaaaatatagagataaaaaattgaatatattcttacgtgtagatggtataggagagagtaggtgggagagaagggaaaaacaaattttatattttattgttaggctatcgaaatcatttcgtatatatgaaaggaaaaagtggttgatttccaaaaaaaaaaataaaaataaaaaaaaaaaaagaaagaagaaagaaagaaaggaaaaagtggaatagataatagaagcctaattagggtatttagagattggggatgttatgaaaaatgttagatgacataaatatattc

SEQ ID NO: 300247 - DNA, 1921 bp, Cannabis indica
aatattaaaatttaggtgtgtaattggatatccaattaaaaaaaaatcgatctaatccaattagtaatttgattggattggattggattttaaggtctaattggattggatcgaatgatgattttccaaatccaattactgattagatttgatcggatgaggagaaaaaaggttggattggatcggatgcccacccctaattaaaattacataaaaggtataaatattgtccataccttatggaggtatttttgtaaataaagtgccaatttatattttctatgtaataattccattagtttattacaaaatattagtacatattcaaaataatacaaaagcctgatcatttcaactgagcacaaaaaacgacggtgttgatatgtacatttgtcgggagacctctgactcatggttgatccatctttccttttcctttacctgcaccacagaaaaatcgtgagtcacaaagactcggcaaggaaagcagcaaataaaatataatttcatgattaaataaactagtaattaataacaattacacactcaaagcatatattcacacaaaacctttcaacttatcataaaaccaattattcaattatttgtctaataaggcaagctattcctgatgctttataaagtatccatcaactctcgtttctaatgagtcaactaatatagctattgttgcctaatgaggcaaccaataagtaagaaacctaacaacagttttagaatagagttataactcttttatattaacggtcattaccgtatctcaattagccatgcaatgtgatacaattgacttttcttaccttaagtccaagttcaggtgttcggactgacttgagtggaaaaatgcttgacgatctcgggccctatgtcccaacaacggtaaattgataaataatttaatcaatcacgctctaatacttaaactcaaaactgaaaatcccctatcgataaacggtccaccgtattcccaaaagggtccaccgttttcccaaaacggaccatgatttttatgggttcagccctcgaaaaacggtccactatttttacagtaatttgcaaaaatggtaagcaattttttcctacaaaaacagcacaacttgggttttacacttcaaacccaaccaaaaatcctccaaacctaatcaaactttctgaaataggttgataacaaccatataagcattctaaaccttcaaagcaattaattatcccaaaatcacaatttcactattattgagtaaatttttgagttctttaactcaactcacccaacttaaagtataatcgcccttaaattttgaaattaaaacttaaacaacattaatttatacctaagaataagctctcgcaatataaacataaacagcaccaaattcatcaaaaattcttcacaaaacctaactttaaaacccttaaatattcaagaacactaaaggaagcttaccttaagcttgatcaacccctaaagttgatcaatagcaaggaaatgactgaatttagatggaaaagctctggttttctctaaggttttcttgagccgaaaaggaagagagagaatgagttttttgtgtgatatccctattttgattttatctcttaattaggtttatgaaaaataaattaatcttaaattatatattcatattcccttcgacctaggatctactagagtcccatataaaacaaaagaataaaacctagtgaagttaccattttaccctaaactcattacataagaaattttcaaacttaagggtattttggtcatagctaactaccctaaaatatctcgtcaactcaaatgtctactagaacattctgatacaacaaaaattcattctattactatcgtgacatccttggccaaataatcgagcttccacggccgcctaacttaaaa

SEQ ID NO: 300248 - DNA, 1676 bp, Cannabis indica
aacaaaaatccctttctctgatctggccactttaagtcctaagaaatacttcaactttcctaagcttttcagttgaaattgagcacgtaacttgatctttagagcctcgagctcatgtagattattgctagctaggttgacatcatccacataaaccagtagaaaaataaaactttcattgaagtgtttgatgaatagagaatggtctgtggttgaatgatggaaaccttccttagttagagcacttgagaattcagcaaaccattgccttgaagcttgtttcaatccatacaatgatttttgtaatttacaaactacatttggtggcaactcccccttaggtctatacccttgaggtagagacatatacacatcttcaaggagatcaccatgtagaaaagcattgttgagatctagctggtgcagatgctaacctttgattgctggaagagataaaaccaacttagcagtaaccaatttagttactggtgcaaaggtatttgtgtaattgatcccctcctataggttgtaacccttggcaaccaacctagcttcaaacctttacactcccatcaacattaaacttgatcttatagacccattttgaactaatgacatgctaatcttcaagcaatgaaatccaagtctggtcttaagagcctctatttctgtgtccattgtattgtcccatcctagaatgccttgagcttgactagaaaatttggtttaaaatgacttgaaatagctaggaccgtaactctgagtgcaggggacaacctgtggtacccaagaacccgagataatgtgagtagtaaccagagaagcctgagaagaaacaatatggttattagtggctaaatagcagtgataatcattcaggtaggatggtttagaaacttgtctcattgatctgttatgagaagaagaagaattagcacatcagaattagacatatcagaagaactagattcatcataattagttttaagatgttgaggagctattgtaagagaatttggaagagttgttgtacgaggtaatttagagaaaaaaaaaatcataagtaggagaaagaccccgtatgaaaaaaaggaaaatatgtttataaaagtagacatctctagaattaaaaattatattggtgtttaaatcaagcagcttgtatgctttcatactagtagggtatctaagaaaaatgcaagggaaagacctaggagaaaacttagatctgattgactcaaagtggaagcatatgcaagacatccaaaagcttttaaatgttcataagcaggtggtttagagcagaggatatcaaaaggtgacttgttctttatgattggtgtaggtgttctactaatctgataggtttttgtagcaatacaatctccccaataaacgattggaacataggattggaatagcaaagcttgagcaacattgagtaaatgttggtgttttctcgcaacaataaagttttgttgaggtctatggacacgagtgataatgtatggtcccaagctcacttaacaagtctttgaacaactccttagcattatcaaaccttactcctttaatggttttattgaactaattttatgtgaattggggtataacaaattgtgcatcaaacttttgtttgataagattgactcaggtatacctagaacaatcatcaa

SEQ ID NO: 300249 - DNA, 1637 bp, Cannabis indica
tgggtatagtacgcaatttcctcattttgtttcgtaaaatatttttatttttacgtttaaagaaattttttttttatatttttatgattttttaaaaaataacacaaaaataacataaaattaacaaaaaaattacataaaaataacataaaaataatatcaaaataaaaacaaaaaataacatacagataataaaaaatcaacaacaaattaataaaattgtaacataaaatattttcggtaaataaaataaaaaaaatcgtaaaaatatttaaaattccgtaaaactgtatttttataaattttttttattgattttatgtttttgtgaaataatctctaatctaaaacattaatgttaaagagcatgactccctttcaaattgcaaatctttgaaatttattgatgatgttgagtgggcaatttccaattcgttccattagctagatgatgttcatgagatggacaattatgtccccctttcaatttgttaaacgttgttttccttaactagttgattataacaacacaagttacaacttacaattatgtaagtagccaggactaacctagatagatctattaattcttaaaccaaaagatatttttcatagctatttattataagagtacatattgttattaagcatagtggtgcctaacattttcttgacatgtcgtgattggctagcgatactccttaaaagctattatattaaattatatagtattgtatatttaattggacaaataacttcacaggtaagaggatactggacatttctcttgttataaataccttttcttggacggtggccttggttttatccatgccagacttggccgaggctgccacgttggcagcagattccttggcggactccactgcgttctttcccgattgcattattttcttctctttatttgataactgaactattttcgttgttataattttttttttcaaatgcttgtaatttgtattagaagatcaataacgatgaggtagatttaaataggctgagttgcattgacacgtggaagtgagcgactacgtggaggcaggagagagctcgttggccttcctatgtgacacgactgcgccacgtgtcgtgaagagggactgtgtgaattgtcttttttttttggataaaagttatataaagtatggaaggtggcgcagggagaaaagaacggggacacgaggcagattgtttgtgacacgtggctcattttgatggacggttgcagtttgttactgtttaccttaactatatgtagcagctgaccttatctctttccattgattttaatggacggttgtggtgaatcacgcaccttcggcttcacgtttgaggataaaagtagccttcttctattgacatgattaattgattatttgttgatttagtaatgttttgacccacatttttttaggggattcttttacttcaaagatgtttgttaaattttgctttcaaaaaaaaaagtgttgtttaattttatattgggtacagaagaaaagtggaaagaaggaaacaaaaaaatgtgtggtaagtgagaaaataataagacaaaggagtaggtaagaaagagtaaatttttatattaattttttttgagaaataattttttt

SEQ ID NO: 300250 - DNA, 3444 bp, Cannabis indica
acagtctagcccatccttacgagcaacctttgtagccacatctagatctcgacaaatcactgttctaagcaaaaacctacaaaagagaaaatgtacatttacaaagaaaagatatgtcagaactgaaacatatattctaactattctacagtaataaaatctatgtcccactttccctaaaagaaaatatcctatttcattagaatccaaccaagaaaaaatgaactccctctattttattttattttcatttctccttaaaatttgagttctgaggagagccttgaactaaacagatttattcttcccagccaaattgccaatacccaaaccgccttctctctaggtcgagaaataaaatcctaaacccaccaaactgacagatttctcctcgtcactaactccccaccatcaaaaataataagagaaataatccatagaatccacaccttcagctcatcccttagaaattgtttgcccacagagcctagaaaatcaaccactacaaccaagaagagggggggggagatctctttccaaaaactttaatagcataaatttcagtaactctaaaaccaattttaaaacaatataatatatcaattgtttcaaacatttaatcatggattgcactgatatttctatttgaaacaaattccagttagcagcaaacctgtttaaaagcatctccatatttcttatcaaactccaacttgtccacaagtggtataacatcagaactctttggatagttaacatgtggtggtttcaccctgttcagtggtataaatgtaactcgtccccctttcaatgcgttcaggtgcttaattatctgggttgatatatcatcagttttaaccaccacatggaataagctgttcatgagatgactaaacgtcactgaaaaagaaaatataatatctactttgtagaagcaggaagaaaagaatttatgacacgtttttttttttgaaaaagagaaagggaccacttgtcttagactgggccccactcgaatttattgaaacctcacttgtggcggaggaaaacaggggtaacaaaagctatggacaaaacaaacagagaaaaaaaaatcacaatgcaactacatcggtgttttcaactgtttagtatgcttcttgagcagatgtctacaaagtctacaataaaaaagcatcactgaagaaaaagccttagaataatcgttacaaacctgtttccagcagtaacttcaacagcagtgaaaaacctttcatcacaatgaaggagctctataattggaccatatacgtcaggaattttatactctctgcagatccttctaacagaatttagccctcttctgacttcctgaaaacattaaacaagagaaatgcaaatgactaaattgcattaaaatagaaaacagaaaaggctgcagtcccacaatgggatgccagattccacaatccagctgtcagctacatcaaacaaaaaatgtagataaaaggaaataagaaaacaaaaggaagacaaaaaatggagtaaatatttcaatataggaccctagtatgaatgtagttctataagtactatcaagtctacaaattggcggaagtcctcttagcctgggaatcttctctattattaatgagccatgtaaagtgttgttctttaaggatatatattactgacataaatcaataaacttcacaatttttttaaaaaataataattaaaaagaaaaacctttaaggtagagtgtggcaatcacttgtattgctccaataatttaaaagaagaagatttggctcagcattgaaatgggtaagtacttatagacgtaagctaaataagtaaacgacattaattagtgattctcttttgttatgttctggcagtagtatctcattttggatagtatttatcaactgagagggacttttcttctgcaacctatatggcacagttttcttgtataattgtcaattgtcatgttaaaaagtgacaaagattggtgttcgtcgtcatattaaacacaaaaacaaagatcagtcaaagccaatgttaatatagaaagaaaaaataaatgataagttgcatttcacttggccagggatatcaaatcacgttaacatatcaactcacacattgcaaaaatggcaaacacccttttttgctgaacttgaagattaccaattacaacgcctcactcttttcaattctttcactttttattattattattttttaaaagagacaaaggtcacatgtccatgagtgacctcttcccaaatttatttaggaggcctaacttatggcggaggaaaaccatggtaacaccctctaattctcaatttttaattttttaataagaaactaaaatatatatagatagataaaaccgtaaggtttacatcagatgacaatacatcatctactaattaaaatgataaggaatcatctacaatcacccccaaaaattccaatctctacgtaaataagaagaaaaaactatatgaaatttttaagaaaacttaatattatcccaaagatggaacccatgcaagtcagtgtcctgaaatatcctactgtttctttctagccaaagtgcccaaccatcccctgtatagtgatattctaaaaaaaattaaaccaaacagttctcaatttacaaacaagaaaaattttaatagcacaacaaactacaaggatacttaccccaggagttgcatgatcgagattcttttctgccttctcaacctctgttctcagtttatcaatttcagcagaaagttcagtttcttttccccacaaggacctatggaaataaaaattagtcccactggcatatccacagcaaatgcacaaataatgtaattgcaaaatcactcatacttccgctcatcttgcaacttgtctctcagtgatttttgatgattgaaaccttcacgagactgagaaataaaggactccagattagcaatttcagttctgcgaccctcaatgtagacatcctgctcattcaactcggagctaaggcgatgaatctcatcctgaagctttttctcctgaatcatacaaaagtaaagagatgttatataaaactaaattatagtgtgaaaatgttgcattaagagaaaatatgagccgcaaaaaatcacgagaacgacacatgacacggtcatattgcccaagcatactagtaattaaatatttacaataaattatacttattaaatgacttaaaatttattacaaaactaaaaagtaacaaaaaatctgatttttgaaaaatatacttataagtactatttttaatctaatcaagaataattgatgcaaatgtaatttctgaagttatattttttcacataatttttcttcacaattttttcatgattttaagagttaaaaaatctgattttttttttggtttaaattttagatttttttaatgattta

SEQ ID NO: 300251 - DNA, 3783 bp, Cannabis indica
tttcaatatttttttaaacatttttttttctttaatcaatattttagactctaaccagacccacacccaaacccaaatccctcctacgtccctggcgctgaacctgttctctaacctaaacctgaatctcaccccggacctaatttttcaaaaataaaattttactttcattttgtgattaaaaaattaaaaatccaaaagtgttactgtgttaccaaacgacactttgagtttagctcctggctgtaaaataaatagttaagtttaattttttgaggtaataatgtctaagttatatttttaaaatttcttaaatatcaagttattattcacgatgtcctttttttttattagtatatttaaactaaaattaaaaatttaaaaacttagaccaattgaagattatcacgtaacaatttattagttaacctaagaacataatacaaagataaaacaatattaaaccaatatcatggttgtccgtattttgtaaacaaaaaataaatctgtaaaaaagttgaaaaaagctgtaaatccgtatttttataattcttcttatcatattttggtatttatgaaaagtattgtgtaaaaatgcttctactaccgctttcccgggttttttttgggccttgaccttaattgggctatgggctttcaaccttagagcaggcccagtcggcccaattaactggtcatctcaatttcattgttcttcgattagcagagaatcaaaaatcccttttccttctctctcatcgtcgtcttcttctcttcaagttgagttttttcgttccttttcgatttctttttcgtatgaattttcattattttctgagataattgaattcttttactaataaatttgatttaggtagaaattaaatttggttggaacttaacgatgccctaatttcaatttcagggcatttgtatcttcataacaatggcgtcgagtttgatgaaaaccctaattgaatcatccaaattgggagtcagaaatctctgtcttgttcctaatcaagtcagtaaccacactgccaagtggatgcaggtaaataaaattttatctttaaaaatttccattttcgatttggaacagctttgaggaagttaatgtaatacatttcaacgtgaaatgagtttttttttttttttgttttgcatttttaagagtttaaaatcatttgtttggttatttggattaattttaagaccaatttgagctcataagaaagtaggcaatgggcatcatttgattcaaatacaaatagcgatgataattgaatagtacaattcattcatttcagtatcatttgattttgattttgagtttaagatataatggaataagacataaggaattaagcttcccattgtttgattaataggatactagtaagaaatctcccatggagttgatcaatgatgttccacccatcaaagttgaaggcaggattgttgcttgtgaaggaggttagtttttcttatgctctcatgttcttagttcttttttgtttatcttgcttatgtatggtatggtgaagaataactgtgaaaaatagctcaaatggccggtcatgtgatttgctcccacgagaaatgaggttatagattctcgtaataggcgaggaacctagtcctttaagaaaatgcacgatgaacctaataggagcagctcaaactattgaagtattgacgttcgagtccagaaaagtacctacaaagcaattgttgtcaggcatgtaatttactcccatgagaactgaggtctagatcctcgtaatccttgtaataggcggggaacctagtctttttaagaaaatgtaagttgaactcaataggggcagctcaaacaatcgaaggattgagtgttcaagtccaaaaaagtacataaatagcacttgttgtcgggcatgtgatttgctcccatgagtactgaggtctagatccttgtaattctcgtaaaagacgaggaacctagtctttttaagaaaatgtacgttgaatttgaacccaataggggcagctgaaaatatcaatggattgaggttctagtccagaaaagtacatacatatcaattgttgtgttgggcatgtgatttgctcccataggtcttgatcctcataataggcagaaaacatagtctttaaagaaaatgtacgttgaacccaataggggcagctcaaactatcgacagatttgaggttcgagtccagaaaagtacattacatagcaattgttacaatttcttggtctccaaatcttgttggttttgatggtttgttctttaacaaaacaaagaaaaagatatggtgaagaagctaacgccatttggggcataacatttttttggtgtgcagacaacaacccggcacttgggcacccaattgaatacatatgcctcgatcggaaagagccagccgtctgcaagtattgtggtcttcgctactttcaggatcatcaccactaagaatgtgaaagtgaggtgtcatatttccatagcttatgatggctgcaaaatattgatatccattcttgtatgtttggtgaaactttttaaggcaaaaaaaaccaagctgaaatgataaatacttcctttggtcttttttttttagcataataaggaattgttcaaacttgcttgtattattctttctatacattttgtatttgattatctaatcaaaaattgctttcttgtgaaatgttttgatgagttgtttggtggtgagattaacaccttataaacaataataaaaatagtgtttacataacaactttcaatttattgccaattttcttgtatgtgagaataatcaaaagtagacatcatatgtcataatgtttgctagcaaattgaatttatacactgaaatcttgtatttaatgtttctatcttgttgtccaaatagaggctaaaagtttcaaatttattttatttaaacatattaaaatagacatttattactttctttgttgtttttgaattggcttataatattaaaatcgtaatattagtaagtgatttggttgaattgaagttgcatatttccattaaaaaaaatcaatatattaggcttataagctactaagtgttgataaagggataagggtaaaatagtaaatatattttatgatgaataaacactctatagtttacactttcatatagaatcatagacttgctatgatttctaacttcataagaatgcaaaccttgctcaatatttctatcaatatagacaaataaattttgatgaaataagtaaattatatgatattcttcatatacacaattacatatacatcctaagggcaactctaatggaggcactttattttttaagttacctatatttattattttaattcatgtttttttaaaaatatatataaaaaaattccgtaaaaatgtttaaaaagtgtgatttgcatgtgtttgagctcataatagatcattgtaacaattgggcttggttcttatttgggccttagttcgaaaagcccataggcccaatgggtgtaggcagtggccgtggcagccccttagccctaaattgaatcgttcttcgttcttgccctttttctcatcatcgtcttcttcttcttcttcttcttcttctctcaataatctccgagattgtgtcgtttcctcttctctccgccgttccctaacgtctcttccagttgagttttcatttctatttcctatgaattttggttatttccttaatgattttcatgtattgttgtactaagttttagggtttttttttttt

SEQ ID NO: 300252 - DNA, 4319 bp, Cannabis indica
tctttttcattatcatcagcatcatatgatggtttgtagtttttctttgatttagtactactactaccaccactatccacttgatgttgatgatgatgagattcatgatactctggtggcttagtggaaatcataacccttttcttcaacgctgcaggcgacgggaattcctctatataatctgatgctgggcaatacagcatggctccgaacgtcgatgtcaccatctaaaaaacatgattgaataatattataagatatcatgctaaaaacacaaatgatcatgttataagatgaggatatattatgaaatgaagagtatagttattatatgaataacaatgtctcaatgtgtttcataaaaacatagtcaaaacttttttctttaactaaacaagtcgactatcattaatatatcatttttatacattaattataatacttaaggcatgaatatataaagaccgcagttcatatttcaattcacacatatataggaacaaattattgttatatgaccttattacttaattttgcatacgacttgtttatataaattattgttatgatcttaatatattgacgtacatataaattaaaatagtataattgaccacatcataaaaaaaataatatatatcactagctagctcagcaccatagtattagtatatgtatatatgcatatatatttatacaatcacctctgccactttggcttgaagatgtggagggaggtgatcctcgaacgttataataacaggaaactcagatactttaaaggcattgtccttaatagcacgcagacaatccctcaatgccactggactagtcagagtcctaattcatttttaaccaaaaacaaattaattaatatcctaattaattaagtaaattgtaattatatataattaatgatgttaatatgtatataccctccatgacgaacttcgacatcgttttttgcagagttaggccagagatccaattcgataactctaactcctcgatgcagtgcgttgatgatgggttgagtactactgtcgctgcttagttgatttccagttaagtaggagttgtggccagtaaataagtaataatgagataatggagctgtcatgtcatgatgcacctgaaattatttcaaacacaacaaattaaattgatatattcatatatcatacatgcaattcagtaatatatagtatggttaactttcaatgggtagaaatgatcattgtatttattgggtgattacccgtttagttttctatatttgattattttacatattcatctcatattttattttgttcgaaatacaatcaataattataaaggtatgacaaggatttatcaaaataaataaataaaagaagaagaagaagacaaaaacaatgcaagcaaagaatagtgctgcctacttggcccacaataaaattttgtaaattttaactcaaattagccgatcaaaaataaataaataaaactgagttatgcaagttgcccactattgtctctttggtataaaatactattttgtgaccccgcctatttctaaagtgacctatttcaatagctatattaagagttacatatatttttttgggttttggtgataccaagctttaaacagaaaatgttcatgactcctatagagttttattcttttaaacttttttttttctatgctgtcgccagaataaagaaaaaaaaagtccataattccaattttactttatttttccaaacatgttttagtgggtaaaaaatatagaaaagtcgtgataattttatataaaaaggatgagtgtacacacatttggtaccctgtactttatttaaatacaagttataagatatacaagttgtaagtatcttgtattttcaataatatttatttagtatactgcattctaattaaatcatacatatttgataatgtcgaaaattttatgaattttcaattcaaatttaattatttgattctatataactaagatctgtttggttaaattgataaaattgtattgattaaatttactttagagtactaaattatgtataatttgaaaatatgtaatggcaatgaagtattattgaaaacacaaggtattagatatgtttttcatgaaaaaaaaaaaaatcaaattactaaaggatgatatttgttcaagggacagaaaattggaccccaaaataggacagacaataactctagaaggtcaattcaatttattcaatacatatcaagaaggctgccaaaggagcaaagacagtatatatatttgaaattattttgataaaaattaaattcaattcaaggactatattttgattgttatttgcaaaattcagaactttataactttacaaaatatacagtccaaatggtttttttgagtcttgtataatgtaaatatgtaatttctatgcactacacgcgagatgtccattagtcctacatatattaccgagacatgaaaaaagaaaattgagacaaacaatttcattctactatttaagtgctctttagtaatttttgttctttcttatttttgatgtattattttatttatttctatcatcataaggacatcgattgatttgagtaataataaagaaagaaaatatcatcatgcttttcaaaggttcaacaaatacatgttatattttacttaattaccatagtatcatgcatggtgtgattttgtaataccaaattaacacccaaaaaaacactaaacgattacatatatcctaattatttgttatattattaagaaggcattaaagttttactataaaagcaagatatataccgtagacttatgagcatgattgagatcaccaaggagatatctgaaaaaaagcatgcaaatggaggccatttctgtgaaagattttgagatgtttaacactattgaaaatggcctcagcatcttctttggtaggattttcttctttttggacatgtttgagaaattgaagcaggtgatcgacggtcatattcccgttctccgagtactcgttaaaaattcttttgatgtcttctggtggatctagtgctcgaagcttaaatctccgtttgaaacagaagcacaccttgaatgactgtttggttttttggtaaggattagaagtagtgttcatgatgaagatgataattaataataataataattacacaaagcaatactattatagttggtacttttagtttcttagatttctgatctaaaactttttatatatatatatacataaataatatattgacattgttgttaattaataatataatcttggttgggttgttttctgattcttagacatggcgttggagcaaagtgagaatctatgctcatgcgaaacctataaggaacctttatgaaatatatataattaattacttaagtaaaattatggtagcacctagcaaaagttctttattggtagagaacttttttgaccattgattatagatcatgtagttattataatataaacctatactcttacgataagacggtttatatacaattaaaattttatacatattataataatatttaatgatatttaatttttaaaaaattatattaataattaaaaaatttattaatttttattttaaattattattatgtttttataaagttaatttgaattttttatatataagtatttattattaaaaaataattttacttaggaactttttattaattttttttatactaataattaattataacaaaattgattacttaaatattttcgccattgaataatttatttacacacatagttttattataattattttttaaatttatttaatttaataattttaaacatatcaatttaaagcatattttatacactgattactgtgaaattttatacttggtggcgcattgaatttctacaaatagttttatcaatttcacaataatcaaggtatactatgctttaaaatgataagtttaaaattattaaagtaaatggtagaattatatatatataaataaatttgtagtgaaagtatataagtaatcaattttgttagggttatttgcggcaaaacctcctaaagtggacagatttttgcaactaactccctaatataaaattttggaggtaaaactacctaaaccactagtccgttagcagttagccctttccatccatttttggctgttaactgccatggtggaatgtctacgtggacccagtgtacacgtggcacaatttaattggttcacataaataaatatttaaaaaaaataaaaaaaattacaaaactatttacaaaa

SEQ ID NO: 300253 - DNA, 4766 bp, Cannabis indica
gcaataaagtataaataatgatataatagaatctaattatgattaattaatgaatatataatcaattttttatagtaattaataataatatcttataataattaaatgaagcaataagaaaattatggtgatagaataggaattaaaaaattattttatttaaatttaaaaataattaaaaaataacaaacgatcataatttataatattttacttatttagtaaaaatatttataattatttattagaatataaatttatgaaatcaaaaatacaaaaaaataatcataaaataaattttatttttttagtaattataacgataatatttgttacaaaatttttacttttctaatatattttaaaatagcaaactatatttttagtttcaacactatatgggtttgtttataatatacacgttaaaatgttatattttaaattatatcacttaatataaatacataaaaattataaaagttaggcgcggcttaattccctagttattaataaattaaatataagagacaaaaaataataattattattattttaaaattaaaaaacgatatttaatggcaaaatagtatacaatgaaaaaaaacgacgataagtagtgaacaagacaacttgtaattgaaatacaaaattaaatccagaaaacgacaataacaaatataaacgacatttacataaaaacgacaataaattgtttaaacgacaattttattgaacaaggacatgcaaactgttaacaccacaattctttagagaaactacattaaaaagtgaaaacgacatcaaaatgaaaaaatgacgtttttttttcttttttttttgggtcaaatgaaattaaaaagggtgatacgcaataaacatggagtgaaggttctaacatagtacaaaaatgatacaaaaaccatatttttttgcttattaattattacaaaaaaaaacatactttaaaggattttgcctctgaagtttcttctttgattatttatataaaattacaccatcatttatattttatggaaaagtttgaagctataacaacatctaacatgtattaaataataagcttgtatatataattaactatattcacatctaatccgaaaatccaaaaataaaagttatttcaattatagatgaaactctttttctacttacattttaataactcatttgggctgggcgagggctgctgggctgggctgggctgggctacaacagtatattccacaaatggcttgaaaaatacataactgaattctcaaggagaacctattcaagaacatgtataatttaagcttgatatgattttttatttgattttaaaatatttttttttttgttatctacattgagaggtttaggatatttattgtaaagtgtctattttttttaatgcttaaatagtaagaaataatacttttaaagtgtgaataatcctctctacaaattaattcaattcaatctaattcattattattatcgttatagtgagaaatgcacaaaaaaataaaaataataataattggacattaataaattattataattatgattttccaaaaaaaattaagaactttctatttaagtaagggtggcaaaatgagttttgagtcttttgacacgacacacgaatacgaacacgatacgaattttatggattagtgttaggaaaattaaacgcgggtcgaaaacgggtcgacaccacttgataaaaaaaaaacggatcaaacacagtatgacccatttaacatgaatttgacacatttgacacaatttttttaaatataataaaataaacaattattaataataatataattatataaaaatatatatttagtgatttaagttaaaaaaaattaaatttaattttctttaacataaaattaaaaatactttaaattttaattatatatataacaaattacacatacataaatatagttttttaatagaatttaaatttattattttttctataatttcaacttaaataataacaaaacgagttgtagtagtcgagacaaacacaacacgattttttacaaattaaattagaattaaaaaaattaaacatgaagttaaaaaataaattaacatgacacaaagtataaaaacaaataagataaaatataatacaaatacgataacacctttgccacctagttagttataacattcaatattccaactaataaaacaagaaaattccaacatccaattcccacaataaatcgaaaaaataatgataataataagttccaagatccaacaaccatagatccaacttcaacaaacctaaaccgtccacgtgtccaatctaccttcagtcatatccacatggcaataagactaatcaagaactttctagaaaatcgagacaaaaaaacaacagttaaagacaagtggcagaagaaacttctcataaacttgagacactctctctctctagaacattcttctttctcactcctcactcactctctctctcctacttactttctacttatagcaaaacacaaatatcttctcaaaaaaaacaccaaagatcaaaactttaccagaaaaaacacccaaaacctcaaaaatctccaaaccccaattaaaaaaaacaccaaagatcgaaactttaaccataaaaacagtcaaagatcgaaactttaaaacaatggaaggagtggttataattaaggaagaagaaacgacgacgtttgtgggaactggttcatcgtcttcttcgagttcaaataaccagtcaccaccaccaataatggttcaaccaatggaaggattacacgatgtgggtccacctccatttttgactaagacgtttgaaatggttgaagacccatctacagacgccattgtttcttggagcatagctcgaaacagctttgttgtttgggattctcatcagttttcaatgactcttcttcctcgttatttcaaacatggtaacttttccagcttcattcgtcagctcaatacttatgtaagttttttcatttcttactttttcttcttcttcttcattttctgttaaaaattgaatctgatttttgccattttgagtgtacatttaatgattattaccatttttcttaatttttttgacattttaagtgtaaagataaaactatactagtaaattaaaaagtggtaaaaatcgttagttagtagattcaatggtaattttggtgttaaaaatcgaaattttgctctgttttagttaaacattgaaacttttttcacattataactgtaattgtctaaattaataaaactaaatggtatttctgaaaaaacttaactaacaatgtttcttctttttcctctttgtctctgttaaaaatccaaactttaactctcttttatgtcaaaattcaaaactttagaagttaaaaatcagaactttattgaaatcccaactctaatttcttcttaattagaacagaaatcaaaactttaatcaaagattctaactctgttcttaattttgtttcaggggtttagaaaagtcgatccagacagatgggaatttgcaaacgaaggattcttaggaggacaaaaacaacctccttaaaacaatcaaaagaagaagaaacgttccttctcaacaaccccatcatcacaatcagttcggaggaatcgaattgggtcaattcggaatcgaaacagagttagaaagactcaaaagagacagagctgttttaatggcggaaatagtaaaactcaaacaacaacaaaacgattctttatcaaaagtcacagcaatggaagacagattaatcttaacagagaaaaaacaacaccaaatgatgaattttctagccaaagctctaaaaaccccaacttttatacagcaattcgtttctaagagaaatcaccttgccggcgccggcgccggagtaagaaagaggaggcttccggcgacggcgacggcggagactgagattgagagcctgttttcggctgttatggatgatgattatgaggaatctagctctgggaataggaatgatgggttgtgggatgagtttttgagtgttgaagaagccgaaatcggggtttcggaggcggaggaggaggtggcggcggcggtggcggttgaggatttgatcgccgatccagatgagtggggagatgaggagttgcaagaattggttgatcaaatgggttatttaaggtccacaccctaacctgacccggcccggccccaacccggcccgaatatgaagactttttctttctctagtgttatttttgaaaaaaaaaatgatatttttgcaacttaattgccttgccattcctgctctttgaatttttaaaatatggtttggtttgatttttaagtttttgtggttattgttattgttattatttgtttttatttaatgtttgatgtttaataaataattggaatttgtagttttttttgttttgatttgtgcagctaggaatggtgagagttgaagttgcaaatgggagaaaaagatttgtatttgtatcctttttttatttatttgtttttttttccgtttacaaaatgaactcatttatatgtaaatatattatgttaaattgggtcaatttattatgccaattctagtataaagttttttttaattagtatgtttttctctaaaaaaaaaagaaattatgatgctttcctcttcttattcttcctttatttttttttatgtataattattatactataaataccttttttctttttcctttttttt

SEQ ID NO: 300254 - DNA, 1082 bp, Cannabis indica
gataatactaaaattataatgaacaccattaatttttttaaaaaaaaatattctgatatgtgtttttatgcaccaagattataatagcatgttaatggtaacacttctcattcttatattaggacatgcaatattattgcttaaacatttctatatataatttgttttagcattggatacatacatttggccaaaatttcattcacaatgagcatatatcagtttttatgccattctttattttttcaataaaagtttataaaacatattcctcaccaaaaaaaaaataataagaaaggaatgtgtaatttaggaaaaatattttatatattattcttcttgttttaaaaaaaatttacagtttggattgctccgataatttttatgtgggttgttatgtgaattttagttataatttaagttgctcatttagttactatgtgggttactatgtaaatttctgtaaaaatgcaaataagattgctttaaagtgtaaaaaagaaaacatgagaaattattttatatattattttttaatttatggtttgggttgttttgacagtttctacgtggattgctatatgaattttagttatttcgttagttgctaggtgggtttctatgtgaatttttatagagaaaattattttaaaaaaaatataatacatagtagtaataaaaatgtgagaataaaaaaaaaaaaaattctaagtgaatagtgaggtatattaaaggaaagaataaaaaagctattagaagtgctcttgacaatattatgaaaaattacaaactacttaaagcatcatggtttttaattttttttttgtttttttgaagaatatacagaaaggtcaacttaactattagattagatctcttaatcctataagtagaaagtacatataaatctaaagtttgaaaacacgaagtttttatcataacattaaaataatacagaaaaaaaataggtaagcaataataatcgatgattataaatatataggggattaccaaaatccgaatattccaatgataagttatctatctcactaaggccacttgtctgctgaaatgtttctttt

SEQ ID NO: 300255 - DNA, 2149 bp, Cannabis indica
aacatggtgtctatataattattttttactattggagtctcacatttcaaatatactatttgctttgttagtttcgaattccatcatgtattgatggcttgctagaaagtcatcttattggagttggctattcgaatggtgtaatttccataatttattcttgacagaactcagtatgtataatattgatgattttgagctagttctaagaagaagaggatgattatatagaataatggaaacttattccactctctataattaatatgatcatttaatattaaatatatgaataagataataattctgctgattttttgattgttgcaatcaactactagaggagcatatatatgtaaccacaccactaagatttttcattccccaactctcaccccttaattctctatttgtatacataatacaaccttgattgatacacttattactatattattatcaagaatagtcaaatatttaagtagaacacaataggtttacgtacatataattagttttactatacatcactcacttcactatctacacttgatgtctacataaatctctaagaagaagatatgggaccatgtagaaaaaatctagatgtgaagtttatatataagaattatttattaatttcttcgtaaacttcttaagaatattagtcaaagtacaaaaataacaatacagaaacagttgtaaaatcatttgtggtggagagaagagcacttgacttgaccccgttaaggtggaggattcagaatttttttaaacaaataataaaaagacttattaggatttttactacttaaattttaacaagtaccaaatcatgcctcttgaatttttctggccgttaaaaattcccctgaactattgagattattagatttaaggacgtttgtctaatttcattcaattttactaattcagtaattatttatgtactaagtcatgctctccaaactttgatatctaccaaatcatgaccctcgaactttgacatgtaccaaatcatgtcctctgaactttcatccatgttagacttttttttactaaaattggataaaagtccttaaattcaacaatctcaatagttcaggggtatttttaacgaccttaaaagttcaaagggcatgaattagtatatatcagaattcaggaagtaaaattcctaattagcctaataaaaaatatgctttaatttgcaatgcatccctaaaaaaagtttgttggtgcaccctctttctgtttcagtttatgggagaactttttatcctaattttttttatagtcgtgtatgttgtagttattaattaataaaataacatagttcatcaaatagtctacgcgagactctttcatttaatttcatggctttaattgctcttttcctttaaggaaatttttatttacaactggtatattttatttaggaaacttatcttgcaagagaatgaattctctttataaaaagttacctatgtttggaaaacttaactttccattttttttaattgttaaatttggttttgtcatgtttatagcaaatcaaataatttttatttggcaggtattgaagaccaaattgtgatcttggttctttttggaaagcttcctgtttgggcttgatctgttacagcagagttcgaacttgatactgcaaattagggatttttttaagaaaattgtgtacagctgggacaacgtgctttgtttgtatctacggtttctatgttctataaataggacctagagagcagctaaatattttctacctcttctagtttcgtttttcatacttttatctttgtgaggagagattttcttttgtaaaaatctagagtgttcagtaaggttttagtttttatttattgttcttacactattattagaataggttgaagagcttcattgaacaagagaatgatcttcgggagaagacttgtcaaagccttacttcgggaggaagtaaacactcacacatcaaaagacggagggattttattgtttgttggtgttcagaaatcagattggatttacaaaggattgcggcaaaactttagatggagtctaaacttgtttaagttaattgtatttcgtaattgtttgagactttactaattgatttcattctctgggcgtg

SEQ ID NO: 300256 - DNA, 1475 bp, Cannabis indica
aaatatgaaatttgaaaacctaatttacatatatatgacatatcaaataccataaaaagacctaaaaataaaaaaatactatataaattgatcaaacttaaaattgtcatatttaaaaatttttaaaaattccgtgtaatttcctcttttaacttttatttgcagctctaaacggtagtccaagttcttcgaatccatgactacgaggaaactgttttctgttttctcaccttatttaacaagattgcattgcattccaaacagatctcaatcttcaacttttccagcacatttttcttttattagcttaaactaattggtgtaagaatgccatggaaattaacaaaagaaatttgtttttttgttttttaataataacttcttttttaacgttgacaaaagatgagtgaagatgggcctcaatgccatgatgtaagtgcatgcaatgcaagaaagtgataaagccccacacccatacccacccagccccatctctacagaaaatattttgtaataaaatgcaagaaatccagaaaagcaagccagggtaagctgttcactgccttaattttatagtacttcgctaaaatttcagcacagacagtggatacttttcatggctctgtttggcaactttccaacatcactcatcagctatatttgtccttggattgaggaagcattagagggagaaaaaaaaatattcaaaccaatgccaataatgataattttaccctcatgaaatgtgttccatggccatgcactttatttatttatttattttaaattaacagaccatccacttttattaaatgcataaaaaatttactagtctacctttcaaccaattatatgttttacaagaagttcaggatgaggtgccttacctgttattaattacacacaccgcccggtcaccaatcttgctattgactcatcattatattgtcaaactttataaagtatattatacatatacagttttatgaaaacatttctctagtttccagcaagacataagattacggataaaagggattctctgtttattattattattagaatgtgaaagacactcattagtcataatgcaagctcagaagcacacagctaatagtgctgccactggcttaaaggacagcaagtaactttgttcagaatctggggtatatatatctaggttctgggatacacaagaggaagagagaagacattaatttttttttctttcttcccatcttaagtcttaacatgtttgaccttagtaggactgaaaatctcagaccgatagggtagaaatcattgtagtactacatataaagcaaaaaaacattaattaaaaaaacaaagtatatatcatcatcatcatcatgcatatatagttgcgtgtctttagggccgatatttgtggacctaaaataagtaaaattagaacatgtgtacatgcatgcagggccggccctaggcataggcgg

SEQ ID NO: 300257 - DNA, 7501 bp, Cannabis indica
tgttattgggctttcttccaagttgttgattgaaaatgggctaaaaaaaccctaaatcttgttttttctgaggtgtgcgcctcaccgttttttatgcctcagaccatttttcaccgcctcacacatctgaggcgtacgcctctcgtctcttccaaatactgaggcacacgcaatagtgcgtttttttttcacctcaaaatgaggcgcgcaataagaaacacaatttttaaacattggttaaatttaaggacttctgtctaatttcatccaatttgactatcacacgtttgacgtggatgaaagtttatgagacacaatttgttatattttaaagttcgggggctttggatacatatcaaagttcggggagcttgatttgatacatggacaatctgtacattaataaaattgaatgtaattgaacagaagtccttgaattcaataatctcaaatctcaattgttcgggaaaattttatatcgacttgagaagtttgagagcatgattttgtacatgtgaaagtcagaggcaaaaatcctaattagtttaaaaaaaaatagtgacgaattcattttttaatagaaataattgtaattctttgctaatagttgcatttaattgcctatttaattttttatattttcataaattaaaattagttttatgcattttttgtttaaattggaatatttacagctataatactaaatttatactaaaagtttccttaagtataaattaaatatcaataagtatgtaattaaaaggtgaaatttgaccaaaattaagaatcatattgctgtcaaatgtcaataataataagttggttagttaagtgcaactattagcaattattttgtattattttcagtaataaaattgaattggtagttaagtgcaactttcaacaaaaacattactattattgctgctgcaaattttgcagctatttagcttccgcttgtgtaattagaatgtgttcattaaccattgtgcttttagcatataagtttgggacattattttcaagatttatactttgagagttttttctttatgaaggttggacggccaccatgttgtctttggaaaggtaatttctggtatggatattgttcacaagattgaggccgaaggaagagacaacggtgtgcccaaggtcagagttgttatttcggacagcggtgaacttcctctatagtttcacaggagtttctatatattacttgtatgtatgttttaatatctcaattacaggagttccaatgtatgaacagtgatctggtctaaccttatcgccactttttgtatttaaaaacacttgaattttcaagggtatacaatattgttatggtccatagtttgcttcccaaatacaggttattttattattagatatccatcaatctcatattttcttacttcgggaaagttaaatcccctctgctcatacatattttggtataagagtttcaagtacatgcgaggcacttatatttactattgccatcacttatttgaactccttacattacattacattctagtcctaactcaattacataatcgatactaatttaatccaccaatcaatctttctttctcctttaagaacatacttcttcctcattaagtagtactccaaacctaatttgaatatcaatacacattcgttagcaatgaatatgaacagactacagtactatatacctcattaccgggttgaatagaaaagttagaagtaccatagtgacccgccctaacccttgtaaataaacacaacacaagataagaatcaatgggtcttttttctttgctttaccaacagcataagtggagcacccaaccccaaaaatatctttatgtatcatattcagttatatgaatccaaatcttttatcaaaatttctatttatgtactcccaaaacactaaaaagtgagctttgtcatcaaaagctccaaaaattgttagtttatcaattacagacaaaactcatagtcatagcacctttatttagtaccgataacagagagagatagtaaataatcaaacaaaggaaactaaaacaaaataaacacaaagttcaaataataccttattacgtctatggaatgatgaggaaacccaaagagggtcttgtacttcatcctcctttaaaacacaacaagtgttacacatattagtacaaacaggggacaagcagacatcacaacaaacacagttcatatatacaaatatataatccatgtgggctctctctaattagctcaaggacttacacccagaagcctcactttattaaaagacaacatgattatttaaaaagaagatactaaaagcaatgattttgaaaactttttaaacgaagaatatcaatgatgatgacgaaggttatcgggcttgccattctgcgatttgttgttgtggaagtaggttgtgaagttggatccgaggtcggagtagagcgaacggaccttcgaaatgttgccgttgatctcctggattagagccacgttcttcaccatgttgtctggaattcgagactggtgattctcgttcacctgttgaatcaacgctctgtttcgataccagaactgtctgtacctatccgaaattctggtcgaagttcttccacaattcaggatctccatcttcctcttctccatcggagacggtcaatggaggctggggcgggtttggatcggcttcgggcccgcatcctactccgattccggcggttcgattcgcttccatgctcgattctacggcagagaaggaatcaaaagtgttcatgtgagagagaaagaagaagaggataagctagggttgccggagcagaatcggcttagccatgggaacacattgttttgagcttcttttgtcctttttcgtaattttggtcaagttagagttggtgactcagaagaggttaagaccaagatatatatatatactagaattcattggctggtcactgtacgcgattaaatatgcgcgtgaaattcactgaggtgtgaatagttggagaatgtttacacgcgcttcgaatagaaatggggaagtctggagtgggagataaatatccaatgtgagagcatatcgtaatccaaatggaagagagagaaagaggaaaaagggagaaaaagtaaaaatgttctgccacgtaggtggaaaaaggtctccccctaaaatatcttccaatgagaaaggataaagtagtttaccagacaggaatctgctatgatatttttgcattgatatttgatattctctttttgctaaagctttttacaaatgatatttacaatgaaaaatacaatggttgttttactagttgagaatatatttgtcactcggacgataattttgtgtatcataaatttcattaatatattacctctttacaaattcaagcaaatattaacaaattcaagcaaatattaaacccaattccccatccataagtgcatactcatatttcatgtcttttgattggattattgtcaaatgtgccataacaattctatttttctattttttggtctttcttctttttggtttgcatggttcatttatttgatttgtgaaatttattgttcttaacaaggttttgtttttctagttaaaaagaatacaattattgttattatttcctgatgaactacaacatgcttatttacctataatttaatgtttttgccatcagcattctgcatcgtgataaaatcacacacaatattagaactttccactcgtaatggatttgggaaagaaatttaacattttttatttgataaaacaacgctttttgaagggcacttttaaagatgcaaaagcgaaaagtggtagtgctaatttcgcttttccattatcgatccccaatttaagaatctttgcacaactacaatctatgagccttagcagaatatcactgaagaaattggtgtcattgccatttgcaagacaaaattaggactaaaaatccagaattggatgcccaacttttcgtatttttgagccccgtggtcccaattttcaaaaattatctttgatgttcgttgacaagagtccaaagcttctcaattatctataggaaattttcttacataattgtggaagtataattactttcaatggaaatgaaattgatagaataacaaaactagatatacaaaaagtagagttagctatactagtcaaatacaaactatccgtatacaagtgcataaaatatctcatgtaaaagaaatggaattataaagttgaagatggcaactagtctgctggtttcctttttctcccaagaatagctgctctttggaatctagggccaccaatccgccatttcttaaaatctgccattgaggactgagctgcctcatatactttggttaaaaaaaaaacaggtaaactattaggttaatatcaatggaaggattcctgaatgaacatttagaatatgttaaaaaatgtgatatgaatctcacagttggtttcttcctttgttaagagtgttgataatttagaggcagctgcaaatgcaacactatgtgccttagccaagacttcctgatatctgttcttaaatgcagacaagaggaaggaccccatatctctatcaccaaccctgttcgtatgaacaaaaattaagaggcattttcaacccatttagcaaattaaagcttaacaagccaaacccaccaagcagcaatccattagatttctaaaccataagtaatgctgccaagtaaactaagccagagtcaatagtatgtcctgttaggatgtggaagcgtgtggtaatagaatgattagggttagccatgatcttataaatggtattaattttctaattgatgtggactctaacatgtatgaatgattttgcttccatccattcaatgtgcttagaaaaagaattcaatgtgcttttaaaaaaacgataagaccaaaacagaatcatttcctagatatttttataggatcgtgtcagcccctcgttaatgctcttaccataatgatttatcacagatttaatcgaattggaggctgaaagttagtggaagatgataaattgatgacatcatcaaagagtttagggtaccatcatcagctacggaagtgtgcataaccaattatccaagcaaaactagttccacgttcaaacagtgaaagcaagtattgacaaaataggttcatctataatggattcttcacaaatatatctaaaagggaagtatagaactgacacatacgtgtaaaaacatagtttaacagaaaacacatttaatttgtacgagtaaaagaaaggataaagaagaaactcacagtggagctattttgcatccaaattcatagaagtacagacatcgagatctcaaatcaacacaagcggcatcagccccaagttccagcctggttctggtattaaaagggataatcaaacatcatcgtgttagcatagcaatcacattttctcaactttgaactcgctaaagaagtcagataagtatatataacaacaattcctctggggttagtattagtaatgattcaatcctgttaaccctcataagcgaacttgcaaataagctgtatgaagccagaagaccattttgaacttgcaaataagcaataaataccaagaatcaccataattgactaagtgacacgggttacaataagagttcaaattgagaaagccactcatagtagacttgtatcagctaagaaagcaaatacatgctaaagatgggaacaataagagtatcaaaaggcaaaaggaaagtacttttctctaattaagccgttgaaagtcctataatcttacaatatttaactgagattaaaagggttgagttagtactattattacttttgattgaagcacggtgggggctttatggtcgctacttgtctgaggtgtagctcatgagcaagccaaaagggcagttcaaccttggaccctggttcaacctgaaacacacccaataaaatatcacaaacacattcattcaacatccggagtttaaaccaatctactaacttacacaagccgtttcagcactaggatcaattccaaccccgtttaccgccttttggaacaccaccgagacaatctacgagcaaaaacatataattacatagataccaaaatttcaaaatctttcgaaatagaattcaattatgatgctttacctcttcttctgcgataatatcatcaatatcgtagtaattcgccattgaaattagtcaggggttgtctaatcccaaagatacccaattgaaaacacaagacaggaaaacaatggccactgaatctcgtctctatatataatttcaaagccaaaccctaattgaaaattatatgaagttcaagtacagatctgaaacgccaccggaaaaagaacacaaagtagaagcaggaaaaaaatataaaacgtagaaaatgacctgaattcgggatgctcctttactgaatcttgttagtctgaaaattcaagttggagttagggcaggattacttcactagatctcgtcactggcatagagaatatgaaaaggaagaagatgaagacgaccaaaaaaaaataaatggagggaaactcaaacatatacgcgggaattggatgtctttttaatatttgtaattttatttttggctggaattttttaatataatttaataattaaaactagaaaattttacataattctctaagagtttgaaaaaattaacaaaaatatatcaacatcaaaaaaaattatttttactctttgaattttttatttacaaaaatatctatttagcaataataataattaaacaagtttttttataattatttataattatattatagttatcgtgagattgttttttggttgattttacttgttttataatttatttataattgtcgtgaggttaattttttattgttttgtagttgatttttttaaaaaaaaaaaaaattagctgagtaaagtatatttttataattaaaaattttaaaccataaaattataaataaaacagaatagaaaaatatttttgaaaattttccataatattaatgctaaattttgcttaaaaatagaataaaattaaaatgtcacaataaaaacatgaggttgatttctcattgttttgtagttggggttttttttttttaaaaattttggctgagcaaaatatatttttataaattaaaagtttagaccataaaattataaataaaacattaaaaaaaaaaagataattttaaaaattattagtaatactaatgttaaattttgcttaaaaaatagaataaaattaaaaatgtcacattaaaaacacatgtataagagagaaataatatttggtacatgttgcccttgatcttgcccaaaacacgtggacaaatatgacaacgacgcgtggatttaagaggctcgactcttagataaatcgactaagtctttttggatcaggagtgtcaacgagaagacacctcc

SEQ ID NO: 300258 - DNA, 3947 bp, Cannabis indica
ttttttttttgatgaatcagatgaattttattgctcaaaatcaatttttgtacaagcaaaatggccacttcaaggccggtattatatacacttacaatttataaattactaaaccactgtacatctttagtactaactttcttgggccatatcaatctaattcttaagtgtacatcttccttgatcttccttattaattgatcaatgggctactactttccaccccataattgctcatttcggtccctccaaatatggtacacaaggcttgctagaccagcagccataaccaacctttggaacctagagcctttaagtctatgcattcatttaatcaccctgaagagagttatatcagctgatctccattgtaactagctcccaactccctgcaaacattcttttgacctgtaacagtgaaaaaatagatggtcaattgtttctacctggtgtccacaacttatacatgaagaatcgccaataatattcattctgtgcagtcgctctcttgtcttcaatctccactggacagcaagccagaaaacaaaactatgtttgggagaattgaacctaccccaaaccaatttactctattgtttcttctcttgaatgggacatagaattcgataccttgtagagatttggtaagttactcccttgaattgctgcatatcaggtgaggagcatacctggtcttttagagccaccagctgcctcgaataccagctcccttggtttggacatgtgtagctccaccaatctttgttcttgagataaacactatggatccattgcacccatagattttcttctttctttgcaatggcccatacatatttgatcatggctgctttattccattcctttactcttttgaagcctaatcctccttctgtttttgatttgcacacttggtcccaagctattgcaccagctccttgaaacatatgttgtcccttccataagaaagctctacatatggcttcaatttcactaacaaccttcttaggtaaaaccattacctggctccaatatgcatgaatggagagtaatactgagttgattagcactattcgagcagcaaaagacaagtacctggaactccaaattctgatacgagctgtcatcttctctgccaggatagcgcactctttgcttgatatcttcctttcacatataggaaccccaaggtaagtaaaaggggtatctggatggttaaccccaggcaaccaacatcctatcaatttcattctgtggcatattgctgccataaattggagatttagatggattaggaaaaagtctcgatgtagctgagaaaagtttcagtccttgtagcatgtacttgacacttcttaaatctcccttagaaaacaagagtacatcattagtaaatctgagatgattgagcttcaaacccctgcatctctcacggaactggaaatcatatttttccacaaccttcttcagtattctagtgagatattccatccctagaacaaagatcagaggggacataggatccccttgcctcaatcctttctgtgatgcaaaaaagccatgcatttgtccattgaacattaaggagaacttgggagttttgatgcatatcataactaattaacaagttcagtattcatatatgataaatataaagtttttaagggtctcaaccggtatttgcttgatattggtcaaagcgctgtcttgaaggttaattttcctggctgctaggtctgccttcaaaagctaacttgtagtttgttcaagcaatctacggatcctggttccaacatcttgaaccactcctcagtggaccctcctaatgtcagcaggaaacacaaacacttcgcatctttactgactctcatgactatcattacgcggttaaactaggataagtggtcactagggtctgtgtctcatgtgtacatcgttattttaggcattttgaaattctttgggacctctgcttcaaggatgtttctagtgtagggttcctggtcctcacaatcagactctatcctttcagtggatagcgagttcagccaagattccctcatttaaggtgcctcccgagactagtattgctcatttcttcctctctaattgattcctaagatctccgtgtttggcattgagtttctgtctcaaattgataggagggtttttccaactttcccccatctctcccccagctcctgatgcatagatatgcatttttcgatctccccgatcctgagaaccagcattttcccttgggaacctacccctttgtagaccttttccctttgggaaatcagggcaaaatttttacggatcctaagccttcttatttttttggggaaggatgtggggttcatccttggtgagccttctatgggataccgaatagggcttggctctcgatttttatgcctttgattatttggtgcagactcttctctcattttgtctagtccaatgggcttgacatttggatgcacgtggatgcccgttgtttcgatgctcttttgcatagagaccattatttctttcttcttcatgttctgttctttttgttcttccaactcagcttcatggtcatcagctttctgtctcaaggccacgagttcggtgtaactgccattatcatatttgtcctactcttcttggttttcatcatattctatatcttttgtttcatcttgctcttctacttctacatctattcgggaagccacttcttcttcatctgggcctctaggaccccgaggtggacatggttgacgtgcatggtttcaagtctccaccatcgtagtgcaaagttacttttaatatatttatattattattttcttacgtagggatttctatagctctcaatgaaagaacaaaaatattgattaggattttcattaactaattaatgaaagctatgtaaatgattagaagagagttaatacaaatatttttacgtggttgcgacattaatgagccttagtccatgagtcactgctatttactatagtgatgtttctttacaaggaatgtttctttacaaggaatattttacactatttaatatagtgatgtatttatagctttatgaagagagcaaaaaaggtctctattgttggaattgttcatcttcgacttgcacaagttcttagattcaaataatagggcatgcatgtttgcatagggttttgctaggtgttaggtaagacaagtatttattcttccttgattgacgtgataatatgtagccgtcactaatccccttgattagggcgtaatcattgaagaatgggtttaatgcatctaacattcctttttagatccatctgtagacgcctcctccatgctgcatttaatgcatttatataattaatctctacggccttgagttcggtccaaaaggctttacctagctcccaaagaggaacaaaacatctccttctccagacacagctacagctctcgaagggacgtctccatcatgttcattcaatccgaacaagtttacttgagacatcctaaacccttcttgatcataagactaatttgccacatgcccaattgtgaggttgccacgtatattggggaaaaaagggcaacaacagttaatctataacgtattatagatttggatccaactgttagcacttccagaattaacacaataaaggaactaatattcgatctattaggaaagattggattctactattttataatatattcccaaccattcatgttattaagttcccaaaatagaagttgtaagattcatctttttcaaaaaactttaacgagtgaatcaaagaactcaatgaacacaaatagaagttcatgtatactaaggattcaggctgatctactaatgatcatattgtgatatgataaactcttttcatggtaaacgataagttaatgaaagatgtttattatgttgggttttatgc

SEQ ID NO: 300259 - DNA, 3741 bp, Cannabis indica
ttatgagacaaattattagtgcatgcaatatgtcattcccacttaatatacaataatgtaattttacaagaaacaagttattaaactgacatcttttcaaaatgaacttgtacacaatttgtcttcatcttttctttactttgtgcttttacacaattcaagtgagtcaaatattcttgtgcttggtctcagcttgtcacttaaaactgtcatctgttcaaagtgaaataagctacaatatattaagagaaaaatactagacaaaattaaagataataggaaaatgcaggcatacactaatgtggcactttctaattggttggcaacctccaaagccttttgaaggctatcgaccaattgagaaaccccacatagatgatgtatagtgactcataacacttattctcagctacccttttatggaaaacaagcaatgagaaaattaaccttgtttgaaagacattctgaaccatctttttgggagcttcactggctgcatattctaacttgagtacctcttctgaactcaagcgccagccaagagctcccaaattctcttctgcctgtttcacactcttaacacctggtattggaatggttcccttacatatgcaccagtttatagcaacctgccaactagatctcattttgttaagttgctgtgatcattgtgataattcaagtgtttgtaaattgcatagttcaatcacctgtggcacagttttgcgcctctttcgtgctatttcatttagtgtactcagtaagggctccaacccgggaagaatttgtctgaataggaatgaactacataaagagaaagagcaaagtttagaagatcagtttctgttattaaagactaactttaatgcatggacaatttcaatgaagaaaccagtttaccgaggccctcgtggtagtttatctggagtatatttcccggtaagcattccaagtcctaagggactataagcaataactcggatgccaagagaatcacatatgttttttatttccaactgatcttctcccatgcttagcaaagagaattgcacctataatgattgttaaaattcagttcccatacaaaatttcttgaagttccacttgatgaaccttctaggttaacccaaaacagtgaagaataaatggtactctcaggataggatatgtaccttaatgtatttctattcttaagaaagacaatatacaaaataagtttatatgctataatgttaatcaaagtgtgttatacatttgaggacatgtttaatgagtgtgtatcaaactatttctagtaatgcaacaaacatctcagattccaatttggagttgaatctctatggctcggttttcgtctttactttttgttttgtattttgtttttctggtttgtttcttgttcttagtttgggtgagttcttgtatttgcaggtgatgaagttggtgtcggaataggagtgaaatccctacaaagattttcacctttggaagcattgttgtcaatttgtcattggtatcatattgtgccaagagctgaatttgttgagttgtgtttaacatgaatagagatttggagaagtagaacaatacctgagctgaaaccaagggaactccacgagctttgaggtaatcatatatctttagaagttgctttggtccatagttgctgaccccaactgctcgaacaagaccctgcatcaaaccatctctgaatatgtgaattggtaacagtaatcttgatacctacttaagatttacaagatttatttgatgttgaacactctgatacggtgttggctcttttcgagcacctatgataaagtagacctctaacggttctttttgactcactattatttgagctactgaaaactaattaacaatgaatggtcttacgacatgtgtttttcagtaaaactttcgagtcagaaaactcaaaaatgtgatttagaaacaagtaatcaagtactcattattgaaatcacaatgttaacagaaaattaaagcaaaaatatgatatgggaagaagaagaagaaaacatgttagcaaacaatgagaattcaaagtatttctaccatttataaatctatgcataaagtgtcatataaccttttcgtacattgccactaaaccatcccaaagggccatctcctgcaaaggagcataatttgcagttgaccagtggagctgccctattccaatttgctcaacttgaatacgttctagtgaccccctgaaaaaccatgctacatcaaaattatatcataagaccaatcaatacacagggaagattttcaaagctctctctagccgatttcgacaacagataagcatgaaaaaggggctattacctgcaagcatttacaaactgccctggtgtcagtcgccatggatatgcagcaaacttggtggctatcacaatgtcatcctgaagcccttttccccctgcatatgaagttgtccaagaacttggattaattgaaaaaattgaccacattctatgtaacaaatttatgtttttatccaatctcttattgcatatacatagcaactttcattttctgccataacaaaaagaccccatgtttcgttacattgaaaccattttctgcaagcggtttagagataatagtatgatgaatattggaaacctcaatcaactagattgtaattcagtcaataaaatgttctataatagtaggtagatagcaatatacaaaatagcattttctttatattatttttcaaataggtttctgtagtgaaaagtgacaaaatctcaatgtcatatcaatgttctgcaagaacaattactgactagagtaactataatttgctaataatgaggtctttcatttttgttttggggaaagaaaaaaaaactctgaagaacaaacttatcagaattgggaacaaacatttttacctcataatcattcactagaacacatggtgagcaaaacaacaaatacaatacagtccaaacaaactaagaagataccttgaaattccctgatgaactttccaagtaatttttcactttgaccattcaatcttccagtcccataagaatcagcaatatcaaagaggttaattccattgtccacagcaagattaaaagtcctctgaagttcatcatccatggcttcctgataaccccaaagaagctggtttccccaagcccatgtaccaaatcctattggagacacacttagtggccccactttcacctggtttcacattcattattcacacaccattatcaatttcaaaacacctcaaattaaaagaaagagagaaaagaaaagataccttctgccatggccagaagagagggagcttaagagggttggaggatgaagaaggaagagaaagcccagatgaaggagtgaatgagttgatgaagtatggtgtggtgggagttgttgagcttgaaaagaaagccataaccggaaaagaagaaagctttctggcaatggcaagtgaagtgagacagttattatgattatgtcagtgtgtggtgccagtttctttgacaaaaacaaaagtcaactaatgacattttaggacaaaaacgacagtgatattttaaacaaacgacattaaaattacaacaacgacagaaaaaaaaagaaaaacatattattattgttttaaggataaatagaggcataaactaaaataatatttttagtggcgaaattttcaatatttttaaaattataatattattggttttt

SEQ ID NO: 300260 - DNA, 3749 bp, Cannabis indica
aagttggtcattacatcgatgtaaacaactgttttgtttgtacgttctttccgaaggtactactacgcatatatttattataatttggaatcaaaagtttattataaatgtttctaagtccacggaaaccaaccaactttatattaaagtgctatcgttgaatatcaatagttgtaatcaacctcaaaatcgaatattaaacttcaaattaaatcaaatagcaaccaagaaagaaaacaagtggagaagctaacagaagtgggattggtttgctctaaattcttggtctttctaatcgaatgacatttactttgccaattattacatttaatccgatattcatcacatattttggaacatattcacatttttttctcataataaacacaggagattttgtactgaaaagtgcattaactaataacacgtgattttcacccacttttcttttcttccccatggtgaacaataggtgtcccttccctaccttatgtggaagtacaattacataacatagtaatttgcccagagaattatgaaacataataggaaatgatctttatcagccaccaaaatgtgcttcaatccagtcacatagtaaagaaactaacacaaatatgtaatgagaaaaaaaatattacttgggacagtttaaacaatctgttaaccagataaaacgaatatactacaccgttgctacatttttaaccttttaaaccacaacatagcattctttcatttcctctttgcatcctattggtttcccactttcattggataaggttttagtgaaatttctagaagatctacatgactacagcattagtaaaatacttcaactatttttatcttcctgaaaaatggactcactcacataaaatggaaaaaaaggcagttacttctttgcaaaggtaatggccattgggttctgtggagtaattttgaacccttgaagtgcttgcatagccatggatgactgaacatcatcttcaaattctacaaaggcaatacctggctttgcttcaattattcgaacttccctaaatcctgggtattgttggaagagcagttccagcatcatactagtggtttcatggggcaaattctctatgaacaggatattatttggagctgcagcttcttgtgcacttgtatttccttggcggaatggagcctatacataagacaaagaaacaggtacacaaattagcattctgagccataaattcttattaaaatatactaaacataagataaatattggtgaaacatactggtgtggctccattttcagctcttgttccatttgctgcagcagatggtggtgcatcatctgggcgtcgcttcctttcagctggaaaacatgtatttacatttgctaaataaaatctggaaatttataatattgatatcaatatagtatattcgatcatatcataatccataaaaagacttgtcacctttttcttcttgcttctttttcttatctctaggaacaaaacttccatctgctttagcaatacaatctgactttgtctttgcatattgaattcgctgaaccaaatcacagtaagtttatttaggaaatattatcgagagatataacaaaattatcatttacaaagattagttttgatttatagatttccaaacactacatgacagaagggagacaacagttggaatcaaaccccatactgtaattcccacttagaagagtcacatggatggcagaaaataatattacctagtcagctacaactacagtagaaatgtatctttctgatctcctttccttctataattttcagctctaactaattcaagaagcctcctcacatgtttcttaataaatttagatgtagttagttcgctgtattggcgagggttgttacacctagggattgttgaggtaggcaacttttctgagttattttgtcaacttcagctccagggagagttttccaagtatcatgaactacttggaaccctagagccagatctcacaatatgaccaatctaaattccctatctcccttagacaatactatacatacccccccacccccaaaacaatatgaaggtgtaactaagcattgttaaaatcagaacacaataactaaaacaccaccaacccttcaccagtgagagaacgcagcaagctctcactaattcctcttcccctgtgtctatgtgaaatatatgggatgcctatcactgactatataacactctgtgtgcattgaaaaaccctcacgtctcaatttcaaccacaacaaaagctttcccaaaaacattttccactctcagcgggaataagctcgcatatatgtgcttacttttattttaatataaacaacgtacataaggcacacaaggtaggtagaatctgatgcaaaacagtatgatgatgacattaatatacaacatacaccatagaccccatacaatcatgtacacaacatataataataaacaaaggtaggccagcatatattatgaatactacttactatgggtttatcataaaatggaaagttctgcatctgccgcactgcattacttgcagctggcacttcactaaacgcaatccaagcttgtcctcgtagtcttggtgtcttcaaggcaacaacgtccaaaattcttccatattgagagaataacgcataaagggatctcttaagttctgcaaaagagaaggtaatggtggcaataattaagcaagcaatggaaaaaagaagaagtaaatgttgtgcaatgtcacacaattcgaaacaccataagcttatcataaagaatataaacaagcccataaagctttcaccttatttataacagaataagtgtctgttataaaagtaataaacataacagatgctaatttctcaaatttaacctttcctatgacatattctactccttcagcaagaacccaaattccccggtaatctataattagagtttcaacttccaatacatgaatcctaacccctacgcccaaagacactcttgaaaaaggtcccgagcaagttcttcaaaaagtgaataacacaattattttcattgttcctagagttccattaacattgcttcgaattgaacacaccctttatcagacagctaagataatcaacttacataaacaataatgtaatgacactaaaacaagaataaacacttattatacacttagacaaccaaaacccctatagccccaaccttatagctagcgctacatttcattacacgacccagaagaaaaacactgctgagcttcgaatagtggaagacgtatagattgaagaaaatttctcgggtatgcaaacaaagaaagggttagaagaaaataataccttctttcttgatcttctcattgagattcttaaggtatattgtttggttaggaggtatatccccagagagcattgttgcgtggtgtagcaagagaaagagagagggaaatgggagtaggagcctgatcggagtgagccctagagaaacaatggaatggaaaacgatgatttcctcggatcttcaggcgaaagtccctttgttatccaatgagaccagccctatagaaaggcccaaactcagccaatctgggcctcaaataaaaaattgggattatttcataaatgcacaaaatcaaccaaaaaattataaaaatacagtttcatagaattttaaatatttttatgattttttaattttatttacagaaaatactttttttttattattgtactctt

SEQ ID NO: 300261 - DNA, 2621 bp, Cannabis indica
gaactttttgggtttctgggttttgattaatcagatcagagaaagattggtatatagattttattttgtaattcaacaatgtcttttgggtcttcttcttcttcttcttcttcatcaacaacaacaacaacaaatcttgaaaggtttcttcaaagtgttactcccatggttgcttcaacaactcttcctcaggtactcaaaattttctctctcattttcttactagccaaacactttttttttttctgggaattctgtgttgttttcattttctattgctgagaaaaataataattataatattatttttaattttggtttaattggcaacaaaaaaaaaaaattaaattaaataataataaattaggaaaaaagattttagttggacttggggtcaagcagtcaaatcaaatcaggccgtcctttgttttttttttttttttttacaataaaatcctctggaaagatgcttagtatattcttaactttttttttttaaaaaaaataaattataaagattagtattttcttagcataaatattgtgactatttcaatggtggaaaaattctaaatttcttataaataattttggacttagctttgaatacgtggttttagaatataaggacttgaatgttatagaaaagttcttagggactgaattgaaaaatagaggaaaattcagggagtatgctgaaattctttttgttagtagaggaaaaaaaacaagtgtaatgctctatacattccgagccaaactcgagtcacgactcgagttggtcggaatgtttacaaagttaacttttctaaattttccgaaccaatatagttcggaaaatggtttcgatgggaagcaaagcatacaaattgcatagaattattcaaattcattaatccaaaaatactttgaaccattcattattctgagcacgagtaatgttatacattttgagcacgagtcaccacttgaaccagcttattctgaaatttagtagttcataggaaaaaaaaatattttcgagttcatatttagagtaaaatgtaaaatgtagtattttttaaaattagtaaaaatgtgtaattttataagaggaaattttttaggcctatgtgttaggtgggtcttaggtacagtcttaacccgcttattcccaaagtcggacttagttgtacgaaggtttacaaagctacttcttgaccaatatggttcagaaagtagcttcaatgggaagcaaagcaaacaaaattacattgaattattcaaattcatcaatccaaaaatattttgaaccattcattttgttagtgtgttagtagaatacattctgagcacgagtcactactcaaaccacgttgtacagtaaaattggtcgggaggtttacaaagctaacatttcgaactgataaatggttcggaaagtggctttaatgcgaagtaaagccaacaaattacatagaagtattcaaattcatcaatccaaaatactatgaaccattcattttgttagtgtgttagttgaatacattctgagcacgagacacccctcgagccacacgttgtacagtaaaattggtcgggaggtttacaaagctgacattccgaaccgataaatggttcggaaagtggcttcaatatattgcccttattacacataactaacttaactaactgtctgtttatgatagttggtgatcgagctaaggctagaaagagtttacaagtgagactgtttgtaattgaagctaagcttctcgagttgtacaatttgaactgttgtaatctctacttgatcaccagctaataaagactctcaatgcccttgttcgaacctcgtaaaatttttgtgttcaattgttcatttcttgtgttgaattttttcagagctgcattaatgatgtaaatagtcaatggcaaccaccatgtaagaacaacaaaattgagtatttcacacttgaagatctttggaactgttatggtgaatggagtgcctttggtgttggtacaccagttcaattagatcacaatggtgatgaaactgtcttacaattctatgttccttacctttctgctatccaaatctactgcaataaatctgttgttgctacttccaacaacagtaacaggtatcgattttcgattcgattcgatttaatcatactatactcttacaattattatgccaaaaattttagtcaaatttgttgtgtaatagtgactcggccgagtttgaaagtgactcgtggagcgatgacagtggtagcgataatctttctcggtcacttagtaacaattcgagtaaggcttgggattttgtttcggaagattttagctttgagttggaaaatccatggcctattaaggataaacttggacatgtttacttgcaatatattgagacttgttctccttattggaggcctccattaatgaacaaggtaacttattttttcattttagtatagagacaagtttgatctttttcgggtgaaattctgaattttatagctgtttatttttgacagatgatggaattagctcagcatcatcctgcattgatgactctcaaaagtgttgatctttcccccgcgagttggatggccgttgcttggtaagcagat

SEQ ID NO: 300262 - DNA, 1084 bp, Cannabis indica
gggttagggtttgttgggcttggaccatggctagtagaagagagatataatttgttaatatgccaaagtgtggaatggaattataattccaccaaatgaaaaatggaaaagcaattctgttagtttggggaattgcattactatggaattcttttccaaaattggtattttccaaccaaacaaaagaatcaagcccattagtattccattccattcttttctggcccattactatcaaccaaacgggcccttaatgtaaccttcaaaaacttgaaataagggattcacaccaaaaataaaaaaaaaataaccaagttttgcaaaagagaagattcaatctctacctcttccaaatcaaccttagaaataagttgatcgctatttttatcagctaattaaaatccaattttgtggatggagttcttaccaggtttgctttgaatctgctccaagtatagtatccttagaatttgcttgaaaattcgattcttccacctcagaaactcacgaagaataacagccttgtgccaagtttggaaaaggtgaaagcttaagctcatatctagaattactgtgatatattttatgttaaaaatattctcttcatttgtgaatgtctaaactaaaatatagtatttatgaaacaaaaaaaaaaaaaaagaaaagtgataaaaataaggaaaatttacataatctcacgcgagactacaaaaataagaaaatatcgtgtgtttaaggatattttatctcatgtactttttttcttcaaatattgtgaccgaatttttctactaagttttttttcttcttctttttaggtggctttggagggtgaaatgactccttaactgtacttttctatggctctccatctttaacaacttcatcaagggaaagattcttcctcactctcttgcgattttgaaatgtggaatcctctaccacattagtatgacttcaattgctaaatactgtcctaatgccttttgactagtgtatagggtgaaagactctgaatgtttctgttgaaaatattttaccaggattttagatttactaccatgtatgtttcattaacatccta

SEQ ID NO: 300263 - DNA, 3911 bp, Cannabis indica
gagagagagagagagagtgtgtgttaacatgtggccggccacattgtagcaaaatttaacaaaatcagatatgtctttgttttgtctcatctttatgaacttattcaatactaaaaaatagtaatgcttctgaacaactcataggatgtatcacatctttcaacacgtttttcttacagttgattcagctctatgataacaagatttgcataatgtgattcttaatctataaaaagatgaatcatatggtaattgtactatttgctaattaatttggattttgctttttgcactttaaaatcttacatttactaaccaacaatgccatagagaaaaaagaagctcggtatgatagaacatgtttgggacaagagaattatttatttggtgtaaatactaaatatgatatacatatacaaattgtaatcgccttctttgaggcttttaacaaagtgagattacaaaataaagttaaaaagaatggttagcttttgacacaaggtaatccccgaaaattctccttccttaggaaagagaaccctgcaaaatctccggaagttaaatgtatatttagtcatcaatgaaactgtatcgattctgttcccgtgtactcaacaaaatgttcttcatagtccatcccattcccaacatctgttcgtttagtatgcataaatcatctcgagcacgcactttgcactcctcgagcaatttaaaccattcatgtagaaccgaatcagataaatcactagcttctaagattttctgccatttactcttgttcaagtgaagggctttacgtatatagcatgcctacatgaggtcatcgtattaatcttcaaattgaatttataaaacagaagctgaagatgtttatcttcttacctgtaacaaacccatgataacattgccagtggtagctccctctcgtagacaaatgataatacgttgctataattcaccaacaagcaacaaggaaacttggtaagaacaaatagtgtcacacaatattgcaacaagctgggttaaacatccattaatatacttacatgcattcttttgggcattctggtgtagaagatctccatggatatgaagtaatactctgcactactcaaagattgcattgccatcattgacaattttgaaaagtggtccttgggatttagactcccaattctgatgggccacgggcctttacctgaaacaagccttagtatgagacattgattttaagaaccaagtggtttgatcttgtcaaagcacaaacctaaaaatgagaaatttatggatgagacctcacctttgctccatgggagatcaattccttcgagtttactcacttctgcaggtgaaggcacatatcctaactcaacccacgtatttagtataacctcaagcctatcctgaacacaaaattgcaatggaacgggatacttttaaatcatatttacatcagtatgtgtagacaacgaaattcaaatccactatatttgtgtctacaaaaagtatttagcaccattaagagtgcaagcatctcattaattcaatctcttacataaataacataactcagactctgaacaaaaagcccgcatgctgactcaccttggttaaggtttgcagatggacatgcttaagctcttgatatattccaaaaaggtcaatccccgagaatattgggtatacaataaagggtaatcctgcttgcaatcttgcacattaatcactttattagaaatcttgcaagaaaatttaattaaatgaggaatgcatacaagttgatagccttagattagttaatgtacccaattgatgaaaatcaaattaaaaaagtaaaactaaaacgttaacatatataaccaactaattagactcccaaataaaagtgaaaaataaaacctttgattgttcttaaacagcacgttcaagaatgcagcaaggagaaggccaaggttatcaaagcacacagtttggatctgaaaccagagtacaaacctagtcacaacatgtctcctggggagtttagaaacaattttactattaaataaatatgcatgctagaaaagctcataaagataacctgtgattttgcagaaaattcacctagattatctgctaatgcaaagcttcgatgaacagcggactgccaacacaaaggcaacatttagactttccattatgtgctaaaaaatgccagcttcaaatcaggagcaacacaaagtataccaataataataatactcataatacagattcaaatatatcagaattgatgtgatagtaacatagctaaatagctttataggagacgaagccttacaccagtagctaaaacgcaagccaaacttatttgtttggcaatgttggctattgatgcaagaagcaagaagtacttgggaaacaaaggagtcagcaactcaactccaatacctaaagtgaagagaacagaggtggagaacctaaccctcttcaaaagaaaatatcatatgtcagaagtcttaacattacagtctaaatctagtaaatcatacacttttctaatttgcagttcctctaacaattactaatagcaacatatccactattttagaacacaattcttatttttttggtttataagaatactgatcaaactgaaaaatatttgaatccataccttcaaatcagtatcaaaagtagatgctaggctagcagtgtagatgcatctacttagtcgtccaagtccatctttcaggacccaattcagagcagcagctgatggaagtgagcgagagtacccaattccaatagcccgaaacattgcctatcaacacattcccaacagttttctcgcttaaaaagtacaaaacccttttcattgtaaataaaaatccaaactttcaactatatatatattatatgtttgtgtatttattattacctgagtggcaagaacctggagggctgagctgaaaatgcggtgcaagcatttccatttgacatattccatataattttgaccaacttttttgggaatcaataaattccgaatagccaaactacaacctctacccaagttacgaattccatcttgaaagtcaaaggagaaggaagaagaaccaccatcaacaccaaccaactgcaaactatccccatcccataagtacctagaaacacaacccgagctctgaatcgccaccggaagccgacccagttctttgctaacgctttcctctggttcgtaaccgtaatctatggaagttctcaaagaggtggctattgtacggattcttaagcaagttttggggggtatgagtatctgggttttgaattgaggttcttgaattgtcgtccatggataaggaagatgtggatggagaaaggattgcatgagaatggtaaaaatgcaaggtcctgctctgctgcaagggtttagggtttttcgagctttgattaatgaaatggatattgtgcttaaaagttttaacttataaaaaatgaggatgctatgttatcactaacgttgttattttgagatattttttaaaaatctattatattaaattttatggaataattgaactaataataatattaacactattttataattttgtatataatattttaattaattataaaatatgtataaaaaaatttattattattttctcatacatttttatataccattaaattttttttgtagcggtaatatgaccccctaaaatgactttattctactttatttatttatttttttttacatattaattaatatcatatataaatgaataaactttaaaaaaatttgaaaaataacagacctaaaacttatggaattgtttccacccaaaacataaagaaagaaaaagaaagtcaaaactataagaaagaaaaaaagagagcaaaagaaagagtgtatgaatgat

SEQ ID NO: 300264 - DNA, 2411 bp, Cannabis indica
aagttcattcatccaaggtttgcctatattttttaaaatgtttataaccgagttattctttttctgggaacagactttcatggaggctgatgtcaaccaagatgggaaaatagacaaatcagaatggcaaaatttcgtttcgaagaatccatcattgttaaaaatcatgactctcccatatttaaggtatgccacttgtgtgtgcgtgcgtgcttgatttttccaaacagtggaatttttcgggaacttaaaaggatgaaataatctgattcttgtttgtgttttgaactaaaatgcagggacattacaacgacattcccaagttttgtgtttaattctgaggttgatgagattgctacataagagactactatacaagatttagcttaggaagatttatgcagttacagttagggtggtgtttcttttttgtgtgtttagttcatctattgagggaaaaaaaaaaggaaaaagggaatatattttggtgtaatgaatgaaaaatgtgttcattggtttattaatattattggagggtagtgactgagtttaatattagtttgctcggtcaattgtaaagaaccttctaattcaaatttctagtcaaattttaatgtttccactcagtctatttacatgaattaaacgtgtttatagaaactatatatatatatatttatagaaactatatattagaatgggtaaatataaaatactcatttaatatcttttgttttattgacttatttggtactttttagtaattgcttatcaacatataaatttagtattctggatttaagtttggtcataaaattttataaatgtactcaatggattttacatttaaattttataacttaattacatataattgaatacaaattggttatattagtggaatttgtttactaaattttggagttagtataacaaatatgtacaatttcaaatgtaaaaatttcttgttataatttctcaaaaaaacaaaatactataaaaggaaaaaaaaaatatgaataattaatacatttgcattattgcatctgtacatcattgttataatttcttaaaaaagaaaaaatcattaaagaaaaaaaaaagaataattaatacatttgcattattgcatatgtacagtttatatttacagaaggattagtcagtttttaccaaatctaacaggaagactttttttttaaaataaaacgtgcattgaaactagaaagttagacctcgcggtcattataaaggatagagtggggtatagaggatggatctactatacccgaaacattctgagcgaaagctcatctagcgacattgtgagccgcaaaattacaacatctaaggataaaagaaaaattacaagataaaaagttcatagagagttgattacaaacagaaatataattatcaatgttccataaggagtggactcctttaatcgccttgattacattttctgaatcactctcaataatgatataattatgcttccaagaaatagcagtttccaaagcaagttgacacgctgctgcctcgccaatcaacgaatttgcgaaattaagactgttggccgcaccccacaacactgtccctgagtgatctctagccaaagtcgctacgcacatggagtcacaaccaaccttaacatttgattttgatccaatcttctggaaggggagaccaaacaggagacaccaaagcgaagttacaataaagaaacaggtgctccataaactcttcacaccccccacaaagggggcaatgtacctcgtcaatgttgattcttcttgccatgatgcctaggatagggaggacattagacaagatgcaccaccagagaagacttcaatatcatagcttattattctatttactagtattcaaataaaaaaataggtcttaacacaaataggtcccagcactaggcataagactcgtacccgaccccagaaccccagatgctaaatcaccaaacctggatctggccccgaccccaaacccatacttaagaattgggtatgtgagagaaaatatatatataagaaaaaggtaatctttaattatatacaagtaaattaattatgttacaaaaattatccaaaaaaaaaaacataattacacaattctatacaattttataaatatttacaaataattattaaattcatattatataataataaaaaacataaaagtttacgattttcacatattgattatttttaattaatttcttttaaaaaaatgcataaaattaaatacaaaaatacatatgtcaatatttgtattttgatatattacaaaaataatatgtttactgaaatttaatacaaaattaaatatatataaacatatttaaaatatttgtttatgctttataaacaacgtatatacatgtatgt

SEQ ID NO: 300265 - DNA, 6204 bp, Cannabis indica
aactaagcctctattccttactcaattcaagtacttcaaagataagatagggactaaagaatatatattgcccatcgtgaaggggagtatcaagttagttaattctggtattagttagttgttagttagtgtcctagagttagttagttagtgatgcaactaactcaagctactataattagctgaattgtaattgtaacagattgaacttcttgctctgttttctcgtctctctctctcttcctcgatggattgctgatagagcatttcagagaaaagcttacaaacatataatgtgatatgtattttgataaggaaatttttaatgatcaaattaataaaaataagacatcttaagttaaaacaaacacaactcagtgatgaaaaacatacatgtaacatcagcaatatgccaataaaccatctaggctattaggacaaaaatgtaagaattagtataaaatttaaactccgtatagtaatttcattcataccataatttacaaaattcacagcagtattcagcctcatttcccaaatattctcttagctttgccttcactcttcatccatggtatatactggtatttgccataatttggtgttcttcttcggatcatcggtgaggctgagatctgtgttgtcttctttgaatgttttaataattgttttggctccatacaggatcagcctctctatcatgaataactggtaattgttctcaatcaagggatcgataatattgctatagtttgatgaatacgccaatttgtacctgcaattaagggccccaataataataatcacattagcatagatacatttttaaaaggaaaaggtcatttatgatggtgatatttatgtgcgggaaacaagtacagctgacaaattaggagtagcaccaaaatatgtgcatggcaagggtttacctcgcagcaagaggtgaaaagaatcctggtgtcctctcatttgaggcaataaagagagtttgacctggtggtacccattttgcaattctatggagaataaactctgctcttgtatccctgtctagatgaggatgcaagcttctttcgactccaaacctatctttcctggtctttattttatcccctcggcgaacatggatggcagcataatcaccaaggcgtgctttaatctggaattcaatacaggcaaagattagacaagtaggggaaagtgtgtagatgagaagtacagaaaaatgcaggacaaaaacaatcccaagtgaacaaagagtagtctagaaatgggaagtcctattaaaaacttaactagtatgaattttatgttgggagtttaacagaacagaacgaatgcagtcaagaaaatcagaaagttatttgtagacagcaacaagaatgagaacatagctttacaacccaaatcagcacagagataggtcgtgatttggaggtggccagataatttggtagtcatcagcaccactcaaacaccagtagttactagttagaatatttcttttcctttcaagtttaatgcacttcaaaacctttgatataataccatcattattcagttccacacaacactcaaaatttgaattagaaatcaatcatgtcctagacaattattatgggcacacagagttcgtccttagtaggggtggcaattcaggtcatgacacgacaacacaacacaaacttgatacgaattattacaggttagggtcataaaaattagacgcatgtcgaaattaggtcgaacccgaatgacaattattatttgggtcggcttaggattaacgcatgtgacacgaaatcgacacgaattgatccgtttatatctaatatattattaaaattattaatttatagttaaagtattattaattttcatagaaaaatataaaaattagaaagaaaattgcttacaagaatataagatagataatttatatttgatattaagaattttattcattgtattgataatttatgataaatatttttataaaattaagtatacagtcgatacgcgaacacgacaggtcgatacgagaacacgacaggtcgggttagggttgagatttcttgacattaagtatatatgggcgggttagagttgactaattaaatatgtcaacctacataacatgaacacgaatatgacacagcaacacaaattgacagccctagtccttagctccacatacccccagcatggtattatatatctaagcaatattagcctaaatcttaagtgcatggttcagagcatcacatgtcccatacatctatctagctcttgatctcatggaaattaccttctgctattcagagccaacatatctttaaccatccatatctcaccactatacaatggcattatttaatgcacttcaatgcataattttaagtttaaaaggttattaaggatttgaattgttacaatgataatgctgagattatgattcagcatatgacacatacataatgagacttataaatcactggtaagaaaaatattatatgcattaataaactctgctcaacaaaccttttctgctgcaatccttaaattcgctgctgccattgaaggaagaaacgagtatggcaacattattgcactgcggttatttcggtccttgcactccataaacctgaatgaaaagcattaggaaaatctcaacaaaaatatgattcataatagatgtaaatactagatattcacataaatttgcaaggggcataattaaataaattgaataagtaactgcaatgcatctaaatgaagacaacatataaagtataaacaagatcgactgaaagaaacaagggcaataagaacataaaacgagcatgtcttagacctttacaaataaatggcttctcactcaatattactaagccaaatcacaaattattatattaagaaaagttaaaaaggtaggctcatatttagtccagtttacaggcagtgtgcatgaattacccaatccactgataggtcatgtgagctcatggttcaattctattgtattttgcagctatagctacagttttcactataacaattcagggaatgataactatgtattataggggaaatatttgtgaatccatacaaaaatgaaaatgaatacagcttatacccagttttttgtgataaaacatacactgtgacaaattaaccaaactcacacaaactcttttagatttaaccaaacacaggtttgatctactgacaaggtagtcggcaaatttatcagattatgcataaagtagaattctcgaattctgagttatgacaaattaccatgaaagacggctagcagttctgtttattagtaaaagattcgagtaacgatcgttctctttgagttcaactcgattaacaccttcaaggtgggcaatccctctggatcccaacttcatacttgttgatagcacctgatgccacaactttgaattgtctaaaattactggtacagtttcacttatgaaatccatatcatacaaagagtccatggcacacgagtttgctgcccacctaccaaatataaagaaacacacacatttgtagaaaatcaaattgcaattgcagattccctctaatttcaaaatgtgccaaagcatcaaattaatcagaaactataagctgagacccgatattattatttttagcaacaacacttgttatctaatcagcaaaaactgtttctttcaaagcaataatagtaattagaaaaaaactagcaaattgttttacctttcgtctgaactttcattactggcctgttgatgaagtattcccttcttattatgtattggattgatacacattcgagaaggcattacgaaagttctgtaacaataaagatcagtacaatagcaaagaatcagcctctaataaatttcaagttttgctacccaagtccagtgccgatgttttccatgtttagatcgacactggtctgtctcaaatttcactaaatcatatcccatttaagaaatctaaaattaaagattctctacttcctaactacgttttctcggcaaccaaacaaggaagtgaaaaagaaaatttaagtaaaaaaaaataacctctgcagaaacatagcctcctcaagagcacacctgaggctggactcctggtgaccgaggccctcacaggaatcacaatgctttccagggcagtcaattttgttaccccaatacaagtatttctcattccctgtagggcggtacttgggtctctttaacttggcaatgtattcagaggcattataagaaaataaagacccatttgtggagagtagagaggaaacgaggaagaggaggctaatggcagctacggcgattactaagtagataattgaggatctgggcttttgtttggcctttggagctctatgaaacgccattgaagtttgtgttgccgagagaagaagaggaagagtaggaagtgtcagaattcagatcttgggagtgactgtgagagagtataataggccatcatcatcttccacatggggttgttggtctgtagcttatgcataatgatttgaaaacacacatcatttggattcgatgatttcaggtttgagtaataatacggttttgagtaaagagggtagcatcaccactaaaataatttactcacactttttttttttaaataagcgtagttatatattagaaaaatattagacctcacgatcattatacaaaatgttctctggtaaagaattgatcggaatggatccgtacatctagtggttaaaagcccaatttgccacattatgggccgcaaaattataatttactcacacagtgttatgatttgggtcattttctataatttttcatttatttattttaaagtaatttgcggttaaactctatatacttttatgtttgttacggttaaactcctttactcgaaaaattagggcttatactctttggactcgacaatcgttttcctctataattagggatgcacacgaggcggaaaattggcgcggagtgtttccctcgttcccatctctgttaaggattttaatccccatccctacttatttaccatcatgaatgggacagaacggggcggagaatcccttaataaaaaaataaagtttataataaaatttttaatatacaaaaatattaaactacataaaaattaaaatattacacattaattattaaactaattataatccaaaacacaacttaaaattcataaaaaagatactaatgtactaaaaaaaatgcaaacataaattataaattattactagaaataaaagataaaatactaaaaatacaaacatactaaaaatacaaacataaataaattataaaatattactaaaaaaatggagaaatgctcaaaaatctcaaattgaggtatcatggcctagttttaaggctggtgatggagctgagcatttgatttgtccacctaagaatagtgttaagattaatgtagatgcaactttgtttgaggatggggctcgggcgggtgttggagttgtagccagggataacaagggtcttttcattgaggggttcacaaaagttttcaatgaagctctggaccctgctttggtggaagcaatgggagtgagggaagcgctgagctggctaaaggagaaaatgtggcaaagagtgctcattgagacagattgcctaacggtggtacaagcgctctgcagtcatgtcaaaatgatttctttatttggtaatgtaatcaatgagtgtaagagtgtgcttaaagagttaagaaatgtctctatttattttgttaagcggtcagctgatatggtagctcatagtctcgctagagttttcattttatttcctgatcgtattttcagttttggggatgtcccaactgagttgctaccctacttggtagctgaatttgttggttaataaaagtattttccttcaaaaagaaaaaagataaaatactaaatggtcctcgtcaaggcggggagtgtgatccctattctcgccccgttccttatttagataggaaatcctcgccccattaggggcgggtccccgcgggagaaatgtgcatccttatctgtagtccttccatctactttggtctattaagtttcaaagtggactgccacagtatacataagtgtacacatagtaaaatttcattagtcgacctaatattaataatataaatattaaaaaa

SEQ ID NO: 300266 - DNA, 2137 bp, Cannabis indica
tatccacttccccattcaaagttgtctaatagtgaccaataaaagtaacctttcacattaacaccattcctgaaccaaacaaaaaataaaatcacattattagtcaattatatcattagttcagtatatatattagagaaatatttgtacaaaaacatttaaaggggaattctcattttatgcttttttgggaaaaagttagccaaaatgtgtgtgcgtgtgtgtgttgtttttttttttttaaaaaaaagtcattttatagaaatttttttcaaagaaaaaagtttaaaaaaaatacatgaaaaacagattttgaggggtaacacactgaactatttttctcatatttttggaaaaaaaaaaatcattttcttacatgcattgtatttgtgtatcaaatatcatatttttttttttccatatattagatactaaaaaaaattgtgtatacatatttttgataatttttgtcgtaaactgttattgtaaataaaattagcagaaagtatttaccttataacaaaaaattaatattaactagctgtgtataatcaaaaataaatttgagtgtattttgagtaaaacttatatattttggtatatataatgatatgatgacttactttattgcttctttagtgtagaataaatgttgagtaatgtaatcaattcgaacttgatcactaagtgaatcttgaagtggtcgatctgggacatttgcatcaggatatcctgcaaaaatcaagattaataatattgattaattacctaattaagaattaatataagataagaaccacatgaaattaataatatgtttatatcttaccattctctgtaatgtaaattacagggtttctgtattttatattcatgtactccaatagtttttgtaacccaattggataactgtacacatatctatttccttctgcctataaaaaaccataaagaaaaaaaattataatctcattacaaataatgtaaataatagggtaattagctagctttataaaaaaaatttgtattttaaaaatacttgcctttggaccaattagaacgccatctttcaaagctgaaacaatttttcacaaaatattatatatcataattaagtaacatttattataaaaaaatactataatttcactttcaagttcgattctcaatttgatatacttaatatatttttatatgaaaagtaaatatatagggtaatttaagtacttgtgattgttgctaaggaatccccaatatagtgttttggttccactggttgagatttataagcatatcttgaggtgtagtagttgaccccaatgaaatctaaagaccctcttatcaacctcttctcttctatagtgaaaattggtaatctctcttgaacataatctctcatgatttgtggataatctccaaatatcaatggttccaaatacctaatatcataataataataataattagttaattaaaggcatatggtacattacaaaaagtaataatcaaaattaattaattgtgcactacatcaatattttatcatgcataaagttataaatactaattaccatccaaaaagaaaatccatgtatcttattgcagctgctttatcatcttctgtgtctgttaatggttccataaactccccaacaacaacaatgccaatttctcctccttgtattttctacaacaatatattaaaaatgaatattttactataatgattgaaaaattaatgtttactatattaatgttttttttttttcaattttaatatttttaatttaataatcaaattaattaaaattttaaaagaaaagtaattatctagatagattttttttaaggtaccattttggattatgtgttttgcaaaaattatcaattggatcctctattttgttaaatgacaaaatagatcctgtattatttaaaatggtaaaaataaaaccctgagcttaatttttgacaatttttttttaatataaccaacttgaagataatttttaacacgaatagatacagaaaacgtaaacagttttgtcatattacttttagatcggattattattaaattttattttgacgaaaaatcagttcagggcccattttgtcatttaacaaaacagaggat

SEQ ID NO: 300267 - DNA, 2126 bp, Cannabis indica
gagacgttaatcattacacgtgtagtgatatattatctatatcataccacatataacgaacgatgagatcatcaaaaaatgaattaacaaagactttttttttttttttttattgtaactttcatgaaaatgaagcaattagtacaagttaccaagttttaaagagtggaaaagtaccattccacactaaccgtacatcaagccataaaaaccctttttgttaaaatgtagaaaacaaacattattttgtctagaaacatgtccaagagtagccctagggagatgagataaagagctacaaattatcctcacagtatctatatgattacaatgtattttgtgaaccaacaccttagagtcagattcaatgaaatattacaccaatgcaaagacaattttaatgctaaatgctttaacatgggtggaatttgtaatgcctgcaatgtgaatagatacaatccagcaaactatatgtcctttccaatctttaaccacaacagtacccaagcaaagcttaccattcatcaaatctattattgcatcagtgttcaacttaaagaaactcgaatcaagtgaattctctagcacctatgatgagatattggctacttttgattgttcatgatactattggaaaactataatctctaatataagaattgatccaatcaattgtattagtcgctgatagggctggccctgagtgtacgctagccgagggtgcgccttgcgcctccgaatgctttgggtcttaaaattgagaaaaaaaagctattatagtataaagatataaaatattagataaaaagaaaatataagaagtatttgtttggtgttaagctaagaggttaagagatcaatttttaaccactatttttttattttttttaaaaatatttaatgtacatgtgtcgctggtgaaggattttaagagttttaaaaaatttcaccatcataacaaaacactaaaattattatttttacaatacttcaactatatataggagctcaaaaaattaattttgccttaagccccatataccttaagaacggccctggtcgctgacatataacttttctcaaacagtttattgtttccacgacctcaaatagcccatatgatacccaataacattgccaagtcctctttacaaagtgaatcaaaagcacataaaataaattctctcacattatgcacttgttaaaattgtagaattttttaaacgaagagaatctccaaatctagttagccttggaacaatttgggagagcatgtgtcactgtttcattgatatataaggaacaagtaggactagaaataaatattttggaacagagctttagagattgtaggtgaaagataaaaataagttctctagataaaaatgcttgattttagatggagtatgcaaaatccatgtggctaactacttcctgaaaaagtattgattggaagaagaatgagggacagtagcagatttagcaaaatggtaagtggatttaactgtgaaataaccagaaggatgtaactttcaaataagacaattatctttatctacatcctcaataggtatagattaaggagttgagcaacaatattatcatcaaagtaataattaaatttattcatattcccaaaaaaactcaagtgattaataaaaaaacctaccttatctgaaggtggaaggttcctagctttgtattaaatgaatctagttcttgggatttagtgatcttccaaagttctaataggttcccattactagctttctaaacaaggctcttcttaaataaattcctaccccaaagcaaattttgccaagtgaaagaaagactgacccttaggagcatccaaaaatagaatttttttcttcaagtattagacttttattaaattaacagcaagtaaggagttgtgattggtaaaaattctccatgcttataatggataagggatctaaaaccaaggccctctaaaaattttgaattacaaaggtaagattagtttttcaatgaattttagagtaatttccatttatatccactggaacttagccatcaattttgtaaagtccttttttggcaagttaggtgacaaaataatttttcctttttatggtaagatt

SEQ ID NO: 300268 - DNA, 4660 bp, Cannabis indica
agagagagagagagagaggagtaccaaccagcagaggtgggttgaggaggaggacgacggagaagggcttgacgaagaagggtccatcggagagaggaagggttgttgttgtttgccatgggtttgggtttgaagatctctctccgacttggtttggctgatctgagagagagaccatcgccactttcacaaatcctcaacttctaatttaattttattttcaaataaaataaatcataaattattattaatattaatatttgattatatatatttaataaatcatctaattttattaatagcagttaaaataatattctacaatttaatcggcacatctcttttgttagatacacaattaggattataattagaaaaattagtcaaataatcagtggtagctgattctcggatcgtttgacaaaaaataaaagaaaatcagatgaaaaaacttgtagtatcacaattaatcttattttcagttttatctaccgcttagaagacacaacagtagaaactgttacagcatgttcattaaacctcgtagctcaagcattcaattattatgcaaggtatgtaactgcactactgacaatacattcagtcacagagaacttgctattaccaactcctaattaaaaacgatttgatggcgagtcgtcgaagaaaaaaacagaatcaacaacgaaacaaaacaaaagcatgacatacagacaagactaaaacactcaaacttatgtcacaaagaaaatactaaaacactcaaaaccatgtcacaaaaataagactaatcgcagtagcaaaaatcgaatcgcaatagaaaaaggccctgaccaaatcgcacctatgccaaggtaaggttggtgagcctggctggagaaaaaagttaatagtgtcgtatctttgggagttctacttgcacccaacaaaataataagtacactttaattttttaaaaaaataaagttaaaaatatttttataaattactctaaatattttttaaaaaaataaaattcttttgtgttaattttaattttattttcatatttttttaaatcataaataaaattttttaataaaatttcatataatttgttattttaaatttttattataatatttaaaatataatttattgtttggtagatatatttttaaattttaaaaaatatgaattaaaaagaaatatttaatatttaaaaaaatatatataattaaaatatatattttatataaaataaaaattattataatagagtatatttataaacttttggtgcaaaaaaaaaattatttcattttcttagattctattttctctactatatcaaaaatttaccaatttgaaattaataaaaaaaattaaaataaaatgaaaattatacattggttacaatacgagaacttctacaaaagagagaaagaagttcggatgcattattatattcaactattctaaaaaaacatattattcagttaactaatttaatagattcatattatatatttcaagattttcttgttgtgttgtttttataaaaattaaacgaaaaagaataatttttttctaaaaacagtactttatctaaatttcaaattaataacaaacaactaagagaagcatccttaacacaaacgaagtcaaaggtacaaaatacagaacccaaaacaagatatccctaacttaatacaagtaaacaaacgatgaaacacaaattataggccaaactaaaaactgcgtaacaaactccaaatccacatgtcattacacaatgccatatagttccctaaactttggctcagcaagagcagagcacagccattcaacctctaacatatttcctttctgggctaccataaggtgacctcgaccggtccctccttgatggtcttcccccgtaaggaggaggagaagaatgccggggagaataatactcacgaccccctcgatatggtgagcgtcttggagacctaccacgatatccatagtcatcacgacccccacctccacctccacctcgatacctaccgcgatcaccaccacgatccctgtcacggtcactaccaccaccaccgccaccacggtaacctgttcaccaataaaaattaagataacaaaactccaatgtagtaggttgatcaattgttgataatgaaatagaatattgaacttaccgtgatctctggtgcttttcaacccgagatagtggccaggcgttggagtccttgcacgtttccttcgagactgaaattcatgaaagaaaaacttgatgagctgaaaactcacaagtggattaaataaaaggaaccgagacaaccatggtacatgcagactatgtcttaggagatcgatcattaactctaggaaaaattctataaatcattaaaaaaaaatggggctaactggcatcgaacacaagtaaaaacattcaggcacatattactagtgaccatgaaatgaattccaggtacaagataccataaagcctgattagaaagttgttgctaatgtccgttgattagttgagttgaaagttgaaagttgaaagtgaaatgctgaggttgtatagtgttgttggacaatatagttgatatgtttagttgatcacacgcattggtaaagctgtttaagcttggcatttgatcaaagctgtttcactaaagttgatatggatgaactcatcatctttgattgctgccaacatagctgacgcaatgtattctgaatataaccagaaaaccttcaagtcaagaagaatgaaaactactcgatatgttggaacccctttagccactaaaggtggaaaatcacattaccctttctaccgttatgtatcggccttctagaactgattgattgagatacttgatgcaccgctcagcatcgtcgacgttgtccattgtaacaaaggcaaaaccacgggaaacacgtgaccgaggctccaccactagaaaacatgaagcaacctgaaaatgaagcataagttaaagaatgtcaaaccgagatcattatcgagtgtataattaagaaaaaaatgccttaaaaaaattgaagacataaaaaaaccaacctttccttctttggagaagtggtcttcgagctccctttctgtaacccttgttgaaagaccagtcacatatagtgtatttccaggatttatagcttcaggtctgacacatgaagataaacacaaaaacttgtcaaacacaataaagttgtacaagaccctcttagtatcaagaatacaaagtactaaaatttacctgccaggacttctggaccttgatctgcggcgtaaggcaccaaaaattcagcatcatgagaaaacatgacacaaaacattactacaatatttacatcatcccattcatgacagagacataaatagtaaaaataatgtactaaaacccacctgccacggcttcgagattgggatacaggcctcggccttgaccaggatcgagatcttgatctagatacaggccttgaccaagacctagaccttgatctggacctggatggagctctccgtggtggggaaggagaaggtgagatcctgctttatcaaaagagtagaagatataagatacaaaattaagctgaaaagataaaatcaagataaataatcgtttccaaaaactgatttgggctaaaactaagaagaatgaaaaaataatttgctaaaagaaaactcattttctccaaattcaagtttcatttctcttctaaagttcagaattttccttagttcatatacataatctttaaagaaacagcgacaagtatcaaactttaaattccaagcttcaaactttcaattgttcaaaacaaaagaacctgtttttcatattgcccactttaataaaatgcatgatctaatactctacagcacaccaaattgaacccaacataaaagggaaaaaaacaataaacggcatgaaattccaaaaattgatgaaatttaaaataaaactggttgaaatattaccttttgcgaggaggagagtcagcctgaaaaaaaaaaaaacaaaacaaagatcgcattgaataaataagatcaagcttaagccctgattaacattataagaaagaaaaacaaaagagtgaagagtagaagaacaaagaaagattcgatcttaccatgttccgaaaggggagaatcagaaatggaagaattagggttttggatgaaagaagcttcgaaagagtaaacgaagaagttttcgaaagcggaattgggtatttatatggtcagacattagctatgtcgtttcccaaaaatagatttaaacgacagttaaaataatgtcgtttattttataaagatgtacagaacggcatgtagttttaaaatggatatctggtttatttgtttgtttgttgtttgtttatctggtttaggggtgttcatctaatccaattcgtacttttttggtcaaacaacatccaatccgcacaaagtgcggatttcatattttggatccaatccgatctacataacagtttaaatccaatcaaatccaatccgcaatagagcggattggatcggttattttagatcggttattttttaaatgataaattatttaatatattatagaaaaaaattaaaaaaagaactattgtttcttaaatctccaataataatctatttcca

SEQ ID NO: 300269 - DNA, 3151 bp, Cannabis indica
ttcctcaattatacataattatctagttagggttttgctaatccatttcttaattccgggtattacacatttccaaaccgaaattcaacattgaagctcaatcaaagccttcagtgtcgcgacttggcttttcctttctaactcctttagctgctccaacattcaatgttggttgaggtatacattttcctccttgagctggctatcttctgtttggatcctataaaagcttctttatagtagctatggattgcttcctcttccactttatcaaccattttctcagtctttttgaccttctcgtggcggttatcatggtaccaatcctggtggtcgaggttcattcaatcctaaaccttagtgccaattatgcaacaaacaaggccacagtcaacaagtgtttctacagatttgaaaaaaaaaattactggccctgagtctttctaatattcactagtggttttaccaatgttgctgagattcagatgatgcttgctactcttgagatagtaactaatttgagttggtaccctgactctagtgccactcaccatctcactcctgatgtgaaaaatctgaccactcctcaagattttcaaggttaagaccatatatacatgggcaatggctcatgttttcatattaaacatactggatcatctactcatatttccccatttacttttcccaaactctttaccttaataatcgttttcatgtgtgttatcccgatttttacccacctgatgtggcagtgcttacgtagacaaaattagtgtcacgtggcagtacaactcaccaacaagaagtccaagtcagtaccttagtagatggggaccctgacactcaaacgggcatcaaatggaagaccaacttccttacagaagctagccagcctttagacagcaccatggctggctagcctgctccctgcatgcgtcaagccaaccaagagaaggcatgtagggtttcctgtgtaattacacacatggactgcatgattgggctgcgaattgggtcgtaaaagtctaatagaatagctaaataatatctatgttcaagggaattttggtctattgtaattaactaattaaatatacaaatatctagggtttcaagttgtaaattagggtttaagcttcctatataaaggccttaactataacctagaaaacctaagtgagaactaagtccaatctaagtcatttagcctgatacgagcctccaagctctaaacctaagtttgataattctcttcctcactctctttcacacacccatacaagctatctctacacttgagatttgccaaccttgatttctactttgtatccttaagggtgctatatcagatcccacctatagtgatctggataatattaaccctcggtatcaatacaactaaaaggggagtaggtcattacccgctatctaagggggtcgaatctttataacaattctgtgtgtactttaatttcttattataattgtgtaagacgtggtaaatatcagatctatatgaacctgccatcagttgatcaattttttgggttaacagttttgtgctttcattaagagcagtggatattgtatctgatcaaatgccatggttaacacgagaagaaccccagttgcaccatctgcatctttggatctccctcaagacccacagattacagatcagaatgctcaggttccaaccacaattggagttccttgaacactacagatgtggtgaatcctgtcaccacaacaggcgccacaagcctggccacaacagcaggccaaactgatacaagcatcttagtggatccaaatagtaggcccttgcctccaagggaggaccttccattggcgcctcccactgaaggaaggactcatgggcgacagctgccaagaagaacaactagatctcgtcttcagtattacgctggagagacaggactaggagttagtgagcctacaattagcgagctctgtgtagacttgggagaagatctcgagtcagccaaacttagagaagttgtagtccaagccagccaaactaaagaaccacatgttgctgattgcgatgcattcacttagcagagacacgaattcctgagatggatgcacgaccaggagtacgtcttttgatctcaccatgcagagttggattgtcgcaacagagaggccatcgatctgataaggcggttcagctagagaatcgatggaagaggccaggatctcatcagagatccacttcaaggaagactcgttgatatatcaggaagggtctatcgacaagttgaccaacctggttccttaaagactaggacagatcttcccatgctagagggaggacagatcttgcctcaaagatctaaaggtgagaacatccagatcatggtcactaatagcatggggggtcagccaaggatctatagctcaacatcatcccccattatttagcctttggccagccaaccatctgtggagtttccttagccgaccagaggacaacactccctccctaaggggagcgaggcacctagaggtcaatattcaaccaacaaggactgcgagtaggtgaaaacaccaaaaaaggtgatttgagaagtgaaactaatcactgcagaaacttagatccactaaactctaaaaactagtgcaatctacctcctatcaatgcacaactgacatcactcatttaaggagttgtgggtagccaaatcttgccctttacatgtcttgtcgaccatggaggagtcacgagcagccagaccctgcccttcgtaggtttggccggccatgaaggaattattgatgggtattctgccctaaataaaacccatttcagtataattagatttactaattaataaaagatcaaaaattattttacattgcatggttcacatgatttatttcatgattattcttaatgtataaattctattaagtccagaacatatataaatatatatatatttgttcatgattatagtatcgtcagcatagtggaatataatcatgattatatattcaaaagtttaattcccatgatttgtcagttcactagatttagactgacatgataatcggcgataaggtatacttacaccttggataagtgttatgtcatttcttgggcattggtaaagtttaccag

SEQ ID NO: 300270 - DNA, 4305 bp, Cannabis indica
attttattatttaaattatttttaattaaatttattatttacaccaataaaccttcaacatgtggccttcttgtcagcacttaataaattcgttaattagtgaccaacagacttatacaaagcgtgaccttggggactattaccgctaatttttaaaattggagactaatttgcgtcagtcttaagtttttagggacttttgccgcaattatccctagtatacctacatgattgatctatagtaataatctcaattttgatagtgcaatactatcagctaagttttcctctctagctggactagacttgctcattaaaggctttagctaactaaaaaagtaacattttatgcttcaactaagctttacacctatagatgcttagtctattaactattaatcactaataatatggactaacacaatacaaaattatctaatcaactcatattttattaaaatcaataaaaaaataatgtaaatccaaataaaatatttaacaaagagctttaggaatttgaatgatgatcttagattaagtaggaatcgcaaaagtaactctcctaatcaaaacctccttccctcaaacgataatagtaataatatgttaaattttcataatattaaggtgtatatataaatttttggagggtaattttttttaatgtaattttagccgaagtcaagttactagacatagacaatggataattttcacaagacatatttatttttatttaaaaaatgataattctttcagcaaaatttgaaaaccaccacctctcaacggtcatataatccgcgtcaataataataaattatccccatttgctcttatcgcttaatcacagccgtcaattccagattgacaatgaatcaagaaaaagtcattcagtccgacggcccataatcatctcgggaaaactagtgaaatgagtgtagaggaacagaaccaaacttggtcttcttcactctattttttcagcgagaaagccgaagagccaaaggtaaggcttaagcagttggaaatggaacagaacccttttaagccatttgtgcaatacaatcatggattggatatggccaactccactctaggataagttgaatggttcatgagctaggtttgaagattccgagtatcgaagtaaagattacagaagataagaaatggcttttatgatatacaatgatgatcattgggcttttctggtatgaatcttggattgattcttccataattttcatttttccagatttatttcaaagataggttgttgtcaaaagcttcattttactttcatttggttttggattttctaatctatacgcctattctgtatttcatttgattttgttggtttgcttgactggttgaattagagattttgactgtttgtcctttctttatatgcttaatcgtatattatatttggttgaagttctttaatctctttagatagacgttgcacaggttagtgctcgcattgccatattttcttgccgaccaaacaaacaatatctccaaaatcaaggatatttcattttaaattttgcttttattgcactgttgaagccatattttctttttaagaaatatttttgggctacaaaaactattttcatctaaatgttcttttgctgattgatacaggaagacattgaggcacctatgtgggttgatctcaatttggaatctaagtccaatacccaaatcatgtgagtttcttatgcattcagtttcaatgctcttttttttctcccacaaactttcgtagtgcatttggtaccaaccttatctttcttgtttgcaaaaaaaaaaaaaaaaacccttaatctttcttgttgtgatgaaaatgcagcgacgataagtggtttaacacaagtcatcagtaagaatccttttcacttttacctgagctgtttttcttaattatcctcgaacccatttgttaatggaacaataatgctgatcttcaagtaaatttatgttactattaggttccaccaatgctcatctctccagttaaagtcagccttttcccaatcaggggaagagattactacacgcctagatgtagaccaagctagactatcttcaccaaaccttccaaattctgtgtcaaaatcaagaggaaaacaatataagagcaaaaaatggataggagagaatcaggattttgcatttgataagtcacatccggtcaagaatctgagtaggaaattgtcatgttctggagccaaaataagacccaaagaaagctttatacattcgaaagaaacatccacttcaaaatcaagtgtagtctgtcaaagcagttcaagttgcaaggctgtatctaattactctaggtctctatccacatgtggggatcctggaagctgttcaagttctgaggcaaacaaagcagttgaaagcaatccaacaagcaccattacatctgagagtggtcagccacaacagatcaaaattgtggatgtgtcaagccaagcatttggtcacacacgtgatcttttgtctgttatgaagattagtcttagaaagagtcgtgttatgagacaagcatcaagagtagagattaacaatgacgtaaagccatcaaagggacgtaattctacatccagcaagtctagtgttggatcatcctcgaaccccagatacaatgtcaagatctcaacatctacaacgacacagcccaaagaaagaaccccagatagcagaaatgctgggagggtggctaatgtagtcaagagtaaagtgaaatcttcaggcatagtgaacgcatctaccaataaggttgaagaaggaacatctaataacagaagggttggaggtcaacctaatattggaaagtcaatccgtcaggaaggtgcaaaacaaaaggtaacaaaccacaaaccattgtaaatgctgtttatttattggatcatttggtaggctaaactagttcaaaagcctataattgctgtcttggacgaacaagagtgatataatatgaataactatgattcttgcaggttccatttcgacctgctggtgctaaagtcttagtacctgctagagttaatgagtggaattctgtccttgctgcttcaaaacccaagaagaaaacagcacctgctggaactaagaagttggctggtgatggaaaagaaaatgtgtccgttaaaacatctgcaagtcaaaagtccaagagcaaaggtgttgcaagtggagtcatgttgagtagaggtcagattgggacaaaacagaatatttcaataaagaatggtgtagcaggaatggtttcctcaaaggtatggttcaaatgtgcctatttattgttagggaactctataacaatttgtgggtgatgactaatttttcaacaaacattaatgcttttcttcttgtttgttttctaatcgtgctcctattgattttttttaaaaaaattatgctactattgaagagatttaattctaaatagtcttgtttaacaactggttttgatgaacttttcttgtgcacagggaaaaggcaaggatcgagacaacttggaaaagcccaagactttgattcataggttccactttcgatagaaaggatattaatgatagcaataatagcgcactacagcctcccgtgggttggggcatgtacagcataattctttaacatagttttttaaactttggaggaagcatggactgaagcagcaaatttttgcccttagaccaagattttgtttttgtgggcaacttttaaattgtgatgatatttctctgacccagagaacttacaaaagcttgcgagtcatggcctcgatttattattttgtttcgggaaagttctaatattagaaatattggattttctcttgtgtatatattagatcttggtttctactctctcattgagcaattatctttttaagaaaactcgtaatatagcttctactttctccactcggcctgaatttgtatgccaaaacaatatttgcattcttgattgtttgttgaatgaaagctttcaaatttaggttttttcttgtttttttttacaattacaatgtgtatcattaataggtaaatcacacaaagtccattattgtaagagttgaaaagaaagaaagaaaatgaagaaacagagagagaatgagagaaaaagctgaaggaggaagatgagctgatattctatttatagtgtacactgtaacattaaacaatcaagaaacatgacaaaaagaagtaacaaatagttgtaatagaaaataacagacacctaaacaataactaactctaacaccccccctcaagttacact

SEQ ID NO: 300271 - DNA, 4073 bp, Cannabis indica
aaaaaaaataagaaatgcttcatttgcaggtgttataaatcttagaatcagactaatcaatattttgttctagctatagtttgcatattaatagttgagatcattaaatgaaacaaagttgtgatttaaagctaccagtttacatggatgaaattttctgttatatgttgctagccatgaagtcagtgttacatccagtaatatctcaaacgaaacgattaagccccatttgggcagtttcttaaaaagccaagggactaattggtttgagatttttcttttaatttttttttaaaggggaatgcagcagaatatggaattttatccatttctttcttcttttcttctgtgctaggacactgtttttcagacacttgatattggcttgccataggttgtttagtaggtttggaaccaaccatagagaatttctctataacctttctaatgtagtttctttgaatgagagttagctttccttccttcccatttcttttgatgtccattattataattcttttagcatttctcaagtctttcatatcaaattcagtttcaaggattattctcttcaaaatttcaaccttagttttctctttattaatcagtaacatgacatcaacatacaacaaaaggtttttcgctttctcaattttgtaccctctgaagtactacaagcagtaattatgaaagcttctcctgaatccttgtttgatcatgaagttgtcaaatcttttgttctattgcctaggagattctttcaatccatacaaggatttttgcagtttgcataccatttcaataactaatttttcttcataacctttaggttgttttatgaatatcttctcttccaattcaccatgcgaaaatgttgttttaacatccattttttcaagtttcaggtcatattgaacatcaatggacaacattacccttattgccttacatttgacaacaaggtaaaatatctcattaaaatgcactccctctctttgagtgaatcccttagccactaacctaactttatacctaatctgctcttcatcttctttgtgctcgaatatccatttatttgatacaatggattttccttcaggtcttggaactataatctaagttctgttctttctcaaagatgacatctcctcatctattgtagtaccccattttcttgcatcaggaccttttatagcttattcatatgagtcaagttctttcttggaaatctctattgcagagtgaaaggcataggcaatgatgtcatcttaaatattcaaactcaacttgttgattggtttggattgtcttctttgtttgtgttgagttagttgataacatccaagatctggttgctcatgatgctacttcttctgctatgtattctggatcaggttccacctaagttggatggtctctttgttccacttgaacagtgtgatctaactcccttgtatcttatacatgctccaccttaacattagattggttttggttctcctttcctacttctaaaccaatttctttccctttgctacctgcattctagttagtaatacaagaaaaatctatttcattgaatatcacatccctactgattattatcttgatccattcctagatctacctcgtagtttgtagctctccaccccaggtggatatcctagaaaaatatacttgtttgatctaggttcaagcttacctatgttttgatgcacataagcagtgcatctaaaagttctgagatgagataggtttggaattttacgtcaccacatttcctcaggtgtcttaaagtaaattgcactaaagggacttctatttatcaaatatgcaattgtcatcacaacctctccccataatccctttggcaatcttgaactcatcatcatacatcttttttaagagtgtcatgttcatccttttagcaatcccattctattgagggccactcttaactgttctatgccagttaataccttaatctgcataaaactggttggatctctcattataaaattccaaaccattatcagttttgagatttttaattctcttccctattatgttttttgttacattcttccaggttttaaaggtaataaaatcatcatttttgtgtttcaaaatatgcacccaaactttcttaaagtagtcatctacaatggacagaaagtaagagcttccaccaaaattttgtaccttcttaggtccccacaagttgcaagtatttaagtatttgttttattcttaccaaatacattttgcttgtttagaacatgcaaacctttcttaccgacgtgtcgaagtctggtatgtcatagcacaatcttgtcttctgttgttccagttgcaacatatgcttatccagtcatagtttctcctttaaaatagtatagctctcattgtttctctcctttcagcatgaccagtgcttcctttgtgtatttttcattttctattgcaacatttgaattcataacctacatcatcaaactgacttagtgaaatcaaatttatagaaaaagttggaacatacctgatgtctttgatctctctaactgtgccaccattcagcctaaatttcacatccccaattctttctatggcacaggtctgaccattttcaactactattttcctgttcttttggattttcatgtttctcatccaattcttgttgtttgtcatgtgaaaggttcatccaaagtctataatccactcattcttgatggtcatggcatttcttagagttgattccactataagaacttaaccatcctcaatgtaattttcattgtaatttaaagatgttttaggatcttgatcattctaatcattatttcttggacccttgccttttcctctggtgagttcatatcattacttcctgatgtggccaatcttaccataatgatagcacttattgttggtattgggtcctcttgattgacaccttcctcttcctttagcactgtaacttcttccctttcctttgtgatgatgatttccttgatgttgttatcttcctctagaataatatgcctctaaattattcttttgaagcttagcagtttgcttgatagacagttcctttgactatatgacacctattatttctttaagcactagggtgtccttagagtagatgatagtgtccttgagttgttcatattgattcggcaatgaatttaatatataaatttccttgcttcttcctcaattttcacctccaagttgtttaaattaaaaaccagcttataaaactcatttaggttatcatctaaagacttacccttacccatcttgaatccatagaactctgtttcaggtacactctactaggcaggctcttgattgtgattatctattccaatctagaccacattgtaactattgcggtctcttttaccatattcctcaatacctcatcttcaagacagagaattatggtattcctagccttcttgagtgtgttgtcccaatctgtttgttccacacttgctggtttgattacatcctttgataatgcttcatctaatccgtgattcccaatataagctctcatcttttctctctacaaatagaagtccttcttcccactaaacttttctatgtccaccttgacaaaagtcatcttctcgtttaaggcaatgctttccacaattcagttcttagattcttaatgaatcttggttcttaatctacacatttaagattaacttgctctaacctgtgctctgataccactgttaggatctcagtcccaacaccaatctcaatatcaatttgcacacattaaaaaaacacacactccttcacaaatttatcaagaacatgcatcaaacatgtaagaaacatgaagcataaactggacacaaaaaaattaaagaggtttgaacttccccaaataactttgggagcctattacccttgcctgaactccattgatcactgagttcagttcatagccattgatctttgatgaattacagagtgagtacaattgttaggctaaaattagtctaagattcgggtcatatttcagttagttttcactctttgtttctagt

SEQ ID NO: 300272 - DNA, 2115 bp, Cannabis indica
taaaataattccaacaaaaacaagtttcattaaccccaaaaagcccaaccttgaccctctttctctatctatcggtttcactctcgccagagtcgaagctgtccatgaaacaagttgttgttgatatagtgtggtgtattcaagggggttctcatattcttcggttatcagagtttcctcatattctctatccctaactatttcatctcctttcagttggctatcatattctagcttgatgaaaagatgaggttggagaagtgttggctctgtttccactatatatccagggcacggtattcagtatgtttgtaatgatccaaaggtacttcaatctatttttttcttaatcctttttctttcttgtgtaattatatgtaccttttgctgtttttgttttttcttgatttgttagttaaagtattactgtttttttgcaatgtattgatttggagcacctgcatacttttctaggaagaaaaagatgaaaactaagagtaaaggaaaatgattctatttatttgaatgaatgaatacaatagagagtgagtgagattttatatgtataagcttcactagagtagaaatcagttacaacacaactaattagctactcagcagttcattgaataacaactaactccatctcactatagcaaaactataactaacttcacctaactatagcacacttaatactccccctcaatatgtggaatgaatattttgtgactccatcttgtttatgagtatttgaaattgagtgggaaataatggttttgtcaataaatcagcaacttattctttagttgaaacatgaactgttttgatcactctttcttgaattttttccccttacaatgtaacagtctatttcaatatgtttagtcctttcatgatagactggattggctgcgatatgttatgcgtcataatgaaaaattgctggcccttttaattgacttccagctccttcaagattgaacacatccaaacaatcttgcaagtagtatttgccattgctcggtattcaatttctgcaaaagatcttgacatcgcatgttattttttgcttttccaagagactatggactctccaagaaagattccaataccctgtagtagatctcctagtgtttggacaagctgcccaattcgagtctgtgtaggcttcaagctttatttcaaacttcgatgataggaaaatcccttgtctaggagtacctttaacatactgcaaaattctctctactgttgtcatatggatggccttaggagttacaaggaattgacttaatttgtttactacataagacaagtctgtgttattatgattagatattggagctttccaattatctttctatacattgttggatttgccaatcgatcatctttggtgtcttggctgagtgttaagttagcctccatatgggagtggtgactagttttgatccaaggtgtctaagatcttcaagcaatcgaaaagcataatgcctttgtgaaacaaaaattcatttggctgatcttgctatctccaaaccaaggaaatactttaagtcaccaaggttctttagtttgaaattgttgttcaatctcactttcaaaacttccaactgaggcaaatcattagaagctaggataacgtcatctacatacactagcaatatgatgaaaccatttcaaaaatgctttataaaatgagagtaccagtagttgagtgatgaaagccctcttcaattaaagcattgaattttttttcaaactattgactagaagcttatttcaagccatataaacacttgtttaacttgcaaacaacattagatggcaactcccccttaagactatacccaggagatagagtcataaagacatcctcatgtaaatcaccatgaataaaggcattgtttacatcaagctggtgtaaaaaccaaccattaatggctactaaggctaagacaagcttgacagtagccaattttgtgactggttgttgtgataaatccaacacacaagtatatgttgtcgggttttgtgccctaaataaaacccatttcagtataatcaaatttactaataaagatcataaataacatttaatgttgcatggtt

SEQ ID NO: 300273 - DNA, 4903 bp, Cannabis indica
attcataaaaaaaaaactaacatactaaaaaatgcaaatataaactacaaaatataattagaattatataaaaaaaagtactaaacgggttccaatcacgacgaagagtatcatctccatccctgctccatttaatattcagagataaaaaataatttttgttcccgtcctattcccaatttaaacgcagaattctcgtctcattaaggacatgcccagcaaacctattcccatgcataaaaacaatgcatccctagttgtactacacaaatttcctatagcatatactagtggttatgctttgggttttcactttttacatgtgacacctatatagctcatcagtgttattatgtctaatatatatgatatccccacactagacaaaataaatatataaataatcaagcctaaattattttctcttattaggctcgatcattgacttgcacctaataataagatacacttacccacaaactatatatatatttatatatataatggagtaattatagtgatgtggacaaagacataccaaagatggatgaaggccataataaagccatttcttttgggtaattatttgagtgaggaccaattaatttatctcatctctctcgtcaacgtagtaacgtggtgagcccgtaaagttttcttttgtgtacctatataattttttgttggaaaattctttgttagggcatatgttgttttggctttactagtataaaagtgtttttttttattatttaaaggtatatattgtaatgctttaagatttttcacaaatttaaaaaaattataaataattaatagtgccgaaaatagattgtagtataatttatttaaatgtaaaagatagctcgttctcatagaaagttagatatcatccgaaaaggtgttcttgaaagtctaatttatctattcagaaaatatctcgttgaaagatagatatctttcagaaaggagttttcgtaagtttatctcgtccactccaaaaggagtcttaaggaaagctatccgaaaatgagttttggatatctagttgttccttcttagatgggaattctgaatagtcgactccaactgttacttttcccatccgagaagtcccttcaaacgtacgatttggtctttcttccgagaagtgtacatctcatcaagaagtgctttaacttaaggtggcgtggagatattgttacgaggagcttgttaagtttgttaagccgtaactaacttaacaaattagcatttgcagctaccgactttgggatctatattccttatctataaataccaccaacacttatcatttatagagtgagatcaacatgagatgagtttcgagaggtgatttcgaagagagagattgagagttacagataaaagagagagactggatttgaatttgtaggaagaattttctatagatgaagaagattcttagataagaatgtaagagataaatactttgacagaagccaacagagaatcgatctcaactataatctaccttgttctttctcaatcaataaagaggattttggtagtgttctataactgaagtagagccatagatcacattgatctataggacttgaacgagtacatattttggtgttgattaataattgctttattgatttatcatttctagttttattgcttttttcatccttgtgtttatctcaaattattatttgtgaattgttaatcctgtcattgctaattgtttgctgattaagttttaactgatttgattctgcacattaattattattttcccacaaatcagagattggtaatcgatcaagaatgtagaatcaagattcaatccgctacaatttcttgaagaaacctttattaattgtctgacaatggcgagatttgaattgaagaaatttgatggaacaggagactccgcgctatggccgagagagtttgaaaaggatcctaatacaccagaaggtctccaaagttcttggagatgagaaattattggctgggaagaaaccagacaagagagctgaaatggaggagatgacttattacacgatcatgtacctgtccagcaatgtgaggaaaaagcttgttgaagaaaagacggctaaagggattttgaacaagcttgaagagttctatacatgacgccatcaattgctagcaagattaatttgtaagaaaggctatatagtttttgaatgacttttttgctttctttagatgataatattgacaagttttataaaattattgtagcgttggctaatataaatcataaggttgatgaagaaagccagaccatcattttgttaagattgcccccaattgcgtatcaagaagtcaagcatgccatcaagtatggtaaagatgtgattacattggaggatgttcttgccacacttaagtccaaggattttgaattgcaattagaaaatgaatccaagaaggaagaagtgtatttggtaagagggagatcatccatgaaagtaagttcaaagagtaaacatcatcacactcaatcaagatcgaagtctagagagaagaaactcgaaagtgttacttttatggaaggtatagacacttgcaaagattttgcaagaagtacaagaagcagcaaggcttcaacaaatctcacaatataaataggaaggacagcaggcatcgtcaccacaagaaggattaagcaacagtcgctgaagatagggatgactgcttaaaaaatggataattacttttaaacttgcaatcctcaatgagcagggagtaaattcttgactccggatgcactaatcacatgtattcgagtcaagaatcattttttgattataaatcagttgatggaggtaaatttttaatgggaaatgatcattcatgaaaggtcattagaaattgaaaggttgccatcaaatagtatgatggtggaatcaaagtgctgacgtaaagacattctagagctgagacgcaatctcatatccctaagtgcgcttcaagatgaaggttacagatacaagtccatgcatggaagcttgaggatcaccaaaggtgcactgataataatgaaaggtgaaaagattaatggtttatatgttctccaaggaaaaattgttccagccagagaagcaagtttgataaaaaggatagaattagatatgcatttatggcatcacagactaggtcatatcattgaacaaggtctcaaagaactacacaaacaaggtataattaaaaatttaaattcttgtgtcttaccattttatgaagcttgcgttttagaaaaacaacataagctgaaattcacacctgtaagggatacaacaaagaagatattcgaatatgtgcatgttgatctttggggaccatacaaagttcctactcactctagtaagcaatatttcctttctatagttgatgattagagtaggtgtatttgaacctatttactagtaactaagaatgaatgcctagaacagtttagaacttggaaaacgtaggtggaaaaccaaaatgatcaaaaagttaagaaccttaggactgacaatggattaaagtttattaactctgaatttgataagttgtgtcaagaatatgggattactaggcatagaaccatagtgaagacctcgaagtaaaatagtgttgctaaaaggatgaactgaaccatattgaacaaagttaggggtttgttgtttagttttggatttgagaaactattttggagggaagcattagctactgcaacctaccttataaataaaatcttaaatagagttataggcttgaaaaccccttatgagatgtggtacaacagaaccccaaacctaatgcatttaagaacctttgggtgtacatcatatgtacaccaatctattgacaaattagaacctagatcagttaaagaaactttcctaggttatgccttaggtaccaagggttagagaatgcatttccaaaaggggtagagttatagagttaaggttgcatgtttctgtgtgatcagggaaattgagaaacaagaacactacatgcatgtaaatagagtacagaacaaaacatcgagaagagggtttacaattagaagctattattgaaccaaaagatagtgcgcagacagaagctgatgttgagctggaagataatgaagatcaaatagaggttctaaaaggattcaaacaagtaaatctagaaggttattagttggtgcgtgatagaagcagaagagagattcaccctctggaaaaattttattgaggcagatctgattgcgtttacactgacagtagtacaaccaactaaaattgtagagcccaaaagctacaaagaggaaatttcatgtggaaacaaaatggccctaggccatggatgaggagatgtattcactttagaagctagagaacaaaaagattgtggagtgcaaatatatcctcaaggtgaaaaggggaataaatgagaatgaacatgtatagttcaaagctaggttagtggctaaggtctttactcaggtggaaggaattgactacagtgaaatctggtaaagtaaaatatgatacaattgatgttgtctttagcaactcaaatggagtttcaagttaaacaagatgttaaaactatctttctaaatggattcttggatgaagagatatacatgaagcaaccacttcggttttaggtggaagagaaaggagtttaattagtttgcaagctcaacatggatgtatatagtttgaaacagtccctaagataatggaataaaatatttgatatttatatacaataaattgggttcatacaatctgcatatgatcactgtttatatttcacactacaacatttaacactaatagcggcggacctctccgaccgctattagtctcatttctggccgctaaagggtaatagc

SEQ ID NO: 300274 - DNA, 2440 bp, Cannabis indica
cttgtcagtagatctaagatcctcgtaaaataattccaacacttattgcaaacaaaaagaatctagaatgtatgggtgacctccgcccaattgctctatgtaatgttgtctataagattatttcaaaagtcatggctaatagactcaaggtgcttttgaatggaattatttttgagactcagagcgcatttgtcctaggtagactgatcacaattaatattttggtgtcttttaagattatgcactacctcaaaagaaagaacaaaggaaaagtgggtcaaatggcattgaaacttgacatgagaaaggcttacgatcgtgttgaatggctctttttggaggctttgcttccaaaaatgagttttcatactagatgattacagttgatcatggctttagttgttttcgtttgatactggatcactttggttgggcactttctgtggcctataacttcgtctcgtggaatacaacaaggagatcctttgtccccatacctctttatcctctgtgcggaaggccttccaacatttatttgtatgtatgaaactagaggttggataaaacgatgtcaagtggcctgaggggctccttcaacatctcacatgttctttgccgatgaaagctacctatattgttgggccctagaagcagaacctgaaagaatcatggctcttctggtgagttttgaacaagcctctggtcaaaaatttaatcgtcaaaagtcttccatattttttgcaaaaatgctcctttggatattcaggagagagtgtgatctattctgggaatgattgaggctggtgatgatggcttttatttagggctgccaaatatcatgaagcataataaaaatgtggtgttgggtttcctcaaagacaagatgagaaaaaaatttgagagttgggatagtaaattcttatctcgagcaggttaggaagttattttaaaatctgttgctcaatctctccctaattacactatgagcgtctttttaatccccaagggcatttgtgaggaacttgagaggatgatgtgtaagttttggtggaagtctaatcctaagcaaggtactggtatacgctagatgaattgggaccgtatgtttgttgctaaggatcaaggtggaatgggatttcgtcatttgtatgattttaatattgcactccttggaaaacaagcttggagatttcatactcataaagattctcttgttagtaagttgttcaaagctagatactactctcgtggctcttttattgaagctgaattgggtagtaatcctagctatatttggagaagtattctcaaagcaaaagatgtgattatcaaaagtgggccatctgcttgttggatcagtgagtctccctgacattgataacccccatgttacatcttcccatccaagcttaagtgatcaaaaagttagttgtttaatggcggtggatgataaatgttgggatattgaggtcattcagattttttcaacagtagggacagagacatgatccttaatatccccatttcctcttcaaattcgattgataattggtattgggagcaaggaaactttaggcaattattctgtcaaattggcctataatttaatccaagaactaaagattactcttgcttcatctaataactctaatttttggagagagttgtggaacttatagatccatatgaaggttaaagacatgatttggagagccttgtcaacctatttactaactcgggtgtaacttattcaaagacatctcaagatttctccctcatgccccaaatgtaaccgaggggttgaattcaatgctcatttccttgtttcctgtagctttactgctgcctacaggagtgttgcagggttgtatggtgggagcattggagattcttcttttgatcactggttccaacaccagtttcagcattggagcagggaagacaaaaaactgggtgccatgttgtgttgggcaatttggcaagatagaaacaacaaggtttgaaatggaaaaaatagtttagttaagaatgttgttgccttcgcaaattgtgatcttgaacaatggttgtttgcttaagaaaatacttttacaccctattctttctcgattcaagtaggggaagggatgagcaataatgtgttccaataatggataattacaagatcaatggggatgtggcaacattcgcggacaaaaacaaacttgggtatggttgggtgctttgtgatgatagaggccatgttcttcaagcttagactggttcttggcttggttgtgttgatctagggcttgctaagactctaggagtgaaggaggttcttagtgttgggttttatgccctaaataaaattccatttcaatgtaatccagattattcaatatcaataaagtaatagaagtatttttcattcatttgtgtatgttttggttcactttat

SEQ ID NO: 300275 - DNA, 1924 bp, Cannabis indica
tttagtaagtgtaataagtaacgacatcacaatagtaattttttaagaaacataaataattttttatattttatttagatatgtggaattaatgaatttaaatttgaattgtaatgttttaaaaaaagagtaatattttctattttatagtcatatttaatataacaatagttaaacactttaattaggtactttaagttgcctaacatcagactaatgtgtcacattatgaatagttaacaatttttcatattatttattaaattaaaatatacgggatatataattattagtcatatttacatatttcaggtgctcacgaaccaaacatttacaatgatcattgtgaccctttggtggatgactgttgctgtttttcctattctaaatttgacttacaaatctattaagcaatttgtgaagcgcatgcaaaggtctttgacaagcttacaaccaagctcagagcttcgagttttgacatgttttcactcctcgtacgaggtcactggcatcatcaaccttctagacgcatccaaccctacaagagactctccaatatccgtatttgtcataaaccttattgagaatattggtcgaaccaccgccatgaacattgtccatggtacttgcacggtagtcaacatgggaggagaaggaggaagatacgacaatgatcaacaagcggcttttgatgcctttaagggcttcaacagcgagaaagaaggtctcttcatacagccatcgactgcagtgtcatcatacgcaaccatgcacgagcacatatgcgatttcgctgaggagaatcgtgccaacatcataattctgccatttcatttaaagacgataaaaaatgtagtaggaggaggaactaatgccaataataattcaacaacaaatctcgattttagaaatattaacaaaaaagtactagaaaaatcctcatgctcggttgctatacttgtggaccgtggccacaggcctctcacagatgcaagaactacacaaccaactggccataacttcatgatgttatttttaggtggacatgatgaccgtgaggccttggcttatgcgcaaagaatgtctgggagtcaaaatgtagccctaacagtactgcgttttgtcgctgctaataataacaacaacaacgacgaagacaatagtattgtctataacgaaaaagaaaaaagagatagattgttagacgagcaatacttcgaagagtttcgacacaagacatatgggaatccactagtgaacattacacaagaggttgtgagtagtgtagaggatattgtgaaagctattggaactatgaccgaaaaagagtatgatttgatcatagttggaaaaggatcatcaaaaagaggtactagtaaaggatcactttggaagatgttagaggatcaaacagaaatcgaatggagtgattatcctgaattaggtattttaggagatactttggtttgctctacttttgcccctaatgcatggattcttgtagttcaacaaggtagtggttgtgatattcgtttgaaggaggagcaagtgaataaatgtggtaaaattagccaacaaagtggtcacatgacatggcaaccttccaaggttgaaacaccagaattagcactttttgtgtctcgtaatgtttaattacctaaaatggttttgtagacttgtaacaaattaagaaattgtgtgtaaagatagttataggttttgtgtactaattaattataggtttgtgtatttttttatagtaagatattgaaagtaaagtataaatttgatttttgaattattcgttcatatttatataagatataggatgtaatatgctaaaaaatggttgtatctatcgatgcatccttttcttgttttcgatatctgaatagctataattttattttttttatatgattat

SEQ ID NO: 300276 - DNA, 2262 bp, Cannabis indica
tgtcatgataattttgctattcttttacactatatgctgagaaaacggtggtaaagaattaatatgagtaatagatggtgacataggaattgtagctagctctagcaggtatatttcgatttgagagcattgttcatatgatagataatgaagataatgatgcggcagctatatacataaatcccaataaataagcaatactatatgaacatctcaaaagcaatgctattctcctagccatatatagtgggtattttggtggagagagtactaattaaatcagccaaaatatagatcacatcacacatgctactactctggtataggttaataattcactcatataaaagggtaaggcaaagctaacagataaatttttatccatatgatatgattacacttaaaacaaatttaaaataaagaattataaattttgttcaaacatccagacatgccatgtgctagttacaagaaaactcctcttttgccaattgtctatatcctactcctatcaaataataagaagaactattggatttaaagacatagaatatataataatatatataccaatatataattttcacccaggccagcttataaaataatataattatatatatgcatatataacaaatccttatcatttacattattattgactaaattatttgtatcaggcacgactttatagggacataatttgttaaaaggagttcaaaaaaaattatatggaatattaaaatgaaaaatatgaatactgttggtaaactatgtttattttatattatttagttgaacacagataaattataataaaaatttacataaaattattaatatattaaattcattttattaacatggaaatatttggaataacccacatttttttaaaaagatttaaaattatcctcttgtaaggtaatctaattagcagagtaataattttcctagacgtaaaataataaaaaccgaaatagatagattatggaagtaattatatagctgtgttaattgctgaaaataatatataaagggataaataattttctgtttattagatagaatattatttgttgttttgatttttgtctcttaataaatagttttggttctacaaatttactgaaataaatgcatcttcttatatattgttcatgatgattccataaataattaatttgtaataaacatgagtactactactctaaaaatctaatgagaccccacatggatcataacaaacacatcatatatatcaatattgattggtttgttgggttgcttaagattctaagagatattccgtaaacaatacaaatgtaaggagagctggcattattgataaattacatttgcagcagtggaaaatgataaagagaacactaataatttcagtgattgaacaagagaattacgctactctccatatcattaaaattctttggcattgattccaaatctaatgtatgtattacttagatcacactatatataaatatgcatattgaactccatcgtagtccatatctacacagaataaaggccaattttaaggtcttacttctagatcatatatgcaaacacctttgttcagcgatctaatcaatatatataccagtacttataactagggtacatattatatagttatatattttatataagagaaatatgtagtgaaccttttaaaatcgtagttatggaacactattatctattttggcatctacatgttggaattataataatggactaataatacaattataggtttaattccataatacacaataattaactatgtgcctaatgttgctaataactataatgggatatagttgacaacttaattatgtgttagagacacatgagagcacccttaatattatagttggcccattaatatatagtacaccataaaagacctcatataagtccaattggttaataaccccttagggttataagggcaatagcatgtatagtatatatatgcgttatgtgtggtaaagggatgagatggttttatgtgatgaaaggtaaaagggttagctccactaagtgctctctctaagatttcttgctcaaggtatcttggtggtgtatactccttgaagacattgaaggataataactctcatggatggtatgggaggtatgtgttttattatctttgatgctctaaataaatactagatctaggagtgttcataaaataactgattcaatccaatacgtactatccaatccaatctg

SEQ ID NO: 300277 - DNA, 1525 bp, Cannabis indica
taaacagttttgtcatagcacttttagatcggattataattaaactttattttgacaaaaaatcaattcagggtcctatttgtactattttagaaaatacatggtccattttatcatttaacaaaacacagggtccaattaataacttttgtaaaacagagggtccaaaatattatttacccgaatataaatagcttaattagtaccacaagtgaatcaaattgaaaagtaagtaatgtcgatcagaaattaagaagtaaaactaattaatagcacaaaatatcgaaaatgacagttcatcacataaatgtttaaggtcaaagtcaaagtaattaactaataccacaagtaaatatgtgacccaacttaatccattcttaataaaaaaaattataactaaaatgagtttcttcttctaaatataaaacattctcgaatgtggtctaattaatcaattcaaaaaatttcacgcaaggcaaatagaaaaagaaaaaaaaagtgttttattaaaaggaggattacgaaaatgaaggcattgtccactaggctcatatttttgagtctcatggtgatggtggtactactagtagtaataatgtcaaaccagatcgaggcatctcgggtagggttcagggatcgggtcaacaacccatgcaagaaacctggtggacctcaccctggttgccattctcgttttcgagttgtcgggaatgtaaggtcaattaatccatataagcgtagacgtaattgtttgaaaagtacaaaatatcgtaacaacccatgaaacagtttcctcttctaattttcttgtgatacgaagaagaaaaaaaaaatcttcagtaaaattgtattcactaatagctaataaataaagattctaagatatgatttattattaaatatttctctacaatttagtatatattactcaataatattttgctatagtgaattgagaaaaatgttttaaaaaatcattagtatttagtggtatacacacaaattggaagtgagaaaaaatatgcaagtatgacccataacatttagatatttattattattatttaattttgcgcaattgatatttaaatatttttattcccattttttatctttatttgtataagttagtttttttggagattgttgaagttgtatctcttaagcaagtatttttgtggttgaagcgtgatttctcatgtgttagtattaacgactaattgtttggtattagtgtaaactgttcgaaatttagatgtattgcaatccacatttagtggtgtcgttgaggattgtaaagagttttatcttcttttagtggtgattttttatttttgtcaaacgatctgctaatcaggttactcatcttgtgattagagcttctcgtttacatgttgaacgtgtttttttgaagtttagtctctcttccaatgttgttgtcattgctcaggctgaattagtctagttaaataaattttttaattaaaataaataaataatatggtaggtactttttttttttttt

SEQ ID NO: 300278 - DNA, 1560 bp, Cannabis indica
aactgttttttattctcacttttaaaaacacaatttcaaaaactgaaaattgaaaacacagccaaacaaatggtctgtaaaactctttcccataccaaatattaacttgatagtcgtaggtgcgtatatttacagtgatggtgtacattagttgggtttacaatatagatgttaaacatgagataagaatggcaagaaaatgattgtgttggcaaaatacaataatgtccttataaaacagctaaagcaaaggttgtaaaagtaaaataagcaggggtgataaagattatattataatacaagataagataagaaattaaaaaaaaaaaggggatattatatatcaaagataataaagaggatgaacccacaacgttaagacaaattaagtaaagaaagtgccatgctcactctgataaatgtttggtccgtgagatcacagtactaccgcccacggatctacatacacgccaacacatcatgtcttcacgggctgcacctacctaattcacacccacacacatctaccctctctctcatatccatgtgtatatatatcgtgtcattcttagtataaatctcaaatctcagcaaccaataagtataggagtgagcacgaagattacttaaataaagatgggcattgcaaagtttgtaatagtagcattgctagtggctagcattattaactttgagttgagtagtgcccaaaccatatgcaatgtgtcgatgaatggtctgatggagtgcaagccggcggtgactaaaccaaacccgaaatcgcctacgtccgcttgttgctcggcgctgacgcatgctgacttcaagtgcctatgctcctacaagaactcccagattctgccttccctcggcatcgatcccgttcttgcgatgcagctccctcagaaatgcaaacttcctcaccctcccaactgttaatatataaaatataggtatatatattttatataagaaactcgtctatgtatccatcaaacttcaatcattatgatgaagtgcccatagtaactttcaaatgcttttttataaaacctttcgaagtttctttttaatttagcgtttgttatcttaattttcagtcttggatttgttgtagtacttcaattaatagtattacgtacctcctcaatatatatatgatatatctatatgcagcagcagtgtttaaaataaattatgttgaacgtgaccttacatagacttgcttttaaatattattattactctgtgtcttttatacatcaaatagtaatttaaatttgattaagatgattctaggtccatgttcatgcaaaacaagaatggaaagtcttgcattgcactagaataaatgagaacttagaaaataaagaaacttgagatcaaggaacactactagagaaagggcctttatcttcggtttttaggccagtttatcttcggattttattaaaaatcgcaaccgaagtcatttgaggtgatgacatatgttttaaaataccgaagttaaaggtgaggctacgtcttcggttattatataaaaaccgaagataaaagtaa

SEQ ID NO: 300279 - DNA, 8386 bp, Cannabis indica
atgttgaatgattctctgttactagtacatttttatttttgtaaagaaatactttattagcatttagaatgaataagatatagagttaaactaaatgagggataaactctgaactaaaacacttattgtctaaccaaaagatatgcaaaagatgagacaaagtttacatattgaacaaatttatctccgaatgtttttgataggctgaaatcatgatcaaaaccaacaaaaaaaatcatcaacaaacagaagaccaagtcttggaatagaaaagttcaactaaaaatgtaacagcttctgattgaaaaactaagaacaccccgagcaagtgcttttcttcaaaatgttacaagataactgtatcacaaactaaaaacaaatataagtaatttcttaagatgtacatttataaagaaagtattttagaatatagaaaaggtaatttgagtttctataatttagtgggctcctaattcaaaacttttttcccctcttttattccatatccgaaatatactattctttactttagtacgaaaaattgttctgtttaagttataatacccattatttatttattcacttggctgttggaggaaatagtacatttttgtagatctttatgttcttggaggagaaaaataatgggcaagtgactttcttcaaaatgtagttatgagtactgttcctttatatttatgttacaatgttgaacaaatttgagtatgtcttagtatgttattatcttttttgttgtggaaattttcgatttgctttttttaatagtttgagtttgatagggatttgacaatggctcgatgtgggcacacattcataggtttgggatatgcactgagctcaatgacaataaatattttctaggattatagagttaaactccatagagctcaacaagagcttgataaaatgtaattttttttttttttaaaaaaatgttgtctcgattagggcttgataaaatgatttttttttttgtttttaaaaatgttagcgcgatatgctcgattagacctcggtggaagctcaaatctataatttttcattctattttttatttacactagacgagctcgatggcagtgaaattttataggtgaaatatgacattttcctttatatttaggctctagtgttatattatttatttcatatagtggcgtttgggagcttgaaagtagtttatgggttttcaaagatggaaagaacaaattgacgaagatggagaaggatacaacatacttgcaattactttacaatctgttaaaaaaattaaatttgaacaaattgttggatgtagctgaaaatggaggtctcgctcaaaatttgtctatgagtaatttgtgcccttgttctccttgaaaatgatgaggatgtgtgtcattttctgagtatgttgtcagacaggatcgaccatcaaatggttctttttatgttgtgacttttgattatgaagaatgtgactatagatctgtatcgttccacttgcttaggcacgttacagtgattttaatgattgtttaattactgtcctagcttttgctaatcaaaagttttctcgaaaaatgtgccaaattaaaacttttaattaaactttaaatctttataaacacccaactgtacataaaagtcgagattttgtcttaaaagtttacaacaatacctaaaatacattttttttaccaacatgtcactccacaactacaaaataaaagctcaagtcgtttcgagattaaacaatccaagtctaactgttaactggatttttagccaactgatgcggagtcgtaataaatgaaatttaaactaaaatcataacaataaatgtaaataatgatactggaattcgcagtaaaggtaaagaaagatactagaatttaaagaggttcgaccctagatgtcggtaatagcctactccccttatattttattaattagagttgcaaaagtcaagaacatgctcttgaatgcaaagaataaaagactattttttctctaagtgctcaaaattgcggattcttttcccaagtcatgagtgaccccttatatagggaaaaaggttggtgcttctcgtttcaagagtcacgactaatgcagagctatctcaaccgtcttcttggttttcggaggtagttgaagtctgattttttgataatatcccgctattttcgtgagtttgtaactatctttaagcttcttacgggatttgaatatttgagtttgccactgacggcgagggtctcctgagggtatgacaccgtcgttaaccacatttagggatagaagctaatacttgggggtgacaccccgggagacctaacatgagatgtcaattgtcatctcggggtgaccccccaagaccctttctatgttatgggtagtcatggtgtcatgaggatgtactcatctacctttgagaatgtcattacgtccatggtgggggtagtgtcatataccccctagactaatttggctcgcaggtgtgtggtgattgtttatcctacttatgaaagttagtccaccgtttttcctttacgaggcactcgctttgctcaagctacgggtaaaagtgaccattagacttccattccaagggttatgaccacccatcatgattaatgtcaccccaacagtcgtggctttatatatttttcattaatttagtcttggtatttccatgccacgagttgttactcttgtcacgtcattgttgtcaaaatttgagtaaacatttgtcctccaagtttctagcggtatgactatacggtaggaacttttttgtatagtccgtgtcttggtttagttgttgacgacttagtgatacggtgccgagaatttcatgcctatactagaattacattccaaaaattcaaaaaatatttttcccaattattacacttttcacatttcacaacatattccaattataattttcaaaaaatgtcgccatatcatatggggggcactccccttttataattttttcaaagatgtggtcgattattttgccattagtccggggcagttctcccccatggtcatacaaattcttaccgccatcttcgttttatacaaggtgatgagataaaagtggccgacgggacatgagatacattatctctttgatttgagaccgaacaacatcgagcagcgatcgagctattttggattttagcatgcgcataggaatgttagattccttcatggcgtagatagggtgtcaaaggagggtgacttcagaactctttacttcttggtaaaggacattgggtctaaacacaccaaattccaacaggtgaaccattttgctaagcctttgcccactgctgccatgtacgagagggctcttgcattagcccaactgcctcacttcaagaaggatatcaacatcttaacctcttctcgtgcgttagacaattttgggttcaactttgttattacatctctatcggagtacgagaaatcctgcaacctttgggaccccagaggccggccttgacgaccataacaaaaagcactgtgtctgggccttcaaggaaaaggcctgttagggagtgcgactcttttgatgataattgatattcgtctttcttattgcatttcttcattaattcacatgctatactttactaattgttttggtgtgtttttacaggtatgggcaacctgttgcgacaagtgacctaccaggaaaagggaggttctcccttgaacacctctcctatggcccctcctggcaaaattaggaaaactagttctcgctcgactattaacattcatacccctggtgttggctcacttgcctcgtctcgatcacatccttccaactttgcatctggggccgccaatgatatcaacctcattggctcgacgtctatgggggcagactcacttgcagcgctgcacctggagggtcgttgccaggccttgtctacgggcttgtcggtggtccatacttacactgaaggccttatggatagtatggacaagactatgtcaagacttgagtgtctcacccctgcccagattattgcccttgggtgtcgagagatgataagggtaagtttctcatacttgtaaaaattcttttcttcagccatcatctaacatagatgtcatgatgtgtgacaggccgcgactgttacttcctatggtcaatctagagttctcgccctacaggaggagcatgataagcatggagcatcttcactccaacttgagcttgacaccctccgtcgagagcactctcaaaaaattcatgacctagaaacttctgttgagaaggtcactgctgagaatgaacgtctcaagggtgagcttgctagcgaaaaagaggcttacactaagcttgccaaggagaataaagctatagccaaagagtgtgagagcttagctgggaagatgaaacaagatgaaaacctctccatcgatgtcttcttcaaatgttggctatacaacaaggaagctgactttagctatttgggtaagaacatggaatgcatgttatcttattgtcgcaatcgcgaggaggcgaaaacaaggcagaaggcacacgcaacttgcattcaggccgattcctacctcaactttggggttgaagcatcggatgatagtctccttgacgacttgcttgatggctctttttgatgcacttttacttttacatttttatgcacaacaatactctgtagagatttatgattgttcgggcagtctttgatctcgtgactttatatttttgagacaatcatgcgtttaatctttttgcttggctatatggcctttatctttatatatggctttacatgttaatttttctttggtttgtgacatgctatgtgtaagcatagcttaggcatttatttacagtcaaccattcaccacacataagttgctcaaaacgttgagtaatgcaccaacgctttaaaattaaaaaatatatatatatctacttacgcgcaggtgcgtttttgcttatgagtctatgtataggtatggttgcccccaactgactaagtaggttcatctcttggtcacttatcttatgacttgagatcatacaagttgcgtcattatgtgaaaacaacttgcaattttattgataaataaaattggcaacaatgccttattacattactatctgctttaaaataaaataaatttaaaagaaaagactaaacactaataacaattctaactgtgcttacgggcatacccttagcatgagttgttgctgaggagaaaccgttattgatagtatttgcggaggtgttggccgttcgaatatcggggtgctggtataaagttcatgttagagtcgtagcgatcgtgcttgtacgtgccaagggtacaatttctgtaatctcgtatggaccttcccagtttggccttagcaccctcgtcgtagggtctttagtattggtcaaaactcttcgtagtctaagtctcctaccttgaagcttctttccttgactttggaattaaagtatctggcactttttgttgtatgctgctaatcgtatttgtgaaacctccctacgactttttaataggtccagtgactcccccattagttggtgattactaacttgatcgtatgtcgttcgtcggggagggtgggtctagctcaactgatatcatcgcgtcatacccataagcaagtgcgacgggggtatcaccagttactgttctttccgtcgtcctatacgaccacaagacttcgggtaattgttctggccagtttccttttgcattttcgagtccttttttaaggtatccttcaaggtcttgtttaccgcctctacttgcccgtttgaatgggggtgtgagaccgccgagaagctcttcactataccatgtttaatgcagaaatttgtgaacatgacactatcaaatgggtaccgttgtcgaataccaatttttggggtaatctgaacctacatataacgttcttgcttacaaagtcaatcaccttctttgatgttatggttgctagtggttcagcttctgtccacttagtgaaatagtcgactgctactaccgcatattgcactcctcctttgcccttagataattaatcgatcaagtcaattccccatatggcgaaaggccatggactctgcatttgtgttagctcgttgggtggagctcttggtatttttatcttttgacatttttcacacttttgaacatactccatggagtcttctatcatggttggccagaagaatccttgccgtagtatcttcttaggctttgtccccagcataattaccgcaaaaacctttatggatgattatgtaccgagcgaccttttttctcatcttctttgcttcatttttgttagtaggcagttcgccttgttctaagtaagctgctatgggagtcatccatgattgagtcgaatctagtaggagtacctcttctttggtgttgatgcttggttcggataggtattctattggcacaaggttaaccttatttatcttttcactcgtcgccaatcttgccagggcatcaacggtagtgttctttctcttggtatttgttgaatggtgtagccttccagttaggcaagcaaatcttgtatcttgctaaggtgagccatcatcttctctcctctggctgtgtattcacccaaaacataatttacaacgagttgggagtcgctgtaaatgtctaattgtctgaccttcacttcttttgctagtttcagactagttactaatgcttcatactctgcttcgttgtttgaggtagggaagccgaagcgaatggtcatatgaatttgttgtcattcaggggttattagggtgatccttgctcgtgatgactgatctttgaaagaaccatcaacttgtagtttccaagtttcacttgcttgatcttccttttctttcttctctgtgttgggaacatttggtttgggtgaaccgctcatatcaggtctttgggtgtcactgattgttgatggttggtcatcctcttacgcccttgtttaatttcaacatcttgaaccctagtacattcaacgacaaagtcggctagggcctgccctttaatagccgaccttggctgataggttatgtcatattgccccaactctatcgcccatttaaggaggcatcccaatgtaccgggtttctgtagcacttggcataatggttggtcagcgagtatcgtgatggggtgtgcttgaaagtagggtcgaagctttttggatgctaagagtaagtagtaggtcaatttttctatgagggggtatctacactcttccccgatcagcattttccttacatagtagaccgggtgttgtaccttatcttcctcccttactaagaccgcattgactgcatgttctgtcattgttaggtatacacttaacccttcaccgtctaggggttttgaaaggaccggaggttgggataattgttgctttaaagcttggaaggcattcttgcattcttcaatccattcaaattttttgttgccccttaggatgttgaagaaagagacacatttgtcggttaactttgagacaaatctactcaaggcagcgatctggcctgtcaagctttggatgtctttaaccttagttggggatttcatgtcgattaaggtctttatcttttatgggttagcctgatgcccctagagttcacgttaaacctaaggaattttccagagcttaccccgaaagaatactttagagagttgagcttcattcagtattgtcttaggatctcaaaacattcctttaagtcttcaatgtgcccttgggccttcttagacttgaccagcatgtcatctacgtatacctctatgtttcttcctatttgttctttaaatacctttgataggtggctcaaacatttttcaagccaaacaacattactttgtagcaatataagccgacgtccgttcgaaagcttgtatgttcttgattaggtgggtacatgctaatctgattataccctgagtacgcatccatgaaagttagaatttcatggccagctgttgcatccaccaactggtcaattcttggtaggggaaaacaatcttttgggcactccttgtttaagtccgtaaagtcaatgcataccctccaggtgtcattcgactttagaactagtacatggttcgagacccagactacatagtaggcttctttgatgaagttgttgttccacaatttttctacctcttcctttagtgccttagctctctctttgtcgagttacctttttttttgttgaacaagcttgaagttgttgacgtcgatgtttaaagtgtgacttatcacggtggggcttattccttccatgtcttcgtgtgaccaggcgaagacatcttggttttcccttaagaa

SEQ ID NO: 300280 - DNA, 2614 bp, Cannabis indica
aaagccatataacattttttaccatttgtttccctctttaggtaatacatgatttcaaaggacaccattatattatcttaaattaatctacctaggataaacacactttgaccttttaaaaaatcacctgatggagcaccacctttacttgattaccaagaacttttgaggtaatcttgtacatattattacaataggaaataagtcactcatataagttgggttttttctttttttggaataagaaaaatattagtatacaagaaatccttggaggtaagtcactagaaacaaagcactccttaaccaacttgatcatgtcactcccgacaattgaccaaaacttctaataaaactcacgattcataccattcgagcttaaagacttgtttggatgcatttgaaacatagctctcttgacttctatatcttgaaatttttttaaattacacattttagagcagagaaatagactcttgaatatcatccaaaatagtgtccatctcatgatcagggacatataacaacgaattaaaataatttatcataacatgggcagctagtatgccaatccactcaatctccattcacatccacgagctgagtgaaattattattcctctggtgagagctttccaatgcatgaaagtacttactatttttgtcacccgcattgagccagaactagttagagctttgttcccaaaatacctctttcttataagctagagaactaagcatatcatccttagccttgttgatcaattcttatacaattagtatcctatcccccatttacttttttgattattttttatttttcataattctatccttgaagaaccctataatttatgcctccaaactgctaacatcttaccacactttataatcttgtctggaatatcaatttcactcgaattgtctcagaaactctcaactaattgacgacacataggttcacgaatccatgcattcttaaaatgaaagggagctctactcactcctatacttttagaccctgtaacaaacaaaagtggacaatggtcagatgttgaaaattcaaggtttaaaacctttagctcaggaaataaattaagtcaagactctgtgacaaacaccttatctaatctttcctcaatccattggtctgaaccgtgacccttcttccaagtgaacgagtatccttgtaactccaaatccatcgagccacattcattaagaacttcctgaaagccatctatcaaccactttggataccgccacccacccttcttctcataatgactacccaaattattcatatatcctactaaataccatgacaacacaaattgggttttcagggtctgaaaaagattctaagtttcctttctgaattctctttaaggctccccataaactctagtaagacgccatttaggaatacatccctcatacaccactacatcaatatgatcaaaagaaaatcctagcaaaataacattatcctcttccttccacatcaatgcaattcccccactatgcccttggccatcaacacaaaatcatccttcaaaccccaacatcactatcaccctttccacccatacttacccataacatttcacatatgatcaaaacattatgtttctttgtagacaaaaggtcgatcagaaaatatttagcccgttggttctcaagcccacaaaaattccaaaataatagattcatgatgatgagcgggcttgaacactaaaaccagccaaaatacatttttttttttgaaactgacacattgtcattctccatttcttcaatctcttactcctgaacttgggccactaactccacaccaaaccagtccatatcattaacattaactctccccataacttcaataccaacctggtccaaatctccattactaacacagccaccatgccaacattaacttggtccaccatagacaaattcttcctttttcgagtcaattatgaaaacacaattagaatcaaaaagacttttcttatcactaacttccaatagtctcccactatactctcttcctccattaaattccaaaaatcattatcagccacccatataatttctttcccacgatttttgtcaatcaccctctctagtggcttacatgagatattcagactaacaactcccttatagggatgtcatcagtagcttgctgtcgaccaccaccttgtagctccgtctccttaagcagccatgagacccttatattctaaaaatttcttggcaggtcaactcgcaactccaaccatttatcttcgatatcaaatatagtggcgtctcaaagagtcgatggcaaaaaaattctgcatgtcccataacaccacaaataaaacagattgcgggtagcttttcgtatttaaaattaaggcaactcgacaattattcattatcctcttgattgatttagtaacggcagtcatgacccttacacgcaaataatccctccataccccaaaagaattcttctaatccaattcgacaaacttaccaatgtaatcagctcccgccttcaccacactctccttctactacaaaaaattgctacttttagtgacaacgttttagtcacaacataattttt

SEQ ID NO: 300281 - DNA, 4027 bp, Cannabis indica
tggtaaaatatatccaacaatctcaactaccacatatatctgtaactacttttaaattcaaatttagataaatatttattttttgaattaattaattaatccaaaaataaatatagtgggtccatcctatctcatatgcgcttatcactgtgtcattacatagtgactgacgccattattgtcttaattagataatggtgacgtctttgtcctgacaacactttatctttttcccaatttatttaaatattaaatttaaaataaattatttattacaaaataaattattactattcttctaattcaaaataaattttctgaacatcattatttagctttacccatatccttgacagtgttgcaaggtggcgatctgaggactatgaatctataatactaagctccaataaattagattatttattgaatctcattaactgaataatcttatttattaattccatgattactccactataaatatagaatttaactcttagtaattatagaattatatttactgagtttattacaatatccattgatataatcgattccagtgattagccctccttgtgtcagttcataattagttttggtcaaattactattttattcttctaattacttctttatcctttagtaccgttactacattactgaaagtataatttagatccaatctaaatttgtgtacaagttttcagttccagaattaacatttaaagggaatcaacattcgatccgttaaaaaagtcagattctatgatttgtagatcatgttcccagccatccatattattcgattcccaaaataaaaattctaagaatcatcttctctgagaaactttaatgagtgaatcaaagaaattaattacgtgaattagagatcatgattactcaagttccaggttgatctacaattgatcatcattatgatatgaattaggtctttatagtaaacgacatgtttgataaagatagattaattacatatcagtccatgtcatatatgttatcctaattttttgcccagctggcgtggcatgtccacatagacaaaattgaaaccacgtagaatacagtctgtcaataactggacaaagtcaccttgcacgacatatcaatttttaagggttctaaggaaatcaagcaaggccaagcaagaagaaaatggctagccagggaactttggccggaacatacctagctggccaatgaagtcccatgtgtcggcgaggcactaaaaatagggctggccagctagcacatatagatagcctcgaagagaggctgaatgaatggtggggtccacaacgaaccttttggaagattgtcaagctacattttagttgcgggacatatccaacaactcacaaagatagggatattccctcaagatactatccaatattctagggatctaagtatcttttttgtaatttatatataagatagaaagaggttattttccctattttagaggggatatttacctatttgaattataatctttcgtaagctcacactatataaaaggcattagacaacataaaaagagacctaaactctaagtctcacacgccccatagctcctctctctcagtccttcaagccccttcactcactaaacacttagtctatttccttcacacaatctcacaagttctgaatctgtaacactcaattctcactactgtaatattgaagagagtcatggctagaaattacaaggtccaagcttgtaatctgcgtggtactgtctcaagaataaatacaaccaaaaggggagtaggtctttacccgttcatcaagagccccgaatctctataagttcttgtgttacttttattatttattgatattatttacacgtggtgattatcaataattaataaggctcctctgttagttgaccaaattttgagttaacattctggtgctttcattgagagctttatctcattccgatcaatcaccgtggttctaaccagaagaaccactttctccacttcctcaggtcctcctcaggatcttatgacagtcgatcctgatgttcgtgttcctccaaacatggaaggcactattaatttggctaatgtcgccaaccctacaaatcctaccaatcctaccaaccctactgatcatgccaatccaacaaatcctaatgatcaacccctaccgcccaggatagacccaccaacgacacattgggtagaaggtcctgtcaacatggaatagcctccacagaacacagttgtggttgtcccctagtactacgcaggagaaacatggctaggaattggtgaaccatccgttggtgagcctcacttggaccttggggatgatattgagttggccaggctcagagaagctataggccaggtcactcaaacagaacaagaagaaccatgcgctgctagttatgatgctttcacccagtagagacatgaattcctaaagtggatggattactaagaggccatccttctggcccatcaaaaggagatgaaccgccgtaatagggaggccaatgatatgataaggcgattcaatgaaaagactgtcggaagaggtcaggatctgataagaaatccttttaaaggaaggctcattgacaggttaggcagggtctacaggtaggtaagaaatggatagatggtccaactaggtccctcgaacacgaggacaggccttccctgcctgaagatggtcacatctttccagacagaccacatggcaggaacaaccaattcctagtattaggaggcattagaggacgagaagacaactccgggtagggaacattgccaactggccaggccctagcagggcagcacaataattccctcccccaaaatattcgagatcaagctgttctaagacataaggatcatatttttgacaagttgggtcctagtataggcaaaaacacacaagacaataataactcgaggagaaagaaccgaagtgacttttttccacctctgaataattatttcaggcaggtggatccaccaaacccaagcagttggtacgacaaacccactgccaacccacagactgatctggccggcccagggtatctgtctagccaagaaaggctgacatgaggacactaaaatagatccatatgtgcaaacatagttaggtcaacttaaagcttgatcaaaggcttgtccggcccaaagctgtcagacttggaattggacacatcaagggaatcacccttctcaacatatattaatgcattaccccttccaaagttcaaaatgccagcttagaagatgtatactaggaaaaaagatcctctagtgcacataaaaaatactttgagatccaaatagatctccaaaaagtaattggaaatgtgtgatgtaagatctttccggcaaccctatctgaaactgcccagcaatgttatttcaagctagccccaagaaggttcaactcttgggagaaattctcttgataattctatactcagttcttgtcctcgagacaaatacattcacagcttgaagaccttgttgaaataaaacaaagataaggtgaactttgaaagactacattcaatgttcatggctaaggctactaaggtcaaaggcctaacaaaagaaggtcattatacgaccatacttggaggtatcttaccattgagtgaggaaagatattagaaggatctcaacaaacaaaatgaaagagtttcttgatcaagttgatggcttcataaagttggaagaagctgtttgacaagcccagatagaaaggtaggtcggtgtcgggcaaacttagggtgtcatgcagttccaagttcaatccaactttctgaccagcacaggaaatatcagtcggacctctaataataagaataatagggacgaacgcagcaacaatagatctggcagagatagtggcaaaaacaagaagtttaacacttcccctacaccacaaaatcaaagggagaaggtgttggaaatattttaccaggatctagatttactaccaagtatgtttcattaacatc

SEQ ID NO: 300282 - DNA, 3058 bp, Cannabis indica
  modified_base (57)..(57): a, c, t, g, unknown or other
gaggctaagtttttgcttaggtcctcacttaatgagttctttaattttcgaaaaatntttaaatataaattttgatgaagattcatcccatctcatctcaaggtggaccccctatagatgattagaacacccaattagaataatgtcatgagaatgcttttaaatttaggaaaatatcatttatatataaataaaatggtattattgaaaatgtaggatgagctattgtgggctgcaacatggctatacatggcaacaaagaaggaagtgtatttaaagttcatacaagaagaatccattagtgcaaatgtggctgaattcagttgggacctcaaatatgctggagcccaaatccttctcaccaatgtaagtaataatattatttacaataatacctactttttaatgtaattttgaaaactaacactttataaagtaatcttcttctcagcacactttcatgttggtcaaaatataaggtgaattataagagttatgtgataaaactaaaacaaaatcatattcaaaatagtctgatgagtaatttttttaattaatttttagggtttttataccatatactgaaatttataattttttactgtttttactgtgttaaattttcactgttgttttacgattgtgtttaattgttgagttttgttgttttataaaaagacaacatttttataaaaagtcatgtatacttttgcctaaaatttaatatattttaaaaaattgatttgaatatttatatattgcagttgtatttagaaggacatgatagtttggtagatttcaaaaaacaagcagatagctatatatgctcagttctaccacagagtccgtaccaccaagtttacctatcacccggcggagccgtacacatgagagacggcgccaacacccaatacatcaccggcaccgcccttcttttcagtgtctatagtgacatcttagcccgtcacaatcaaaaagttcagtgtgataacatgcaattcgattctactcaaatttgggcttttggtaggcaacaggtatatcgtgaaattttattatatgagttcgtttagtataccatattatattattatatgtggtattttattttatattatataaggctaattaagatttttgtcccttaaattttgacatgtacctaatcatgtttttaaaaattttctggtcgttaaattttttccgtaaactattaagattgttagatttaaggatttttgtataatttcattcaattttactaatttagtgattgtttatgtacttaatcatactcctcaaactttaatgtctacgaaatcatgtctctcgaattttgacatgtatcaaattatgctacttgaactttcatctatgataggcttttcttattaagattacacaaaagtctttatatctaacaatttcaatagttcagataagatttttaacggccttaaaagttcaggacatttgatatatgtcaaaattcaaagaacaaaaatcttaattaactacaatataatacaataggatgaactaaatgaatctttcatgtttcttctttccacttatgtagaaataatgctaggccatatttttattttatttatttatttataatatgtgggattatataataataatgtgtaatgcaatttttgtatagatggattacattttaggacagaacccggagaaaagatcatacatggtggcatttgggagcaactcgccaaagcaagcgcatcacagaggttcgtcggtgccaaagttgccatcagggtcactagtgaattgcgcgatgagctttgtgcaatggtataataccaattcccccaatgtcaacgagctcactggggccatcgttggtggcccagaccgctatgacaactttgacgacaaacgttgggattcttcaaagactgaaccttgtacttacattaactcactcgccattggagtcctagccaagcttgccaataaccctaactaattatctagcttttatcatcaaatgagattttattattctttacatgtatgttttgatttgatttgattaattaattaattaattctaattattaattaatcgtgaaatttgttgtaagtgtgtaagtttaacctcatcatcacaatgattcaattctattgtcttttcatgtattttagtgacttgtattttgtatcaaattagtactttttgcaaagttttaaccacaaagttatataatgtcaatattatactaataaaattttatttatttaatttataacttttatttatatatattcattagaaagaatgatatatgattgctagttttaagcacaaaataatgaaattattttcatgccatattacaatgataaattataaattaagcattttttttcaaagaaaaaaattgtatttttgtagcatataattacaaaataaattaggttttttttctattattttattatacatataaaaatttgatattttgaaaataaattaaacttttctaaatatttatatatatatataaattggcctaagtagcaaggggcctaggtctcatcgatccatttggaaatattgattttgaaataattatcatgtactccaattacaatgtactctaaaagaattgttaaataattttttttttttgaaagaatatcaattcaataaactaagcgagaaaagtggtaatcatcgaaggatttccctctccttgaaaaatatcagccactaaattagataatttagcgcttcgagcccgtttataaattagcgacttggattgctgtgtataatactcgccgcttcttttctgatgggggagtagcacctcttatatactaccatttaactttggtttgttttataaagatgacgtttggtaatatttttttaatcaatttttttgtttttaaaattaaaaaagtgaatttttttttttaaaaatcatgtcttataaattttttttcactttttaattttttaattgagaatcaaaattttaaaaacaaaaacaaagtcactttcaatattttttaaacagtt

SEQ ID NO: 300283 - DNA, 2387 bp, Cannabis indica
atttttttttcttttctatcttcatttattctttttgctctactttatttttttttcattttcctaaagcacgatcttttcctttttttttctttccattaataaaaaaacacgatctgtttctctcattcttcttcttcttcttcttcgttgccatggacttcagacccctctcaaagactcacgacaagccccaacctaaaaccccaaagccttgagacccacgatgaaagggtttgacaaccctaaatcagagatccccaacccttagaatcgcatcgtcgagcctatgtgctaacacggttgggttcgagacaccctaaatttgagccataatttattatccccagatctgaactcgcaaggagatgatgagtgagttgggctttggctctacttctctcgtagtatgtgtgacccaacatatggagtgtttgaccaggttaatgtcatgggagttggtgtggatggtgtttcaaataaagtctcgaaaaataaagtgttggtaggttctgattcacaggcctaccgttcctcatgagtattctcagctagaattatcgtgggcttgggaacccatggatcgttcaatttctgaaggattcttgtggtccaaaagaagcctaatttttttttatgtgaaactttaaatcgtaaggagattttggagtgtgtgtgtgttgttaggttttgatgatgtgtttgctctcaatgctaggggtcatagtggatttgttgctttgctttggcatcatatggaagaggttgagttgttagggtattcttcttgtcatatttatgtgaagatttcggttgagaggatggtgcagtggaggttgacaggtctttatggtgaacccaataagaatatgtgtagtaaaacttgggaccccattcggtctctaactttaaattctcagtagccttggtgtgttattggggatctcaataatgtcctttctcaagagaataggcgtgggggtaatccttgtccctcttggcttatagatggatttaaaaaggttgttagtaattgtgatgtccaagatatggagttagttggccatccgtccacttgggagcggggtagagttattgatatttagattgaggctcaaccagattgggcgttggttaattctagttggaatcaacttttcagtttaacctaattgtttaatctctaagtttctttgtcggatcattttatgttgttgcttgagcctatggttcgtattttctcccacacatttcacctgtttagatttaaaaatgcttggctttgtgagccaatatgtttgcaaattgttaaggacagttgggatttgtgtgctggtcaaagtgttgttgataaaattcaatattgtggtgaacatttgcttgcttaggcaaagactttacatgaaactttaaggaaagaattcatctttgtaagcatgatattcatcgatttaagaagggtcgtgatgttgattctatagggtgatggcagagaattttttggaaacaatgttagttgagggaaggagaccaaaatatcaattttttcatgctaaatctacttctcagaaaaaacataattctatctaagctttacaaaactctttgtgagttttggtggattggaattcaagttcgtctaaagtaattacagattatttttctaatttgttcacctctctaagttggcttgtcatgaggtggtggatggtattagctctattatttctctcgagaagaatacatagttgctttgccctatttcaattgaggaagttaagggtgctttatttcaaatgcatcccgataagtcacaagtcctgatggtatgattctgggattttaccagaaattttgggaggttgttgagtcggatatgttttctcttgttcatgatttatttcagtcagaatctcttcctactagattaaatcacacaaatattgttttgatccgaagaaaaaaacatttgtgcactatgggtgatttgaggcctatctcgctttgtaatgtattgtataaggtgatttcgaaggtgttggctaatcgattgaaggtggttcttcctttgattatttaaaatacacaatctacttttattccaaagagattgatttttgataatattatgatatcttttgaagtcatgcattgccgtgaatgaaagtggtaagggaagatgagttttatggctttgaagcttgatcttagcaaatcctatgaccgtgttgattggaattttcttccattgatgagtaaggttgattttgattcatggttggttgatttggtcctttgctactattacttatgttcgttataatgttgttcatgttggaaattattttaccaggatctatttactatcatgtatgttggattaacaa

SEQ ID NO: 300284 - DNA, 1583 bp, Cannabis indica
catagataatacccattaaaagtgcacctatatatattgattattagttttttatatacatataagaaaaaaatatataacttgtctacctaaaatataaagaaataaggtagcaatacattctttttcaggttgcattaatttgatattttttcatcaatatacattagtttgatggggggacatatttgattgggtgtaacatattaaatattagtgaagtgagtgtgatagtgatatgcatggattttcgtgtaagagttcatttagtgggaataaagaaaccaaatatttatatatatataaactaattaatatctatcagttgtgaaggtctgtgatctcatcgatagttttagtttatgataaaggacaagttgaatccaatgaaaacacaactctgtagggcattgtcgcagctcgtatcttcctttaaagtcattaatattaattataaaatgtttatacataggggtagacgtagtacgtcggtgatggtatgttttgggtcctctccattaaatgggatggggtcatattaacccaacacaaaatgtcatgcattcttttgatgacttttgttacatcacattattatgaagaataatcaagtactacaaaatcgtagtgagaaaatagagcacactttaatctcttaattattctcaatttggttgctcgcttatatatatttagtcgtacgtaccaaacaaaaggtcagcaaattgaccaaagaaattagctttatttacttattaatttgtttgataataggttatagttggaaaatgtggacaccattttaatttaagtcatgttaccgtgatgattgagttgacaaatatattagtgtaactatagaaaattaaacatattattatttagaaagatgctaaaatcccgagcaacgtcggttggattttttccgagcccagctagagttacatttgtattgtatggcctgttcaattttttttttacaagaacatttgattacacccaaataacacctaaaaatggtctaaaataaaaaacaattatacattgacaatgtatttacaaattttgaaaccactgtgtgtctatatttgagactttttttggccaaaacatttcaattcttagtttcaagttagctttcaactcattgagtagggctgtaagtaattgctttcaactcattgagtatggcctattcaattttataatatataaatttagtcactatcaaaaggtaggatccacgtatattgttggggtatcaataggtaacagttagcttgaatataagtattctaattattttattagtatgaggttttcgcagtgtgtttgaaaagaaaataataagctatatttgtaatatgtgggaaaaactctcagtacgatgacattgcgtgttaattaagacaaagtctttctaacaaagttgatgattagcttttttccttggtggaagagcgaggctcaagatatatcaacccctttttggtttctatctcctcatttattgttcattcctttgaacaattttgattattttttttttataaaattgtaactttcattgagcagccaaaaaa

SEQ ID NO: 300285 - DNA, 2812 bp, Cannabis indica
atttttcctttttttttttgaacaaaacgtatttgattaaacaacaagttagacctctcggtcattacataaaatatttgaggggatagaagatagcgtaatatcaccaaacaacttgtgggtaaacacccacttagtcatattaggagcgacaaaattacaagttctgctgatattagagaaaatacaactagaaaaacaagaagaatgactatcacaaaaggagacatagttaccaatgacccaacgagactccatgccattgagcgcattaataactaccctcgattcactctccacaataactaaacgagctttcacttccagcgctgcggaaatagccaaacagcaaggcgccgcttccccacagagcgcgtcagcaaaatccatcctagatgtgtgaacccgaaccacctcacctaaatggttcctagcaacagctgccacgcacatgctatcaagatccactttaacatcacaattaactttaatccaatcatgaggagggggagaccaggtctccttcaggcaaggagcggagggagggaaaatagtagcatataaatctgcaaaagaaaatcgaatagagtcaatacaattcaacaaatccacggtaatattattatggaccttttcatttcgagtgcgccataaattgtcgaccacaattgacgcatacaggaaaacctcatccactgcaattcccttatggttcagattccaaatgaatttgacccagtcccacattctgattccagtatcactaattggaaaaatgccccaaggggacgagcgccaggcatgaagggccaaatcgcaggtaagaaataggtgttccacaatttcctcctccctaccacaaagagggcatcccacctccttaatgtgaaatctcttcctaatcatagatctaagtgggtgggcattagagaggatgcaccaccaaagaaccttgtgacgttctaacactttactattccaaagtttattcgagagagaaggcgctacaacacaatggggggctctctccaacgcttgagagagagataagcagatttgcaggagaatcgtccatccttttccagagtccaaacccacttatcatgccccaaaccagaaggagaccctcctttcaatatagccaaaacagtctcccgatcaaaaaggttatttagcttatgaatatcccacccaccatctgaagacaatagctcagccacaaatctatgatccccataatacgaagctcgggccttaggtctgaaatcctttaggtggggaatccaagggtcttcccatattcgagtatcctttccatccgccaccaatttgcacgcacctttcatcaggatgttccttgttttaatgatgtttttccaaaaccaggaatctgagtccttgaagccacaattaaggaactcttttccttttaggtatttagcattaagcgccctgcagcacagggattgacttccattcaggatgttccactcccactttgctagaaaagcttggttcatttctctagatttcctgaagcccagtcctcccaatgattttgggagacacaatttgtcccaagctttgagatagagaccgtggatatccttttcaaacccccaccagaagtcacacaccatactatcaattttggaggccattctattagagaatttagtacttttcatggcatacaatggcatagacaggcctacaagtttgatgagggtagcccgcctcgccttggacagggttttagctttccacccctgaagtttagtagagaggttgtccagaatgaaattgaaatcgacatccttttggcgagatttggaaaggggtaggccaagatatttgacattaccctccggtgacccaatacccaaggtctctctaatctcctgcttcaagccccttggcgtatttttgctaaagaatatcgaggttttgagtttgttaacttgttgcccagaccaagagcagaagctctcaagacactgccagtaacctctgacttcatccaaattagctttgcctaccaaaattaagtcatcagcaaaaaagatatgatagagtaccgggcctcctctactcagccttatacctttaataatgttcttgtcaagggcatcaaggaggagcctagatagaatctcagcagtccagatgaacaggtaaggtgacaggggatccccttgacgaagctcacaagaaggtttgatcgtgcccacttgtctcccattaaggaaaatgttgagagtggtagtcgaaactcactgggaaacccaattgcgaaacttcaagggaacaccgtaacaagacatcacttggtcaattgaatcccacttcagcctgtcataggctttcatgagatcaattttaatggcaggaaggccttccttgccccttttccggttgaaacagtggataatctcttgaaccagaacattattatcctgtatgtttcttccgagaacaaaggcggcttgcgtagggaaaataagattaggtaagataggcttgattctatttgcaatgattttagaaatgaccttatacataacattgcagagagaaatgggcctaaagtggttggttctctttgggttctggaccttagggacgagcactatattcgtagcattgactcctttgtgcatactgttattcatgaagaagtccgagacagcatcacagaaatcatctcccaccgaatcccagtagtgcttaaagaacagaatagacattccatcaggtcctggggctgtgtgacagtcagtagtcccgtgatccgtaaggggaaacaccgggt

SEQ ID NO: 300286 - DNA, 3677 bp, Cannabis indica
atacatatagtttagtaattaacacattaattataaatatgtgaaaaagtaaagtatgaatttgagccaagatatgaagacgtcctgacatgtttaagaaaaacagaccggcccgattaaagcacgatacgaaaaaatatcggacctacagacagtaccaaatccctttaaaaatataagtacgaaacaacacgactcatattttaaaaagcacgaaaaaatattgtttgttgttatctgtgctttaattaatattttgatttagcgaaactaaaaaatgaaaaaaagacagaagttggaccaccatatatagtaaggtccatgcatgtcgaacgtcttagtgaatgagaatcgctaaaaggcactaatggtgtgtagcactttcctcggtatcatattgctattaatgtaattaagtatcgggtcccatataacttaagaaaaataacttttaagtaatatcgctaactaatcgtgaggtgccactatgaaaagtgttgggcaccactgaaacccaataagaatgctcttagtgaatgtttttttttagcatttttcaactattaatgtctgtattgttggggttggaagaaatcttgatagatttaggatgcatttaataacgattttttaatctgttttttatttttaaaattaaaaaaataaaaaaaaaattcaaattatgttttataaaattatttttacttttcaattgggtccggacatggatctggaccttgacccgaacccttgcgttgaacccaatcgacaaatgaaaatgaaatttacagaataccttttttgtttgtttttaaaattgaaaaacaaaaatagttatagaacacatttttatttttcaaaaataataattttacttttatttttgtgattaaaaaatttaaaaactaagtgttacaaaatgaccttaatttttattattgtcatttagtttatacactttattattgtttaaaggtttatgtgctttaatattttctaactcctaattaaatttcaaatctgattattcatcattaattaataatgaaacaataaatcctttttaaatcattaattatatgcttcctctattttttattattttgaacaatataaaggaaaataagtacatactattatgtgatcaaacacatatctaaataattctctttcatatcacacaaggatctaattttataatgtaagattaataaaatactcttttaagttgttaggttcagaattcccaagctcatgattcttattttcactcaatcccactctcttttgctcttaagcactcctatatgcatttttcttctttttctaacgcttatatttgaaaaacttaattgaatcatgtttttattataagacaaaaaataatactacttataaccactctttggggttaaattattgtaaaattgcttgctttatttaaaaatcaaagctaaaagaatgaaggccaaagaaatctttaaaactaataattggaaaggggccgcgcgaacgcaggccccaactaccacaaattatgacgttggctctcccacttggggagaccataagctgacacccctcctaagtgcaatggaggtcaccagcctaggccatggaccttcttgatcgcccatagaccccgtccaggtaagtatgttactttacacccctaaacccatttatatacaccttccccacttttaactatttgtttgctttcgatgtgggacaaaaggagaaataccaactatttatcacccaccacccgttcacaaatgtgtttacaaactagaattcttagtttaataaggcttgtctccttcattcattgctgaaaattttcaccaaaattgggttggttaggtgggaaaaaacttcaatagaactaggtctctacagaatattattcaagtcatcaaactcgtacaaagaaaacagcaaagattcttaacccttttaatttcacatattggtgtcaagagggcaaatatatatatataaatatatatatatatatatattaagatcttttaattctctatcaccaaaatctccaggggtccttgaatggagggacatattcttcagttgcgggaagaagtcgaaaagactccacagttttttgcaacagaggccccatctgcaccacataaaagatcacacactcaatattggaaataccagaaagtatatatatatatatatattcagaactagagagggagagagatatttactttgtcccactgcttgttaagggtggaggcattcagagagtacaaataacctgcatttaagtttctgtaaggtcacttactaagaataagactagctgaatatccaggagagtactttaataaggccaatgaccctaagaaacttttaaacacaatgattgaaatgaaactggtagtattcactgataaattaagaaatgaaaagcatgtacaagaatctaaagattcccgtattgcacagtcaaaaacagcagatcgtattagaatcctaccatctcgttcagctgttgaagcaacataatgccggaaaatatttgattcttgagcctgcgtagttgtaaagagtcaagaaactagaaagaacagtatgcaatgatatatttttactgaatctgataaacaaggatatgcttactgtttttgtaggtgacttgcgaaccagatactcataaaaccagtaaggctgaccatcaatctgagaaacatttatgcacacatttaccacacaaaaaaagattggactatcatgtaaatgtcaaaactacatagaccaataaggaaggtttggaatcgcacttcactagaatgtgcatcgagaactgaactttcactcatccgctgacttgaggtgactcgctgcaacacacacacacatcaattttaactagcaatgaatatttgaaatctagctgttgagatttttagaagagctgtaattcaagaggcccaaatatgaactatggcctaggctctacagatagctggctttgcacatatggtatacgatgtacatgatcccaaaagacactagatttctcaaaacttcaggcctgacagtctttgaccaaaacctccggtttcagtttagtatttggtccatgtaagatttaagaaattgtcttagatagtaaatatcaaaatgttacattggcacaaaggatagatagtacaatattcatcaagactgttagtgaaaccgcaacttaagatcaaggaaaacacagggtagaaatttaccagcgcagacttatcagacaaaacagaatcagcaacatctttagctgcccatgtacttttgtcttttgattttagaagccctaaatttggaggacctatctgaatgaaattaaactgatatcataaactggtgaacaaataaccaaacaaaattaccttagtagaatggttttattgaaagttaccgatacagaaatgatcagattgtcaataaagtcaacacgctcagacacaatccgtaggcgtgcatcggctgtaacaaatgcaaaacagtatccagtgagtattatgcatagatagtttctgtaatcactgccagaaacaataaacgagtaggaaatgaatcttagtatattcaacaattattttatagaataaccagaatgctaaaaactgtaactacgaatacttcaaactctg

SEQ ID NO: 300287 - DNA, 4147 bp, Cannabis indica
tcaaccagtgcactggctttgatcactcaaatgaaaatttggctccaagaattctccccggcatggtcagaaacagggtaggagaactcgtcctcaattttaagaaccttgtaagtatcaaaacgacatcccagaagctccaaaaagagcacccagagcccaggttgatgtatgacctggtgcgttgagttttgctcatctgatttcgattttgtctcaaacattcttctagtttttcatattaagcaagagttatgaactcaaataagtcaaatttacaacttcatattttcatttttttttttggtaaagtgacttattagttgcaaattgggtagtgtcgagtctcccaattttgcaaaacagaaacatctctgagaactggtgaacgagttcactggaataaagaaattgactaagtgatgtcaaaatatcacttaggcgtcaaaaaaatacatcccagcacgttttcctactcactcaatatctaggttgatgtcatatgtcaacttgggcactggatatcaacctaggcactgatatcagagtagttttcagtaaaataatcataactcactcaaaaatgatattattaatgcaattaaacttgcactttgaagatattttaatgctctatcaagtcatgtctcatacgttaattgtaattctgaagatattaagttcaaattttatcctcaaaagagttacaaattctacccaaaataggtcccacagacgcgttttaagctccaaaaattgacgactgacctctagggtaaattttactattagatcatcatctacattttcatatttttttaaatattttattattaatacgatctccttccctataaaaagagagctcctatagctattttggcacattcaaaaagtacgctagtattggccacttttcagcataaaaaacttctatggataagtaattgaaaaagaaaatacactaattaaaagcagaagtattaaatatatattaaaaaatccttaggtaatttcttattagggctctattatctagtatgttgtcgacaggatttacttatcttctctccgaccatggttcgtcaacctttctataaatatggaaatggtcgaagttgggggactgttgtttgtgcatatatgtaggagatcgttgatggaggattcgcactagatgtcatcaacagtttgagtttacattgtggttgttggtggttccttcatcaggttttgatgcgaggtgggtgtcgtgtggaggatattcataggtctggggtgctactgcacgtggtggtagagtcgacctcaataattgttgtgccctagatgttggtggtttggtgcttggttcttctattattctttttttttctactttcatattttaattttgatcaatggttgtcttttttattgttttatgatttcaataatggtaattttatagcatcacattgtattaatgagagtaatttctttacgcagtggtcaaatttgggagacttccagattgttattaaccttgactcatgttttatggatcgatctttcactaggtttgtcattggtatggttagttttgatacttcacaatggtggggctcatgggtctttatttagttggagttttcaggattttcttctaaattattgtaaacaacttaattagtctattttttattactattctactcaataagcaatatcttcatgtaatggactatgtttgatttgtctattattagaaattgttattttcctttcaaaaaagcagaaatcttcttttcacaaccaatattttaatccaagatatcaaattatttactatatgaaaaaaaaaaaaatctattggttaatacatgttttgttatatataatacaaaattttataaatgtatatttatcaacataaattctcatcaagatcttcataattttaaacaacaatttttctaacaattttttcttttcctaagaaagcgaactaatttaaaaacattaattatctaaaataaggtaattgattaataagaaattaaaaattcataagattttttttgtttgtctgtttaaatatatttgaggatattagaaccataaacatctaagtttaattatgtaattgttgcacttatatatctaattttaattttgatgcatggtataaatacttaaatttaatttttgttgcaattgtaaaaaatttaattagagatatacttttagcatcagtggctaaaattaaaaaaattgtgactaaatataaatcatcattcttatgttatcacaaaaattgtgactaaactaaaaaattttataactaaaattattagtcacaaaaattataatttgttgtcactaaatgtatttttagccataatacttgtgactctaactaaattagtgataacatgtatctaaatactacattttagtgataagtaatttttgttgtgactaattaaaagtgatatatagtcacaaaaaatttatattgtgattaaattttttttattaaaggtagcatttttggtagtacatgagtattatataattattgtatttacttaatctttaatcttttaagcataaaagtaattgaaaaactaactattgtttgtaataaaagttaccaagtataagtgcaacacatgcatgtattgaaggacttaggagggtcagacacatattttatttcatataattaatttttattttaatttttttgtatacattaagaaaagaaaaaaaaaatgaacataaacaagagctctaccttgtcttttattggtttggccactgcatgcatgagcttaagtatttgtgtcccgactattcttaattaaaaattaacagttgtaataaaaaaatgatgtttataaggaaaatgactgatttgagtgtagagaccgtggatttcaaagaaaaaaaattaagagagagaataaaaaataaaaagatgttttagtaaattgtattgaaaacctaatattaaagatgttttttcagtttatatatttgattaaaaaacaaatttacaaaaataagatcaataatcctttttactaattaataatggaaaccaaaactagtcatgtttttactacattctttgtcttctatatatgtatctgtgtgtatcatgatcatattttattttgaataaattaagtgcttaatttacggtagagcagatggtcatattaattggagcttattctgggaatgaacatgcttctcctgcttgatgcatgtgcctcatgcatatgaagctatatatatataaatatatatttatatatatgtaatatctatgataatatatatatgactatgagcctacctagtatatccaatccatgaccagaagaacagaaagaaattagtatatatgttaacttttgatttctgtattccattattttcaattgttcttactagctagtgtgaatttgatgattaattttccttcatttcatgccttgaaagtgcaaagttaggtggtaatgatcactcagctaaacctaatattgatcatgattgattgtattagtttttgtaattaaacgccaagcaaaaatatattgatgagtaattaatactatgcatatgctataaatataatatggtcaaacatattaaacttttatatttgtaattgattaattaatgttgttaccaaaccaatgagtgtaatattaattttaagtcttcatgaatattaattaataataccatatgcatgtaacaggattaatatatggtatataatcccattgtggttgtttagttgagcaaaagaacaaagtaatagacaaaataataagtatatattttagtaattcgttaattttagttgctgctacgtcgttataatatatttttattttgtacattttcaaacctaccttaatcaaagattgacaggcttatttctggatatctacttttttttgtttcttaatttgtttatcccattctctattttctttctctcaatcattttccttttttccaagaacttttttttttaaaaaaaaataacactttattaagtctaacaaaaaatatatactactaaaagtgacatgcatttgccgttaaattttgattttgatttataactttatatgtacacaactat

SEQ ID NO: 300288 - DNA, 4244 bp, Cannabis indica
cacacggaaaagttttcaaaaatactgtatttttataaaacaccagtaaaacacaaaacagaacaactcaaaacaacagtaaaacaactaaaaaacaccagtagaacaccagtgaaacttaacacagtatactgcagtatgaaacttataaaaaatacagtaaaaaagtaaaaaatttcgcctgacagtatttttataaaaaaaatggcaaaagttagtatatcatgtaaatttcccacctaaaatctctcacactagtagaaacggtagggacattttcataaatacctagatataataaaaaaaattataagaataccaatttacagtttttctattattaattttcttttttacaaaaatacagagatatatttttttcattatattcaaaacgattttttttttttgacgttgttggcctcaaaaaaaaaatttggaaaaaaaatgaaaaatccttaaaaaatgtaaaaaaaaaaaaaaaaaaacttggtgtaaaaatccctaataattatgaacagccacttactcagcccaattttattcatgcattgaagcccaaaccactgaagggcctgccaatcaaatcttcttgtattattaaagtatatgtttttattgttatgccacaatgtcaaatatacttatatttaaaaataaataaacatacatttttacatattaaaactatataattattttttgtgatgatgtattttaaacattgcagagatgatgagtgaaaaaacaagctgtttaaatgtaagtaataaaatgattattaagtctcttatgttactcttaatttggaatttataatgtcattttattggaacagcatgttctaattaatatccatcttctttaattagttcataacaaaatcacataataaaacatgtaaatactattttagattttatgtttttacaaaagttactaatcagaacctctatcttatcaaatgataaattaaatccaatattttttaaaaaaaaattgacgaaaattaaactcaataacctattttatacaatttttaaaaatacaatgtctaatttatcatttaacaaaactaaaattataataagtaaaagatctaaaaaatggtattaacccaaattaaaaacattacatcgttgtgactagtttgaaaactttgatcttaattttgttactacttgactctagtttgaaagaaatggcagaaggttattatcaccaccaccacatattgacacattctcttactcaggtctctttcttttaaagctcataattgtttcaaaaattgttttgacattaatcttaaatattctattattcattgcagaaagaaataacagagctaacttattttgtggtacactccttagattgtgtgttcattttcattaatttacattaaaaaaaaaattgtgtattgatgaagacactgagcaacactcaacaacagtttgatcaacagagtaatttagttcaaaaacaagcactgcaatgtagaaatggaaatcaggtatttgaaattggaactgttcaagaacaaaatcaaagggttagcttaaaatagtctctttcaatttcattatatgtacttatgatctgatgtttttttcctttcttaaatttcaaccacagggctatatgtaatgaaaatgcaactaataatacagacaaaataggtaagaaataatgaaaacaatatagaaaattaaagatattagaactcactaagtaaacttaatttcttttgtcatttaatgatatagattcacttgaatggataggttgcctcttcacaagcaaaagcataactttgtgctgccaattttcatcaaatgggaagtatttggccagtgcaggcaaattagcttagcttaattaattaacttttgcattgattcataataatattggcagatttttgtttgggatgttggaactttaagctctcagtctactttaactgctcattcatctttcatcaccgatattcggtttcaaccgaattcaagtatttttgcatcttcttcatttgatggaacagtgaagaagatatgggatgcagccagagtaactacttaaatcttttctcattccattttaaaaatcctaataagtaataataataatgtttttccctattattattgtagccaaagcaatttctgtccaaccttgttggccactctagggcagtttcttcactagatttccaatccaacaataccctcttctcctgtgacattactaataaacttacacagtaatctacttgcactaatgttttagatgctaaggtaatagtttctatgtttgatattatgttataattccaaaataaaataaactattgggaaattctacaatggactcccttcaaatggatacattgatgcacctttgtctgttttagcacccgaaataattttttagtcaagttttttctcatggtcgtatacgttatagttattcaagacatcctacaaaattttaagaaatttggaaaagtttaacacgctaaaaactacgttcaaacagtgtgttgcacgcgtgactattttattttatacgcgtgtaaaatagattgtttgaacattgttttttatattgtaaattattcagaatttttcaaaattttgtagattatcttaaatagctataacgtacatgaatatgaaaaaaaaaattagactaaaaatttttgtggatgccgaaacaagtcaaaggtgtatcagtacatcccttttaagggggtgcattgtagaatcgccctaaactatttccttaaattatgtttaatttgaactgtagagtgctgcaacccatattcgattccaacacaacaatggaaagcttctagcttttgcatcaggaaatggagttggttttttcaacactcagactagaaatgttgtgttcactaagaaggtattcatagatccattatcaagattagttttttattatgtatttagtttttttaattaaaaagtttatatttttattcaggtacataaggaaactgttcatttagtttgttgggattattatggggaacatgttttttctatgagtgaagatagagttcaagtttggtcattatctaaaggagaatgtatgtatcagatagtttcaaatggaaatacttaccatgcacaattcttatttttatggtcaaattccattgaattgatataatatttaaagtttattaccattactttcttgccaataatatatttaaagttttttatttgagcagagcctgaagttatggaatgatatagcccaatgagggcatcatttgaagctcatggtggaaatgttagagctctagctgaatcaaaggagactaatatgattgcctcagttggcgatgatcactgtgtgaatttatggaaaggaaaatccaccaatgcaagtaattactgacattgcattttgatccagattcttatttattcatcaatctttcaaaaatttatatatttaaaaaagctaaccaaatacagatcaggtccttaatgatttaatatgcggtatattgtatgaagaaaagttaaaatatgataagagaagaggtgcttctactgtgtaccccgaaaaatgagtgtaatgatactccttttgtgtttttgatattagaattgctataatctcgattttttttaatataatggtatatattgtaattatctaaaatatttcgctagaaatttaaaataatttataatatggagagtgtagtgttcaaattgtctatttcacactgcaagcgaaacgaacatactttaaaatcaaatagttatgaatgaacttctaactaaaagcttaaaaagatcaaatattagtgatcaaaggcacaaacttcttgccatggcaaacacgataccaaatatgaaagcatagaacctaaatcctaacagaactaatctacaacaaatacagtgcttgcctgaagtttgactcgaaacaggttgattccgtggcgtcctactggcaagagtcttgcatctgtgcattctagcatcattaagtgagcaagctgaaggagggaaaatgtagaaatgtgatgaagctgataaattatagaagaaaaaaaactcatactcaaagcttctaaggactatacacacaataccatcatcttcactctcagtttctgtgtcaacctcttcttcactatattcatacaccttaggctgaatacttaaccattttttcatcacaagagaaggcca

SEQ ID NO: 300289 - DNA, 1815 bp, Cannabis indica
agggcataaaacctaacaaaaacttcggtcaacaatggcgaagagaataagcaaggaaagtcagatcttggttggctactgtagcccacttctctgcacccagttggcagtaagtgtcacatgttttctcccatagatccgctacaaacgaagtcaagtcacttccaatcgtcggctagaaattttatgagatcgctaagcaatcaatgattgaagcatgagcatcagtaaccgagtttttgtcgaacaatttagctctgggtttgaaagcaattacattggttctttgttaaatctcagttgatttcacttcaggaaaagttgaattgcctcttccatttggatttgatgttctttcatctgctcaagtggtcgacaggaaaagacgaagtggatgaaggaagtggaggaagcgtcatacccctggaggatggttgaacgtttgatttggaattgggtctagagtccttttgggattataaatctctttattgatccaggaactctttcttagctctgactttttctttttcgcttccttcctctcagcctccttccgctcagcctcttctctctcgttcttctgacattgatttagctccttgatgacatccactttagctttcttcccatccttgtcaagagtggaactaggtatctacttgggaaaaacaactctctcaccatcatcttcttcatcttcctcgacagagataatttgttgttcaataagtggaacctattgtagtggttccacctgaagggcaggagactcactagccttcaggacacgaatatctgaaacaaccttcaacaccttgactgggggtgctgcttctttacttcgttattaagaagatactttggtcttacttgtccgcttggtaggtttggcaacttttctggcctcctcacttcggacttcaacgctattcataaagtcttcgagtacacccatttggacagtctgagggttctttacaaataaaacatgaagactaaatatatggaagcagtatcataagcatggaagtcattaaacaacaaacaaagtaagactcaaatctgaatccaactattaccacgactgtattttggatccccttaagtaaataacgaaatatcctctcggtctaataagctaccgtagtggaagaaacctaaactctttatcaagacaaaatgatttactctaagacattaggaaggcgaaaggaaatggtttggactttctaccatttcatctaccctatcatagtaatgaatcatgcgatatcaaagattgtctaattctaataagtagggatcaaatcctctttgatcaatgtaacctaagtcttatagatgtggaccgcagaacagttgagacagagagttacctcttccaaatatgctagcacctggagtgcttccatccagaatgactactttaaagtagatttctagcttcgtctcttcatttataggttctgaatgcagtcgggcccattcttccagccaacatttgtctttatttatggccttttttgcctcatctgcaatgatatcctcaataacttttttgactttaggaatatcattatggatatcacgagcattgtaagcgtcaatgctttgatgaggggcaatcagactgactcgctagtagtggtgactaacctttccacttttaaagcctcctaggaaagaccttggtacaatgcttccttttcaagcacgaaaggagagggttgtgggcgagagatatcgtctgaaaaagaaagtaaaaaaaaaaaaaactctaattagattatgaaagtcctaattactaccagt

SEQ ID NO: 300290 - DNA, 3718 bp, Cannabis indica
aagaaaaataacctgtgcatagtccagacagcagtaagaatgagtgtgcattttaatcttctcatccccctcctttgtatgtccatccacagttgcagctactgcagcactaaaaatctttgcccccttagctgtctgcaataataggtttcatactcttacagtgagttgataattagaagaaaaactaacaaaaagacagatgcctaaagtcacaactacaaaaggcatttaattgggttaaaacatgcagaaaaccaagtgaaatggcacatataaaattaataagatatcagccaaacaattatcaaactggaaaaacacagaagaaaaaagccttcacacaagctatacattcgtagaaagaatattcccttgcatctttgagcataaattttgtcgttcccaagtcaagtctcaaccttagtacaggacaggaaaatctaggaaaatatcacataagacattgtaaaggaaggaagaaaatacagctgttaagcacctgtaacttaattgtttttctatccccttcaactgctacaaccaaatagaacctagtttgattagttttggataagaaaacaattttacaaatccaaaagacttaagagagacgcactaaaatattggttatttaaaaaaaaaaatactaacctcgatttcatcaacacatacctaatcccgtaaaatttaaaaacataacttgattctcagcttgacaagagaatggaattttgttatgacattactaaccaatcaaattttaaaaaacaaaattttactttttaaacagaactttcaaatcataaaacttcaaactattttaaaatactgttttcaaaatagaaaccaaccagctcctaagcttcacgtctattattgcatctctttccttgatccaaatgagcaaggagacaatataaagggaaaaaaaaatctaactccagtttgatttgtaaatattgatctttgtgatgtttcgaccctttctttcatcatcgtaaaggtctttctcatgtcaacaaagaaagaatcaactttgcattgtaataatctccaaaccctaaggggtggtctaatggtatggagtattggaaagtgcttgtagatatttgttccaaggttcaaatccccaaagactcaaaaaccttgaggccactgcgaggtctcccagtcgaacagggcccaaattcaaataataataataatctccattgccaaaatcatttccaatttgcacaggactggtgcctaaaagtaacttaaaattcttcattatttttttccaaaattaggatccccaccttaccaataaccctataatatttgaagaccagaaaattatagcaatctctatgtagtcgccctagagtcacagaccttacgagagtataccatatgcttaaccatttgagctacctctcttggatataatcttaatttcataattcagagcttaataattgtactttgtctcttattgaggaatacatagatagtaagaaaacaacttatacaaggccgttaacaacataattacgattatcaccattttctcaataatggagtacgaggccttactacaattcaaccacatagaattcaaaacaaatatgtaacctagttatatgtagatatgtcatataacctatctagtcattttaaactccaaacattctgctctctacaactgtcacatttaaatcacatttgaagtaatattatttgtggaagctaacgcaaagcatatataaccaaatcatcaaaaataaacaataagcataagcattactaacctctcttctatgatcccgggtaaccaacttttcttcttcaaaaaaccgcaaagttcttcgaagctgcttcgagtgcagctttaaatccttcgccaaatcttcttctcgaacccattgtcgtctgaaacatgacatactcaataagcaacagccatacttgaacaaaaaaaaattgctaacagaaacttatccctaactagcccctataaaatagcacaaaaacaataagaaatccaacgttaaacaaaaaataataataatttgggattcgcaatacataacacgctaaagaaggtattaagaacacccagaaacaacgttcaattattcaaaagagaagaagagccaagggtaccaaaatgaaaaccttgttagggcatcgagtaccaccacagcgattcccctattgtcactccgaccatttttgggttgattatccccttttgtagttatatcatcgtagaaagctctcgccgcaagcttcaccaacctaaaacaaattcaacgacgattttcttactttaaaacaacaatggatgaaacattcttttttcacttttttttcattcaaattttatactttcaagaaagaaaaaagaatacctgttgaaaggttcgacgctcatggtttgagagtctcaataattgatatttgagtttggaatttgttttaggttaagttttggcattcaatttgggtaatcacgtttcaattgatagagagagactagacgaagtactgtgatctctgcgataacaataaataatcacttgagaaaactcttgataatatgcactgtctttgatacgaacaaaataacttaaaaaaaaaatccttaaaaaatattaaaagcaagaactttaaccatgttgatcctaaaaaaaatctaaagacctcaagaaagatagccacacaattaataagaacaattgagtcttgacgacggtcagctgatacagtgcttagtctaaaatcttggttttgggtatgagactagtatgaatatgaatatgaaataagagaggaaggtacctggtgttttggtcggagggagccttcaatctgagacgaggaggaagagaacgattggggggtttggtctggtggtctgcttcgagttcgaacaggatggggatttgggatttaggttttcttttatttacattttttttttaaaaaatagaaaaaagaagattttgttagatagtgaaaagttagagcacgtggttattacaaaatatattcttaagaatagaccagataaataatcgtccaaaccgattatgtgcaaaatatgttaaattatgcacttctgccttataatttgtataatgatccattagtactctctcttttaaaaattattcattgtagtcaggggtgaacaagatatgggtcaaactatttaaccggccaactcaatttatttttgtagtaaaaggttatgttaagagtataccatagttcgttgagttgaaaagtgataggtcatataattatgggttggttatgggttgaacacattttaactctatataacccaaaccaactcatttcttaaaaaatatttcaaatttgaaacaactttcatatataaaatatattttcgattcacaaaatatatacaaatatatatatatatcacgtttttatacataaatttattatatttgtgataaccttagaatgcgaattaacaaaaatacatcagtaacatgtagtttatagttaccctactacttctaccaacaagcctagtgtaagaatcaatcactattattaactttgttactcacacaatgataccactactatcttagttttttaaagcactatactacacacacatatgtatcatttttttttttgttgtatgcactaggttaaataataatatcctatttgtaacataaatattaaa

SEQ ID NO: 300291 - DNA, 3841 bp, Cannabis indica
atgtattgtacccaaaatacccttacataagagaatcacatggaaagtatcttgaagtgataggggtaaaattggtacaatgtttaaaaaaagagataaaaatgatagattttaaaaaagaaggtaaaaataaaagaggacaatataaaaagggtatagagtgtaatttcctcaattattagcctccttgaccccaaaaaaaaaaagcccaactgatccattccactctaccaacatcaattttcttctacaatctaattgctccaccacgtgatgaggaatttgtatgctacaaaatacctcattggacatattgaaagaaagaagtaaacctttttgtgttgaataagaataacaacaccaatacaaagcatccttaacatatattgatcccaagcctctcaaatgactattatttaaatttgggatagattctattatctctctttcaatcttaacttctctccaattattagttcctagagtatggaccatagctatgaggtctcgacaatctttgttacaaaagatcttaacacatttgtaaacattagatttagaatcatacccaaatccacttccaacaacttctacaaaattaggtggaaaacaaatgggtcctcgaagtaacttaaattttctaagtgttggattataaaaaacagttgaatcatcatggagaccaaatatatgaacaatgccattacaatgggagagttgtaaaaagtaaggaagatctttatgatgttgcttcatttcagaaatatttagtacttgttcaataacatagtcaccaacactagttacaaacttgagagtgggttcttcatcatcatcatcttgattgtacccaacaaaggacaccatcttctgactagtatgaacaatgtccaaatgtttgtttacaaacaatgaagtattagtaagattaaaccaagacttacaaacgcacctacaaattattaagcagtcaatgtccaaccttaataaaatttgctctactaattcttcaggaattagtagaaatctatctacttcttcctcgactagtattgcacctgttcaaattcaaaactctaaatcattagattttatcattaattaagagattaatgatattggagagtattgtctacatagattaaatgtaaaagtattgagtcatatataagaacatagttactccactcattgctaattggttttgagattgaacctcatgattctcaacaaattacaattcaaatatatatatacagtaaaacaataataaattatacatagagttacactaaaaaagaggttattatttttaaatagaggttctactgtaccttgattattatactcattagtagagagggagttggtgtggagagtttgatgattggagtgagtaatcttcttcccatctccacgcacaaaaaatccaatatcttgtctaaactcaaatacatactcaaccataataacaaagagaacacaattaaataagatgattataggtgtagaacaacttacaaggctaccaaaaattacgagacagggagagattgaagcttgattaagaagtgaagaatgggtttgtttgagaattttattaggttaaaattctagatttatatataaattaaaaagtttatcttaaccaatttattaattttttccacgtaatttgtgcgtggtgcttaattatagaccctcaataaatgctacgatatcttaccaaatatatatatatatttaattgatgaatttttatgggttgttataaacaatgagatcgcaaagctcgatcaaagcttccatggaaacctgaggaatactgaaagaggaaacgtaaagctctctgttaatttttttctgccattgtttctattttggtacgaaaaatgaaatgggtaatttgaattttccatttatatactcttcccatataaatatatactaaatattttatttaggaatattggctgcaaattttaattggtgcacgtaatataaattatttaaatattataaaaattaattaagaataataaaaatattaaaataataataataataaaactaattgttttatttttattttttttttttttgaagaaacagaagaatcgggcttcttgaggaagaagaaaaaaatggagaaaaaaagttatttagttttatttatttttttaacatttttatcataattaatattctttttatttatcataattaatggaattttatataattgatacacgtgtgtgaataattgtttccttttccaatttttagttttactattttaaatttttggccacaagaatttttagttataaaattgtgaaaaaattacaaattctaaaaaaataaataacaaaaagacaaaaaaaaaaaaaaaacaatcttattatttcattatcttttatatgtattttaatcttctatattaatcttactaatgtcttttgttattatgttaatttattataatataaataatcatgaaatgaatatacatacgattttgaactcttttgatattgtttaaatttgatttgattttttttactagacatttcattaaacctaggaagcaacaagggagcaaccttaagagccaaatttttggaatttacatttggggctccattgtttgttggacacttgttctttcaattcttctattatctttatcttgggttggaatgagaataagagaaatgagaaagtagccattgttataggactaagctagaagagtttgtaaattaatattaataaagcaaaaaagcacaccaaccaaagtaatctatctaattctagacaagaaagtcaagttcaaacataacaccaaaacaaactcatgtattttgtatatgattatcttgcactaaagacaggttctgcatctgctttgggttgtgcccttctagtgtatttgagaagcaaaccttctgatgagacacctggtacagttaagtccctaaacaaagttccaacaaaaacaagaaacaccatgttactacctataccatatcaactaaaacaacaaacaatgtatcaaaggaaagatgagttggttggttaaccttatgtaaggttgcaagtccctccattcccacttctgtctttctttgaaaagaatagagaaacgctcagccggagttgatggcagagatgaaacgctgaaagggtacacccatgaatcgacaccaagtctctcagttaaaacttcaccttccagcatttcgaaattgatttgcaaaccttcgggtatctttttcttccactcttccatgaagctttccatcttcctttttccacctttcaagatttgtttcgcaaaatgcacacaaactttcttctcatctagcttccaaacaccttcggttaacttttgaccgaaaacaagcaagccatgctcagcgagtttgtgaggataaccatctgattgcagcacctccacaactttatcatgatcaagtgcatccaaagaccagtcattcaacactgaattgtttaaaagcatcttaagcattgtatccatgtacctttcatctacaactctccaatacccgtcaatttccacagccgagagtgcttgtaaaccagacctcaactcatcgtcgctagcttggattctttccccgagagcatcccatgtaaacagtcctcgctctgtttctgacacatcctccatttctatgtcatcatcttcagagctgtaagggttcatagagaggagatatttaagcttgtcgagtttgggagcaacctcaacgagctccattgtacccggagcaactttaataacagatgcaacgggtatctggttttgagctttctg

SEQ ID NO: 300292 - DNA, 1122 bp, Cannabis indica
tgttgggtaaccgtgtagtggttttttggtaataaaattaatattttgtatttttaatgtaaaaatttcttatgtttatggtgcctattagctctttaataataagtgcttatagacaaaataataggtttacagtttctactgtaacaaactatgcatacggtataatccactctaactcatgtcttactgttttacacttgtagacaaaataatgcgtttgaattgaatgttgtggtatctcaatttcaaatttccaaccacacagtattatttttttcttagtatattatttttggaatagttggggaagtttggttccgttcaacttcgcaggccaaacccactggggcctagaccatctttatttggacatttccgaaacagatcttatataattataatctaattttagaagtaatataatttaaatgatatacatggaaagagttactcaatagatgacttatcatttatattcaatcataaagtgataatactttgccacatttgaagttaatactaaatatggtgctaagattatacattatatatgtatcatcaatgctaaaatttaatatgaaaggaaaaataaaatataaaaactctatccctttgctgaaattttggaactggttaatttgctagtttgagtcgcaattttatgatcaatttccaaatgtgttgagaatcttgaggatctatcttaaattaaatagtaataactgttagactttttatttgggcttacattaaattttattggttttattaaaacttgggttgattggatagttctttgctgtgttagcccatgttgttggtgatcaattgttaatgggcttagcatctgtgagtaaagtctaggtgaagcagaagtgtgggcttttctagttgactgaagcctttgatgagcaggcccagcccaactagggttttgtagctaagtcccctccctaactctataaatacatattgtctcatcacaattgtataccttttgataatcagagaaaataaactgcttctgatttagagatctagggaggaagacttagttgatagtattgcactatcaaattggagtaactgctgtggatcaatcagagataattgctatgg

SEQ ID NO: 300293 - DNA, 1944 bp, Cannabis indica
tttcctttttttttttagtttaaaattgaagaaaataaaacaagggtaaatatcttttcgaaaaagtttatcaaaatcaagaagattaattttagtagattctgaaaaacaaagagtcaccactaatatttgcttttgaccaattttaggaaaatgtaggtgactaatcctttgctaaaaggctacaaaacactattcaaaacgtgggaagggaaaaggaacaaaactaagtgaaaattttccaaaatttcataatcatcagcataaaagtgcttcatttgtgaactttgatactttcaacttcaacatccatagtgatgagttgcacttttaagcacttgaattacaccatttttctcactttatcattctgaatgatgcacttgagctcgcgccacagctaatgaaggtaagatagccaccgtctcgccatcaagagcaagaaggtcaccattcttgaagcaccttgcactgaattttgcactgttcaacacacagcaaagacaaaatgagatgagtacttagacatgaatcccaaaatggtatttgaaaaattatctttggcagcttaggatggaacttacagatatttgttattgatttttcttaaggtaaaagctttcatctcagctacaatcacttctccaatatagaccggtaacttgaaatgtaggctctgggaaacatgtatagctccaggctacaattcgcctcggccatgttagcaaagagattagatagtttttataggatcatgttcttaaacatttcacatcaaatcaaacagttcccagaaactttttttcgagtagacagttagaaatatcacaatggggtacaaatggacttttcccttttatgtctacaagaaaataattgaataatctgaacaaacaaatacaatgaaggtaagagatggaaaatctaatggagacatctgagtttttgacttacaaaattagaggataggattcgagaaaacaaggacgaaacaagcatcccgtgaactaatcgatcttcaaatccagcatttcgagcagactcggtatcaaaatgtacagggttatcatcgaaagtaactttagcatatttcactagatcttcattggagaaaattcttgtatgctttaatgaatctccaactttaagcaagcaagatgctgttgatgaaaagcctctcaaagaggcattgtggattgagagtagactcctttttatcataactgcaaggacttgaaagctaaccttagcccaatattctcaaactaaaaaaatcaaattgaaaaacattaatatcatagtaaattacttatcaatcgttgtgaagaagctcaaacataatattttaagagcataaaagcatgaatggttggtactcaaaaactagtagtatgtgctctcacttgtgagctatggcataataggattaacatcaaagttgatacaattattaagataaaccacctaaccaataacattgtatttcttttttaattcaattaagattgtacagctcacaattatcataagcacaatttttctgtatgtttatatattatatatatacaaacaaaataataaattactgataactaagaagtgaagactttccaccgcttatttaccattgctatgaattttggtttcacatagacatttcatcaaacacttagaaagcaaactaaaaatagtgtgtgcacaaattctccaagcattaaagaagaaagaaatgtgttgtaaggaaacccaattggcttacttacctgaatccaagcatcagtggactcgtcagtctgatctaacgcagaacctgagaatatcaaaatatttgttattttttgttcattgcttagccaaagtcatatacccctttgttactttatttatatatttttatatactaggtgattgttacgtgccaagccacgtagtgttagttttatt

SEQ ID NO: 300294 - DNA, 2020 bp, Cannabis indica
aaccatgcaacattaaatgttatttctgatctatattaataagtaaatctgattaaattgacgacagatctacgtcaatttggtttaatgcttgggtgccaaatggagaacacatgccgcatcccctgttggatgcaacccaaggagcaaatttagtaagctattttatcaatgagaatatgtcatggaatgaagaaagggtaagacaatggttcaatgaaagggactcaagaaacatcctgaacattgggctagctacctgctcaaaaccaaccggactcctagaggtggttaggtgatcctaagggcactttctcggtaaaatcagcgtataagttggtgacgaactcaactttgcaggaccaatccaattgggattggaagattctatggaattcgcctatccatgggaggttgaagatgctttggtggcaactgatgagagatgctctcccaaccagagaaaagattagaatagctatatctctccaatcacgtgaatgtcctatttgtgaagagggagaggagacaactttacatctgttctgggaatgctattttgcaaaggcaatctggcagtctgtggggaatgagagctgatcatttaaactgtcttaactagacagattggatgagttggttccatgacaaaaaacatagaccacaacacttgtcgtttgatgattttatgacaggtgctctctgtatattcaaagtaatctgggaagctcgaaatgaagtggttcacggaacgagactccgccctataatggaggtcatcaattcagtgaatcggttatacaatgatcacctgtccagatggaaatcgaatgctaataagagagtgaacaagcggattactgaagtaggttggtggaactgttgtaccgatgtttcaattcagccaaaccaatcttttggagcggctgtgtttagagatcatatggacagaattgtggcaatctactcggagaggttctctactacgaaccctacgttagcagaagctaccattttggctagtgcagcagagtttgcaagggtgaatttgaaggggaaagtcgttttctactgtgataacaaagtggtggtcgcaaattgctctaacatctgcaatacaaaccagaatattgacatcaagggagtggcagatcgtttcaagagcacggtccggttattggatgatttcaagttgagaaagattgataggaattgcaatttcatggcacacaactcagcaaaatgggctgcttcagtcagtgcacttggcgttcttgatttgggaaccatggatgcgaatatcttttcaaatgtccgtgaatggtcccccgattaatgttggttaagatcttagttatgtccctcatgtggaggtgtatgtttgttttttttttttctttccagtctaattttattttcagttatttcaatttgtttaagtcttcctagttattgttgtactcagtcggctttgccgtttttaatgaacgggggtttacaaccccccctaaccaaaaaaaaatctcattattctgtacaaatttaagttactatgcattgataggcagttctactatgcattgataggcagttcttctttattaatattaacttgttttttttttttaataatatacatacagctctgataaacttcccttctatggccatgtataccaatctaaaatatagttaaataattagttcaaattttgtataggtgtttttgcgattttccaaccctttcaatctccatacattattaatgtacatatatgtgtgaagcttacatttttgtacaattcttcaataatgttaagtcctataattatactttacagaaagttttggatcactattattaaataaaatattctatatatttaatgcaggtaatcccccagagaatcaaccagaaaatcggtgtacaatgtgcgaaaaattgtctatgaattttgaaagccctgaagccctacaaacacaccgaaaatcgaatcacaaacaagacaaacgtggtaag

SEQ ID NO: 300295 - DNA, 8803 bp, Cannabis indica
tttacgacggtcgtataggcgatagttatagaaaccgacgggaatactttaaacgactgtttaaaaatgttgagaaaaaccatttttgtagtagtgatgacaaagttatgaggtcaataaggttaacacatttacatatatacatatgtggcctagtgggagattgttagaaattattggggtcacaattgtatatataaaatgtatgttaggtcatcaaataaataagtcaaatttatgtggtatattttggaataaatgtcatgattttaatgtgtggataccaattagacaatttctattttggtgaggggccaaatagaaatagttaataaatattaccaacagttttgtctgttggtaatataaacaggtattggtgcccatttttttcatcacttcacatatcgtattcttgaatccccattatcaagaaactcaggttccagagaaaaaactttgatgcaaaagttggaagatcatactatttaaagatcgattctatggatttcggtacgcttccgctactctctaatttattgtttgattctcatgaattaattagggctaaatttagatttacaggtattctaacaggacattctcccaagatgatattcttcaagcgggtcgaggtagaaaatcttacatcaacaagatttatgagacacttatagcaggagcaactcgagttgattttgagaaagtagtttggtgtaagctctcagctctgaaacactgtttcatcttatagcaggtaatgcatagtaatcttcttatgggagacagtctttgttaagaagcatatttttattgattctgttgtttgccatgtttgtgagttggacttagagaatcatgctcatctctttcttgtctatccttactcatagagagtgtcataataaataaggagttggctgaattctaagaggcctataaggtgataatcatagagattttttaatgcagtgttagcagaagcaatatacgatatttggttagatcgcaacttgtatatatttgagaagaagtgcttgccaccgaaatgtatagacagtcatcaaagagaaaattatcaaattttgatatattggtgctaaaaaatgtgaagaaattgtaagagaaatgcttggggcgttccctgttgagtttaattaatgaaaatatatttccttgacaaaataaataaataatatgtattattaatttaacttactaatatttggaggccgtgatggtgtactgattagatagtttgtgaaggaaagaatattaatagatatgaaaaggtgaggcaagatgttaacagtagtatcattaaaaatattagctagtaattatatagtgagacatatatattataataattacattcatattactagaatctgcaggtagcttgaagtaataagtagtagcactctcttctatcattgttatagcaataattttgttccagagtttgataccacatttgacttttttttcttctcatttctaatgactgcattaaaatcttcaccataccatcatcttaatttctctcttcttttttcagttaggtagtcttgtttcccgaactcatcataattatttgtctggggtcccaaaaatatttccttttgtgcattattatatttggattttttcactattaattggtggtgtgaaccaatatatatatatatataaatatttggtgattattagtactatactctatagtactactactactcccccaccgaatctaataataatcattatttgggggcaaaacagaatatatataaatatatatatatgtatgacacatgtacactttcaaagagacaaaatagcttttacttgtataaaaatatacccactttctcatttcggacacaaacctaattatatgccttctacatctttatatgaatacaaaagaaagtacacaagaatttagtaggcatcttatatttgttattgtatttttaaaattttataatatttttagattttattttaaaaaaattactactcatacaatctcaaagactcacaatgttaaaaaatattaaagtgttgtctatatatatgtaagttttaaaagataccttttgttatgttactttttttcattaaaaaacatatttaatcaatatgttacctaatatgttttgagtatttatttataaattaataattgttaattattttaattattatttttatatttatagaataaatttattttaagaattttatttttactattatgcatctcgaagatgacatgcaccagactgtcggaagttctcccaagtttggttcatgataaccaaggtgcgtttgttcaggacagactcctgtgtctcaacattctgatttttcaagacttgctcaaaggttacacaaggaagaacatctcggccagatgtttctgtaagattgatattagtaaagcttataacactgtggattggggtttcatagctgatctcttgaagggtttgtgcttccatgtcagattcatttctttcattttaacctgccttcatggagcttcttacactcttttaatgaatggaaggtgccatggctcgttcaaaggtgaaaaaggcattcgccaagcagacccaatgtctccccttttatttaactttagcatctctaattgttatccaaattttcctttaatagacacgtggcacgatcatggcagggatatgaattctacacgagacatccaggaaaattaagggcaaataattcctagaaccgagagtcgataagaggtaatgtctacctggagcggtttctttcattaaggaatctgaacaacgatgtaggttttagaagcccgggacacgtcagctccttggaaaatggcgctccaaagataattacacctttttcctgacataggatcaaatcttgtcccctgtgccaaccatggtagtgcacgtacgcaccttcgaatgcgctttttgcccaaaggcatgtgtagagactatttcgtcaaggagagacctttgcacgatacgtgtccaaggtcatacaaggcccctcaccagtcgcgttaaaccgcacgatgaagaaggttcccacaagtggatggtcagatcgtccttcctacagtaccagccttagtaacatgtggaagacgaaaccctaagtaggcaaagagcatgcccttcactccatctgcgcctatatataccatagttcttttgaagagaagggaaagagaattttatctaccgttacccaaaaatacctaactataactcttttgatacgaagttcccctgctgtaatacattgtaatctcatattattcgccctaagaggctaataatattgactcgtggactaaggatttttaacgcttgaaccacgtaaagacttgttgttcatattatttatagcttaacatttcctttaatctctcaaaatatttagtttttgaaaaactcggtaaacatttcagtgcttccattgagagcagaaggaagcgtggtagtgttcgtcaccttctaatcatggtacagatgcgacaaaactccagcaaaagaactccagtagatgcggtgatggaggaaggtacgtctcgtgcagttgacgcacatggaaagtaggtagagaaggcatagccgctactgagaatctagaaaaaggtagtaccgttggaaatctagaagcgaatgatgaaaatgttgaagatggtcatggggatgaccagtataatgaaacatgtgaggaggaggacgacaacaactactacaaagaaaaatattataaatatggtctgtattatgagcatgaccctagcttgctacgaataaccaaagagttggcagctccacaggaggccctagagaaagagcaatagctcactgcaagaatgaagaagaccatggagcagctacataaaaagttcagtggttaagatggaactgatggggaaccgtctttagaagaagtagctgaggggcgaacctaaacgcaagctaacgcatgagcccagaacccccgtacagacaagggcaatggtaaagtaggagaaccctcacgaagaactgttccaaagcctcatcacgaagatgcgcctccaatcagacaaccctggaggacgtagaaggccaccagtgcctttgggcctggatgcccctcagaccctcgaaacgagctgcaccaaaaggaccagcgacagagttctccgggcctaagaggagagtgaatctactgagtgattcagttaattaggatggaaggactacagtcaatgatactgaggatagttggtctacggcagacttgcgacaacggctagacgtaaagtatgaatgatacaaaagtgaaagggcaaggccatgtggaggtgacctacgaaatcatctgcgtgacaagctgagaggatgtgacctcccaagaagtgaaaccaaaagactagaagatcaaattgttgccttgaagaaattgataagaaaagcaaagtggagcattatttgatctgaagacgaggacctggaaccttgtgtcaaaaggatcgcagaaaccccccttcctgaaaacttcaatatgccgcatatcgaattgtataagggaagaattgatccgcgaacacacttggctatatacaaaaagatgaagcaagtcgctcgcgttagcgatgacactaagtgcctatgtttctccctgactctaactaagttcgcgaaagactggtggaagtggctatcttcgggatcaatcgacaattggaaagatttacaatatgcatttcgtaagtaatttattgtcgtgtgccagaagaacatcgaagtaggctctctaactaatgtcaagcaacagcccaatgagagtttgaaagcttttattcgatgaatgatggaggttgtagctaagacgaaggtcagcgatgacttgaagttgatgggccccccgtcaggattggttgtaggttccttgttatggaagaagatgcaaaggaagagggctgaaaccttaagtgagtttatctccaaagctcaagtcataattaatctggaagacgcctatattcaagcctttagagtccctccggcaccgatgcctacaacaactgctctgagttttgcctctcagatgtctgcccccgctttatcacttctcagatcccagttctcctggactgtgtatgggctcaccgcatctagccttatccccacacaaacccatttctctaggtactatgtggcatagactgggtgtagtgcagctcttggatagtctaaatctgaggtccaaatttcaagtgcggggcattcacgagggaaaagaggagaaaagaaccgtagtcaaaatgatttagtaaataagccaaggaaggactatgatctgaagtacactaataaatacacgagcttaatagacagttgggagaatgtctacaaagcaatgtgcaatatggtccattactaaaagcctccgcgcatgtcgaatggtgggaggaacaggcgggaccaaagcaaacaatatgagtaccacggggaaaaaggtcacactacaaatgagtgtgaatacttaaaggatgagctctagatgctattttgagccggacacttaggacactgggtccgaatcccaatcatctatcccaaatagagggaggtcaagggacacgtgatgcttcccggatagcagggcgctgtaaatcccccgcagggggttgcacgtcctcaagctctaggaacttctttgtttgctttctgcttcgccagctccagctggagtaaccatccaagctccaggaccaggaactccatatcttctagggatggctttgccatcagtggacaaacacgttggaaaaatatcaggcagaccccatcttgccgggagtaccatattgcttagaaaagatacttaaaagaggtagaatatggggaagtgtgtgtgcttgtgcagtaccctgtgcaacgcttgaggaagatgaaccttctaatgacattcaccgaggatcacgctaaaaatgttcatttccttcacaaagatcctttggtaattgatgcgcagattgctaacaaaagagtttctaggatcttggttgataatggaagttctgtagatatcttaattaaatttgcattctaagcaatcagactcactaagggggatttaactcatgtcctatctagttgcaaggcattaatggtgataccctgatgcccatgggaaggatccaactgccaatcaccctcaagggagataacaaggcgaatgcattaaaacactcaatgttcgtagtggttaactgtcccacagcatataacacaatattgggttggccaactcaagtagactttcgtacagtgtcctccatctgacacctatgtttgaagtttccatgtgataatggttgcattggcaccattaatgggaatcagcgaagcacaaggaactgttataatgttccaacaagagccgtgtacatggttagagaaagagcgcccagaacgcttgggttagagcacccgatggacacagaggtcgcactagaaaagtatgaagatgggttagatccaagggtcgggcttgagcaaaatttagaagccatggaagaaattgaggaagtgagtatctgccaagaagatcccaccaaaattattagggcgggaaagcaccttccccccgtcgtgaaagaagacgtaattaacactgtgaaggaaaactaggatgtgttggcctaaagccattctgatatgataggaatcgattagaataccattttccatgctttgaacatccacgaggatgcgacggcggtccgtcaaaaaagaaggcccctggatcctatcagatctgatgcagtcaaggtggaagtcgacaagctaacgatttcctttgggaatcgttgtacccagtctggctcacaaatccagtccttgtcccgaagcccaacggtacgtggaggatgtgtattgacttctgaataaggcctgcccaaaggattatttcccgttaccacgaattgatcaggcggtagatgccatgtccgggttcaagttgcttaccttcatggatgcttactctggatataaccaaatcaagatgcacattgctgatgaagaacacaccagcttccagactgataaaggtgtttattgctacaaggtgatgccatttttgcttaaaaatgtaggagcaacgtactagagaatgatgaaccagattttcaagtaccagttgtgccaaaacatgaaagtaaacgtggacgacatgttggtaaaatctaaaacgccttaggggaacagtcgagatttagaagaagctttcgcagtcataaggaagtacaggatgaagctgaatcccaaaaagtgcaccttcgaggtcttttctgggaagttcttgggatacatagtcagttcataagcaatagaggccaacccataaaagatcaaatccttcatcgacatgccctctcccaagaagcataaagatgtccaaagtgttatgggacgtgttgctacccttagtcggttgatttccaaatctaccaacaagtgtatcccattttttaatgtgtttcgcgacaacaaaaaatttgagtggactgaagagtgtgaggaaactttttagaagttaaaggagcatcttaccaaggctcctatattatcgaaatttatggaaggggaagatttttttttgtacctagcagtgtcagatcatgttgttagtgccgcacttgtgctagaggaggacaaggtccagtatacggcgtattacatgagtaaaagattgctgggcacaaagtccagataccctatgattaaaaaactaaccttttacttacttatagctttgcaaaagctgggattatacttctaggcccacgccattagggtacttacaaatcaccccctgcgataggtactgcagatgccagaatcatttggcatattactaaaatgggctatagagcttagccagtttgacatcctttaccagccgcatgtgtaaataaacaggcaagccctcgctgattttatcacaaaatgcacgtgtttcaatgacctcccaaaagaacccatccctaagctacctacttggacggtctacgtcaacgacgcgtctaatgagaaaggggtacgggttggagtaattttattctccccatagggacactagctccagagcgccctccttgttgagttctgtgcctcgaataatgaagatgaacatgaagttatgttggtaggtttgaagctaacgaaggaagtaggagcccaacaagtggatgtttacaatgattcacaactcgtggtgaatcagatctccgaggaatatcaaacgaaaggcgaacgaatggttgcctatgttttaatgtcacaagagctgttacagggatttaagaattataatatacgataaatccctagggaataaaattcattcgctggcatgttggctaagttagccatagattcaaaaatcatggaacatggaatagtccctgtgggccgcctgcaaagacatagtattgatacctaggggtaaatgcggtagcgccaataattcacactcctaggtgacgccaatttacaagttttttagcgtaggagaactccccacaaatcgagctacgtcatggaagggcaaatatcaagctccatgttatgtgataatggactgcaggctgaaccgcaggggttttcctatgccatatctttttgggatttcttccctaaataaaactctatttcaatgtaatcttttctattcaattatcaataaagaaatggatttaatttcattacttgtttaatgtgttatt

SEQ ID NO: 300296 - DNA, 3309 bp, Cannabis indica
tatatacccataaaatacatatattgaatttaaggggtctcaattatatatacataaaaaacatatgttaaatttaaggctttgccaactcaatgcacctattcactcctcattatatataaattaaatataatgtatatgttaaatttaagcctttctaacccaatttacctactcactccttaattttattttgtgttgatcagctcaaatcgagttgttggagtcatagtccaaaccaacaatggcggtcgacaaaaccacattcgaagccatagttccatctcgatttatctctctatcctttcccactcccaacccaaacccaaatcattcctccccacttcttcgaattgctgttctcgactcaccgactctcacactcgacccacctctagttgcagctatgtttgttccccaacaccgcgaatccgattggattttcagcaccgaatcgggtcacctccaccttcttcacagctcacccggaatctcccgcctcatcctactcggaaactcccccgaaaaggatcatccttcctcaaccatttatagcaaaaataacaacaacaacaacagcatgagcatgtcgatggaggtcagcttcaaacctcttttacttgctttatcgcctaagtcttgcttcaaacatggaaatccccatatacccattttgagttacgaagatggtgttatttgcggcatggtattggagaggtttgtggggtcaattgttggtgagatgttagttgaagatgtagaaattgaggttgaaaatggagcaggaaatagggagttccggaggcggttgaggtttaagagaatgcccaatttgattcaatctgaggtacgtatctttcccaaggaaggcattgacttcaattctatagaaattggtgaagttgaattctctcctgataataatgttttactgcaaccctatttatctcccatggtggcaagcctttctctaattggtaaacatattcaagaccggatttttagtgggtttaggccaaaagctttatgtctaggagttggtggtggggctttgctatcatttctcaaaacccaactgggttttgaggtgttgggcgtggaggaggatgaacaggttctaagtgttgctagaaagttttttggactgcaatattgtccactcctcaaaatatttgttggtgatgcaatggagttccttgagaaaatttctcacccttccggagaatgtaatgctagttctattgatgctgagtttgatgttatcatggttgatttagattcaagtgacgccaggagtggtgtctatgctccacccttggaatttggggagaagcatgtgcttatggctgctaaatccattctctccaaaaatggaatcttggctttgaatgtcattcctcagagtaatgccttttatgagacaacaaagcatgaatttcagcaagttttcagtgagttgtatgaaattgatgtcagaaatggggaaaactttgtccttattgccacaacgtcacctgttatgtcttcttccacagacactaagaatttatttctcagtaaactaagaaatgttatttcaggagcattcatggattcaataaagaaaatctgaggtctaaggagaaagtaggcgaagtactcatttggcatcttatcttagaattaaagctcacttaagtagacgaataatgggtgaagctcctgtcgatggtaatctgtttgggttgctgaggctgcacacacttcctgcccaacaaaaaagaggctgcactcacttcctaaaggtattgatttagactttttacttgagtaataagcatgttcactttaattttgtgctttctactcggttatgtgttaataattttctcaattctgtattcagtgtgcattattttttgggtttggaaggtgaatccaagtaagatattctcttgcaagtcagccttttcatacactgatttcaaattagatgcaaaatgaagaaaagtgagccaagttattgtggaaaagttgtgtaccttccaaagttaaaggtttttggatgggaacatagaagaccttaccaagtgttatctcaaggatggttagacactattactcatttatttatggaattatgtattcagtggtgctgtaaggcaaatgattcagggtaaattaatagggagtagaagattgtcaaagatgtagatagcttccactttggccacttttttggtggttcggcttgaaaggaactgcagaattttcttaagacaaagggtctacaacagaaagctttatgggagaggatcaaattctttctgactacttgaatttataaaacagaagactttgagggactttctttcttacatctgtaaagagaatgaggaagtttcctctactattcatttttttttctgtgttttgtttgaattttgtatactttgttggtgtttgtaacgatggttcctccaccataagtgagggttggcagttgcagtattattaaagctacaattgttcccaactgcctctgtgtgtgatagtagtaatttttgtatttgattattaatgcacttgcaactaaagcagagtggcctttgtcttgatatagttttgttataaacttttgattaatgcacttggaaaatgtcaaagggtggaagaagctttatcactctacagtctacacagaaatgcaatgcagaggaatttgtccaaactcactaattctcaagtcttgggatgggattgcacttgcaggccgttagaagaactacaactaaagggttttgaagctgatgttctcactctcattcgagcctacatcacaacaggaaatacagacacgtctttgcagtttacaagaagaaaatgctagctgtggctgtgacccgaatgtgcaaatgtttgtactttctaatcaaacttccaatgtgttttcctgagaccgtctaataaaaggtaatgacaataaacccaatattttcatttgaaatttttaagaagtaaaaatgactgttatttttagtattagaaaaaactgtgatttgagaacaaatgttgaatagaatgtttcttctttgacatttgagcttcttcacttgaggcatgacacaacactgcagctccaacttgaaaacaatacgaagtaaaaataaatttgggtaacccatttaatttatgtcaaaatatttccaagtcaacactcttaaccccggatataaagtgttaagcaaaaatttcacatttagaatattaaaaataaatgcaaaacacaatttcacctatattaaaattatagcataagagtttattaat

SEQ ID NO: 300297 - DNA, 5010 bp, Cannabis indica
aaaaaaaataataataacaataaatacgcttatgccttagtcgactgatagggattttaatagcagtattgaaattgttagtgtatcataaaatgtagagctaacttcaaggggttcagtggtaagggcgaatgctggaatgtgtgggagggcacactgttccagactttgaatccctagactcaaaaagttgaggtctcctggtcgaactgccagggccttgtgagatttgtcagacaaccccggttactcaccataagcgtacattactatttaagctttgagagaagaaacatctattgtgtgtgtccaattctatcattgttattattatttggtgtagcctttttactttacccttctatgtgcagtcattgcgtctaggtaacaacggactcaagtcccttccatccacccttttcaagatgtgcctacagctgaccacattggatttacacaatactgaaatcacaatggatatccttcgtcaggtgtgtgtactctactgacataaatcattgaatctaaatcttgtgaaaaatactgaattaatgttgttgcttcttcactttcagtgtgaaggatgggagagtttcgatgagcgtcgacgattgaaacatcagaaacaattggattttcgcgttattgactctgctgatttcgatgaaggtgctgataagaagtgacttctgccctctgaattgtctaagctgttggtcgaagccagccattgtctcaaagctagaagaatacagtaggtcactattatcttttgttggattaccatactatatgtacattgtttgatacatatgatatccagaaactaaaaaggttaaaaatgaattactgatacacaaattctttgtaattgaaattaagaacttttaacaaatggaatgattgcgatgttaatgcatgtcttttcttctgcagcactttaataatgttttctttttggggggttccaattaacaacaacaatatcgtcggtcactattattttggtgggaacgttttacttgaacttattgtctaactaaatctaaatatgtacgtggtctgattctattagcccgtactatttttcaaaaaagatttataaacaccatttgccaacgtaacttcttatctgagtaaataaaaaacctatactaaagatctgaataaaatcaaaatcttggaatctgaataaaacttgaatgatctgtttaggtaactattttgtattatatttgattatgctgtatatttttatgtaatactatgttggcttatattaaatggggaatgaaggtaggagttgtactataagcttgcaccacattaacaatttaacagttgaactagtgtctgtataaatggagactcctaatgatggcaagagtctccgcctcactttgtcattgagatcacaaattgaccataccaaggccaaccatgttcaatttgaatgaaaaaaaaaaaaaaaaaaaaaagatgagttggaataggccaagaatgataacaggatcctcatgatgacaattgtcgacaggcatattagcactatggtattgctgactaattaaaagcccagtgagacaaaaaatcattatgaatgtttaggttcttatgaacaaatgttttggtggaaccacacacgtcgtcacaagacagtagccatgcattcaaggttctcgatggttaacaaatcctccagctccagcaccacctcagagatgttattacagccaaaagaagcaactggaataaactcactaaccctatcctaattaaagtgtaaattgtaattattactaaaagttcaatattattttatgttttaaatttttttttgggataaattttaatcacatatataatatttatttaattgccaaaacactattttcgggtaaatgtagctatgtgattttatttgttttaccagaatttagatttattaacatatatgttgattgtaattctataatctaacatcttaaatatgaaatttctaaaaaacgataaataaacattaatgtatagaaacccttatattgatggcagtaaaataaaatgactctttccgttcagatttctaactcttgattcttgtctgtagcagagtattatcaagatctgaacctggattttctcctccttcgattgtgttcatcacagtcttctacaaaggcctgagtttcaccttgaatagtatgggctgatactcaaatacctttggaacaaaaattttgagagataaactatgtaattttctaaaatcaagagaagaggaagaagtgacattagatttttcaattctctctttctttatataggtattcacatagatagggttaagtttagatgagatttggcttaaaatagagactcatgctaaagtctaactctagggccgaattcctcatgggcattagagttagatttatgtcactttatttcatttaaatatataatgtgtcttttttttattttaccacttatttcttctaattattaaaataccaattttattttaataattataaataattatcatataaaatataatttaaataaatttattaattagacccacaaagtatactaattaacaagtaaaccctatttttcttttcttctcaaaaatggccaaacttggtgaaaattctcaaataaaacagtctagttttaaattctaattgacttattaaatcaattagttgagtctacaagatgatattatctcagacaatgtgtagaccatgggcctatgtaaccaaactcctaataagtatatgcgaaatttgtcaagtaaatttcttagcttattaattcctcttgactccactatagattcaaaattgcactcctgattacatagaactctctatataccaaatatagatacggtttgaattatccattgtaacaatctaaatagtcaatgattatctatagacagtttacattgagtagggataaatttactgttttacccttcaacgaattttatcctcaaaacatttagctacttgtaaataatatttcaagaaacacttagatactagttttctttgctagatatggagagagaggatcaccctagcgcaaacctctttgaggaacaatagaacctgaaacttctccattgattagaaaagagaaggtgttggtatgaagacatgtcataataagagagatccaacgaatattgaagcctattttccccataatagctgcaataaagcttcattcaacccggtcaaaagctttactcatgtcaagtttgagagcagcataacctttgttacctctattcctatgtttcaaactatgaaccaattcaaatgcaacaagaacattatctgttatcaatctattgggaagaaaaacactttgtgtttcagaaatgatcgttggaagaacctccttaaagcgaatgaccaacatcttcgaggtaagcttatagatgacattgcaaagactaattggacggaaaagtctttcattgtcttcggcttctttatttttgggatcaatgtgattaaagtcttgttgaaagttgctggactactaccattgttcaatacatttaaagcagctttggtgactaactctccaacaatatcccaattatgaaaataaaatattaccgacattccatctatactcggactttcatctgaaaccattgtcttcattgctgttaacacatccgaggcagcaaattctttagataagaaagcattttgctcggctgtaattgtagttggtatagtagataaaacatgtgacaaggcccaatgatcttcttcagaaaccaagaacagattttcaaaataagaggataccattgctgttatgcaatctttagaggttattatattcccattgtcatcatgtagagctttgattttgttgttggagttcctagctgatgatttggcatgaaaaaatttagtgttacgatcccctgactgcaaccaatccactctcgaatgttgttgccaatattgctcttccttagctagaagatcatccaaaatactttcagccgattggatgtgatctgtgttagcaatagttttggagttcaaagaattaacccgtttttaagccactgttattaggggtgtacatcggtaagtttggtcggtttacgttacattttatttaacccattgtaaagatcgagttgcaaaaatctaagtgcaacccgcccaattaagaaaaaaaaagttgcaacccgcccaatgaattggtcgatttagtctgtttaactcgtccaaaccgagtatactaatgtttatttttttcgcattcaattgttatattttagttattgtgataatgagataaatataaagattgaatttagagttcaaatcattcgccataaaaaaatatactagtttgaactttttattttttataaatgtgtatataaattatataatatatagattatatataataaaacatacatataaactctcttaatcggattggtcaggttagttcagattgatattattttcaacctgcccaatataaagattgggagggttatattttcgtcgagtttttcggtttgcatttttcgtcgagttatttcggtttggtttggacgggttgttcgggttgggcagtttacacaaatttatgtacatccctaactgctatatcctttttaatttttccaaacttgctgaagtgccatttctgtaagtggtcagcacacctatctagacaagaaactgttgttaatattttattaggatctagatttactaacaggtatgttgaattaacatcctagatatgaattctctaaaataatgaaatgaacacataagggtttaagaaaaccttacattgattgcagcagaatataatgactccttccgttcaagatctctagcccttgattcctttctgtagcagagcattatcaagatctgaacttgtatctctttctctccttcgggtttggttaccaccgtcttactcactatgattgag

SEQ ID NO: 300298 - DNA, 2947 bp, Cannabis indica
aacattagtggaatgtgaagaatccattgtacccactgtatttgttgggtgtacaaccaggggtggcccaagccttgggcgtaaaatagtcaaagaattttagagtcctgtgtattgggaccacaatatttgtgagggtttttttataagtgcatatttacttttatgaatatttatttatttatttttattaaaaaaataggggcctttattatgtatactatactaaaaaaatagaatcttttaatataagagacattgtgtaataatctaaactgtcatatgcttaggtcgacgtgatacaactaaagtctcttgttaagagtcttttgggatgtgtctaagctccaagccagggctagcacaagcttggacagtttgggctattgcagaaggctccttatttttaaatgcctattttttaataggattttttttattattattatacttacattaaaaaatttatatttaaaaatttacaaacatatctttaaaaaattagcaatggaggtcttaaattaatgtacacaattttttttttttaataaaaagtctaattttaatttttgcacaaggctcccgaaatgtttggactgacccagctcccagctaatacaaaataatttcattataacttgtaaattcatgattattttgtatatattttttcattattatttgtaaatggattactaattgaagatacatgttataaattttcaggagtgacaagagtacttttggaaaaagaagaattaataaatctgactaaagaagcagataaagatcgtaaaatccctttgcattatgctgtgtcttcattttgctgtaataataataatttggagattgtaagaatgttgttagaaaagatgaaagaagtgcttatatcaaagatagaactggcagtacagctcttcacattgcagctttgaaccacagaggaggtagttttgaaataattaaagaaattctatcaaggtttccagatagctatgaaagtgttgataatgatgataacaattttctacacttagttgtgatgaaacaatctctgtctacattaaagctcatattacaacattttccatttacaagttaccttttaaatagaaaagattatagaggaaatactcctttgcttcatatggttgccacttcagaaaggcctatggattcagaaatcttacaagctttgttgtctcacccaagagtgaataacatgtcattcaacaaacaaagcaacaacatttttgatgcagcctatgattttgatgatcaagagtatgatgaggtaatgttccatcttttattgaatatataaactaaatttttatatatgcatgattgtgtagattgtagttatagtagataaagaccatctgttttttaaaaatttataggataattgatagtgttgaaaacaaaattcaaacattaccagtgcaaaaagaaacaagcacgtacaactatatctttgaattatgttttcgacatcataaattatgattagaatttcgatgcctactataactataacgtagacggtcatacaaaaaaattgaattataattttttaaaatgccaaaataataaatagagtaaagtttaattattaatttcaaataaatacttaagtttaaattttggcggtaataatacttaagttatagttctgaaacttttgtaggtactgacagttaagtgttaaataaattgccatgtagcgattcctgattggtccaagtagttaaatttttatttttttaaaaaaattaatttaaatatactaataaaaaaataacacgtgaataatgatttaatatttaacggtgttaaacttaatatatatgctgcaaattaatctaattattattacttgttataatcttgtgttatatatataaatctttatatgacagagaaaactaccaaaactcttcgacaaatacacagtactaaagagtcatttgcgaaaatcacacatgttaaatgacagtagtcacaagaagatgatgaacaatgctgagaagaaaaagattgagcaaaggaaaaattaaggactaaaattgcaaattttagagagtctactctagtcgcggctgcattgattgcgacagtaacattcacagcaggatttacattaccaggaggtaacataagcggggacgataataagcaacaacaacaacaaggtagcgcggttttaaggaataacgtagcgtttcaagccttcatcgtaacagacacaatagccctagtcctttctactacggctgtttttatcaacctctttttaactatagcatcattaggtgaagatgaaaatgaggagtttgtatctaactacatcaagtctatgaatttaacaatatgggctatggcatttatggtgatagcatttgttaccggtacctatgcagtgttgtcactttccaatgctcttgccattgctatttgtttaattggattgtctttctttattcgctttttttcaataatcaaatccaaatttaaaagatttgatttcaccaatattggaagggaagccattattgttgtgggttaagtttttattctaacttgtttagttattagttgtttgtgactctcattttactactatgaaatatgaattagtgtttcagatttgttatttgttattttttaatttgaaaagtgagtatacaagattttgttttcgtttttattgatttttatgtaaatacaatatatagccacactttttataatttctcattaaacttactattattattattattattattattattattattattatttggaagagtaatttgcaacatgtaacgcccttatttacgtataataagatgccataaataaattggcgtcaagatactaatgttgtctttattaaaaaataacacttttcaaaacatgggtacccagttgaaaa

SEQ ID NO: 300299 - DNA, 1377 bp, Cannabis indica
ttttttcaacttaattacacacaagatattgacatggtactgacgtgacaattaaccaaacaactatatcatcattttgtttgaatttgacaaaaaaaaaaactaatttataacaatttaaatagtttaagtactatttttaacagggtaaaaactaaaaagtacatagactacaataatatataaatcataatttaagggacaaaaaatataaatagtattcaaaatttaaaggttacttgtgagaataagtgaatccatgtagatccccagctaattttgtagccaaaaaaaaacaatttttgtggctaaataagagaaccaatactttatgtcaaaagttaaaaagcaccaatgcttgtcatattattttatttttttttttgtttttcctttttcttcttttctgactgggtaaagtgatatgaaaaaaataaaagtgtatccaaacatgctacaacaaacaaatgttgcctctgttgctcatgatctaacatgattgttttataagtaatcacgtgtttgactcagtcaaagacactaccaatcgggtagggtctctctcaaatactaattaaatataatatttaactttggcttaggacaaaaacctacttgaggatcaagttcaggccccatttactttaaacttttcttgcataaaaatcaatgaaataacattgaaaaatattaaccagttcacactacctttctttagggtaataatatatactcatgctgatcaaaagattattattattgttcgatatataattgagaaaggtcaaaagattattattactgtgaatgtttgaatgcctttggcttaggtaacagaataccgaagcagagaatagtaaccctggatgtgacccttttcgaggtcaaaggtaaaggtcctagtccacacatgcaatgaatgaacctttttcttttctttttcaattttatcttactaactaaactatgacgtgatgaaaacacctccttatcttaattctcactaaattaataaattaatagcaatccattatttatcctgagatttcattattatcaaatgagatcaatcagttgaggcgctggatatttagtatacactatgtataattgaggttgtcactactacaaaaataatttctctcgatgtttttaaatagtcgtttaaagtattctcgtcggtttttataaccgttgcctatacgaccgtcgtaaaacagataaaatagacgacagtttaaaatcgtcgctaatttggacttcacgacagtttaaaaccgtcgcctataccctatcataagcgacagttttaaaccgtcgggaatgtaaaaaaaaaaaagagaaaaataccgattttctgtcattaatggcagaaaa

SEQ ID NO: 300300 - DNA, 4790 bp, Cannabis indica
tctctctctctctctctctctctctctctctctctctctcctgctcttgtggggacccctaccctacctagtaagtcatttcttcatctcattgctctccaccttttgagatcaagcaatattgacgcccatttacaaaatcactgcatatttttgctatttaagatcctcagaaacaacggtaaaaaaattatttttactttaaaatagtttttattttgtatttttacggaattttacacaaaaattcctacaaacttaaattgcaaaaaattcgtatagcaacccacataaaaaccatcggagaaactaccaaccgtaaatttgaaaaaaaaaaattaaaaaataatatatgggataattgtaaggtaatgtgaaaataagaagaagttcaactcaccactaaaacttataataatggcaatgaaaaatatttgtcatagtagaaaacctgatttagaaaaaaaaactaatagattaacacactgtttccttaaactatacccttattagtagtgttaagacaaaaaaagacaaaaaaaaaggtaagaaattttagtcaactgttggcgttgtcaagttttattttgttttatacattaaaaaagacctaacggtaccgatagctaaggttaaggtagctaccgaagaagtaacacccgcagtgcaactggttccaccagatgtcatttgcatttatttggcagttgtctaaagcgaccacccacctccaccaccgccatgtcaaaccaatttaatccttaccacaataataatttgatactctttttaatacattcatactcgtatgcatttcccattttgcaggctcggtgtcccatgcaactagataccatctttagtttagtgctactaatagactctatttagaagatatgtgccttagcttagaccaccaccgccaacactttttaaaaacacctcaaagtggccctatctatgctttatgagtaggtaattactgtgcacttttaattttacatagatgtgtgtagcttattttttttatttgaaaaaagatgcaatttaaataatacatgagctagtactcaaccaaacactgtccctattcgtatgaagacaatacaaactgacagcacaggcaccgtgatacagatacatgcttggaagatgaaaaggtataatgctgattaataacaacaacagaataaacaaataatagggtacatttcaggcaggtggatctggacaatcgcttactaattaattacattaacttatagacatcgatccataaagagaatacatattcaagtgcatattaacataggccagcaaactagtcaatgtttttgtacacaatattaggaggtattagaagcacaaaatggatgtctcagatgcttgcctacaattcaagaaactaaagatcctaaagttagctctctaaactttggtcaggttctggttgttttggagtagcagtgccaccattcattcttgcacgagcctcagcaaacatccgctgttgctcagccaatgcttcttcctctgtcatttcggctccgttgctccatttgccacttcttaagtcctgctggtaggaccacggtgttatcagtataaaactgcatgaagacttacaatttgactccacatttaagggcttctttcataagattcacatttcactgatattaaaaaataaaaaataaataaaaaccttgatttgtgtgtgtgtgcaagagagatggagagagaagcaaaacaagatctattttaaaaccagcggtaataaactgctgactaatggctaccctcctaaagtctcatactcaaaacaacggcacaacattttcaattaccatggtctcaagcttgtgttgttcatatgctgcataaacttcttctatatactcaccaaagccaagcacctgagaattaaattacatttcaaatcactaattcaaatttttaaaagtgaaacgcaataaatacaatcaattttatcttagtgaaaagagtggccaagtgaaaaacatataaactgctatataattcttttcacaataatcataccaagcacaaacggcaaacttaaaaaatagatttcccccataaagatttcatatgggagacacgcaacagtaaaaattacaatacacttctttaatacaaagtgaagaaagaatggaacaacatagtcgaatccaacagaaaagggttaagggtaaaaaaaacattcttttctagtattacaaattaacagctgagcacatataagagaaaataaaataaaataaaatatagaaaatatgtcttctacaccgtctcattatcattgttaactggtaaagtgcacaagaacagaagataattcatttcaaacccagtgagatatagacaattaaacttaatcaataatttatgggggtgagaaattactgttatgaattgattttgagaaagagggtcaattaacagtaaagttgtcacaaggaaggccacctcaaataatcaggcatgtactttgctcccacaagatttagaggtttgaatcccccaagcgcctacatagcaattgctataaatattttagggttaggcaagaatcctagtttcacaaaaatttggtagcgaaggtgtttatgtttaaaaacaactggatgactagtaatgacaccaatggaagctgaaaacagtggttttcttatttttacctctaatataagaagcaaaattttggcttttaagttttgatccaatcctactggtctgctaaaaattaagatacttctgcatcaaattaagtagagctccttagtgctgcagaaatcttttattttttaacgggacaactttataccatacatataagccaacaaatccacagaaaatccttttttaatgaaagtaaagcctttcataagtaaatacatgaatctagagaaaattccagaaaaaatgatactgtgaacagtacaagggcaactaaaagattgtccatagcatcgggcaggggtgccagtaacatgtattaaattaccgagtcatatccagcaattaaacaatactgaaacgttaagtacaaatgcataaaaatccctacgaaatgtaagctagaaatctgaactcaaaccattacgttgaaaagcagaagtgcgcatgcaacagggatgatacattagatacctctaaagctttgagaacatgttctggtgcaattgttcttttttcttctctgccacaaacttcattagattctgatgaaataaggtttataaactctgcataaacacggatagcataaaagaattcttcagtactaaagaaaaataacttgaaacatcaatgaatccagtaaagagtatgcattttattaaaattaaggcgtttaatactttccaacatcatagtgtatgcaattaattgaatttataaaaataaagtatatgaactttgagagaacttatgtcccctcctcagggctaaacttgattgcttaaatatgattgcataaacacagataaaccatgggtccaagcttccaagttccaaccagtaaatcaatcacaacaatatacaaacactattgttatgtccgacaaagatgattagattcaaccattcagacttacttccaagagaatagcaagtgggtacaaaaaaaaagtagataacaccattgatttgtagagaatttaagtatatcactaatggacatagttcccgttatttattgaactatctttctcttttaggagtagaaatttttaagctacgtggacactatcgataacaaataggttaagatggcacaggataacacataaaataaacaaattgggattaacaaactgctatacttaatatattttaaaaaaaaagttagaaaataacaggacaccatgaatgctgacaagttcaatcccagtaacagagtaaagactacgcgcagatgttatattacagtaaatagacaaagagaaagtgaaaatcatatatactaagctcacctacacaacactcaatcaaaagatcttgagcatctcttgcaacacgaacgtccggaggcaacatctccttaataatttttgtcatagtggctgaaaaaaaaatcacaagtgagtgatcaatgtaacaaataaaataatgaaataaactattatcttatgccccgttgcttaatctacttttatttttcttttgcaaaatgcagaagaaaactgcaataacgtttggtggctcagatggcaaataataagtcatggagctcaagaaccagttcaactactgcaacattacgagtatagctcaggagaaaattacttgtgacaaaggagtgaaacaaacaatttcacaatccccctcctggattgttcaaacagatttcatattgaattttttttaataaaggatcaaacagaaattttaaatttaccagttccagtagattgtgctactttttctacttctcagaagaaaaataaaccctatacacacctaaatagaaaacaacaccaagtagtacagtcttcttcttttttccttcagaaacacaagtagcaagtaaaaataacaaggataccattcgaacaagattcatgtgttatcatttctttatgtcttctgggtacaaaatcaccgtgttagttcatatcacatctaaatgcataaattttacacataacacaaaaattagtaaaatccctaaaatcttcgtcatcaatattttcacgcaatccttctattgcctcaaattgaccatctttgttcttctaatctccgtaaagggaaaactataaacc

SEQ ID NO: 300301 - DNA, 1595 bp, Cannabis indica
tcggaagctctggagctcgtcctgcgcgtgcgaaacgcaccgcatgaatttcctgctctttattccctccgctactaacggctccctattgctaccctccatcccaaaacgacggtggaaaatatatgttttggggtccttttgatgatcctacgacgggagagagaggctttattatgtgctttcctggtctatgggattggaaatttatacatgatgcaaaatttatgattttttattttttgtttttcaaagggcactgcccaatcagagaatgagaagtggtgatttgtttttgtttttttgtttttaagaaaggaaataaattacgggttttactgaaacagctccagccgtaatcgactatataaattagataattttcctttttgtttttaattattgatatttatgctgtaagctttcattgttaatttttttttaataataataattaatttgagatctcaaattaaaaatggtaagaaaacagctggggatgggacccattcgttcgacgtgtattgtagggcgctaattacgcaagtagccaatgtgacgatgccacatgggaatcccattttaggatgtcaatggtgtcgttttaaattgagagtagttcttgtctttgttttatttttaaacaaacaaaagggttacttacttacacctatacaaagtacacttgttcgtgaactatttgaattcttattcctttacaccttcattcacttataatatttaaagttaaaatagcatcaaataatacacagtatctatgggaaaaaaaattggtagcttggtcaatggtggtttggaatgactgcgtgggatatggtgattggaaaatgacttattttggatatatacctaataattatgtgatttaacctggcaaataatgtatatattagattaggactaggtgtcacataaacgatgccaattattcaactaataatattttaaaaatgacaataatttttgtttctgcatcatatgacttcgattttcataataaatttgtccaagatttatcggccaaatttatttacttatgggaaacctctaaagaacatggggatgtctttttatattattaaaattatatgtttgttccttacaaatatatattgtttataactaatcagaaagattggacgacctatgtttcatttattgttgtactctagtttagtacaaacaaaccttcgaatttgtggtttagtgtacataaagtttgagctcagtgatttgaatcgatacatgtgcacactcagagaacacatcgcatcctttgatcctcattacttttacttttatatttaggcaattattgatttagcatgtgaagtgtgttactcgaacggctgaacttgggcgggtttgtcgagttcgagtgaatcgggtttgggtttgtcagatttggattatagaaaccaaactcatttgaaatatctcataacagatttaaaatttgactgttattgagccttatgcaaaaaattctacgtacaagataagtttaatttaactttaatagtgtaaaatgtgtgttaaatttgacccaaactaaaattaggttaaatttgtca

SEQ ID NO: 300302 - DNA, 2744 bp, Cannabis indica
ttttttcccttttaagcattaatatcttcccttagtatagtaactctagttccatcttcacttgtcctaataaaattaagctctactttcttggttgaactttgaagtatgaagattacaattctagattagacttctatagcaaatctatgaaccctaattttattgctaaaaatccttgggttcaaaaattgttttctgcatttggaaggattaaaaatgacattgattgatcaaatgcaattatatcgtaagtactgtacgagagggattacttattatagccataataaccagcattctcatatgtgataaacatgattgtatatttgcttgctcatccatattctagtttagcttttaagagctaatgttttgtttttgatcgactcatggttcgtatcaccaaaaatgcttgcccgactgaatgatatccattatccagactgattaatatatacaagattgctataaataatcttttcggtctatatcttactgaaatcataactacagatcattaagcttgctaggaaactgccaaccggcgatgtgggtgcacttaagactgaagatccaaaggaagaagagcaagaaccacttgatgaaaatgatctgacctagcctcaagtgcttccaacatccccttagataatggctatattatttgtgttcattctcaatatatattggaattgctttgctttgaaactaggaggttttttttttcttttttttcaatccatttttttctcttttttgaggggaggggaggagctttctcattttatttggaatgagaaagattttctctcgtaaacgttatgtaatgtacatactaatagaagccactcttcggcttgttatacagttagccaagactcataaggcatttaatttaaagatctttcttttctttttgcatttatgagaatctttgatagcatgaatcatgatcttccatttaaatttacttatcaaaaatttacttttcattacacagtattaacccagatttttttattgggtaagaaataaagcttctttggatagaaagaaacatgataaaattagtgataagaacgtttgatcacattttgagctccaaactttgtaattgtaagaatttattggattataactagaacaataatcaaaatcgcatgttattccacctgaggaagtgtagtccttaactaaaataattatcattgatcacataactattaattcgtcttaaattgattttggagggatcccaaattttttttatgtatatatttagttctaccatctcagaaaagttgaatttatacgataatattaaataattttcttattttggcaatagtaaataaatattattttaaaataaaataaaaaatgttaagatgatacttggcgggaaagatctgttacaagttacatgttagttaatcgttataataatcttttgtatttaacttcacactctaaacaagaaacacactctactctctctctctctctctgtaagttcaactccattacaagaaagattttgaagcaaaagaagaaaatagaggaaattataataaagccaagaaaattctattttcgtttcttcttcaatttccatgtccaatggcaatggccctctggctctacctcccaactctcctactcttcttcccaacccttctctcagcttcttcttcttctccttccactatattatcaccgtcgcaatctccaccatctccttctccaccgccaccgccgccttctccttcactcccatccccatctgagtcaaccccaacatctcctcaatcaccacaacattcatcccaccggaggagacaccgaagatcccggcgaaggcaacaacaacctccttcaacagcggagacgcctcagcaattcaacaacataatcgatgccttgattggctccggagacttcagcaattgggtcaatgtcatttcaaacgccgttctccctcttagcgcaactctcttcgtcccagaaaatgaagctgtaacggccccgacgttcgccagccccggtccggaggacccattgattttcccttaccatgtggtaccacagaggctctctttcgccgaactacttctcttccagaccaacactcgccttcccacgctcctccctgggaagtctatcatcatcaccaacaactcccggatcaacttcaccatcgacggctctctgatcactcagccggatatttactccaccggcaacattgccgttcacggcgttggctctgtctttaattactcggtcttcggtgatggtttagaccttctgcccaaatcctcgaacccagagccgaatcagtcgcaagttcgccggccgccaacggtggatcacccgaacggagagacgtatggttcgagctcggactccgcgccgccgtgcctgtgcattgaattgccggttgttttcttagtgttctgtgggttttgatgttcaagattcagagaaatggcggccatggacggtgaagtgttagggttttttggtatagtttgttcttgggattcaagattcagatacatgtctttcttggacgttctttttcttgtttttaaaaatcttttattactaatttttttcataatgaaataatcaatttttttctggctcaggcatttttgttttaatgggagtttttttttctattttcaatctcatcgactcaaaccatggacaaactgttatttgaaacaattattatt

SEQ ID NO: 300303 - DNA, 5623 bp, Cannabis indica
ctgctcgatcttccttttattttctttaaaatttatcccaaaattaaccgacaaagatatgtacaagactataaatatagatatagctagtgtagtaaagacatctattgtaataaaatttaataaggacgttttgttttgaagaaataaaatattgtgactagattattcagagtttctaatcataattattaaaggaacattctattgtaaacgtaatggagaaaaaaaaaataactacacacatttatgtttagaaaaaaaaatatcccaactactacacttttgatggtatttgaagtcatttagtgacatgttttaaaaccaagccatggcctaaataaataatatttatccaagcaatatacacacaagaatatttattcccaagcaaaaaaaaacttgccaatatttctttcttttacatctataactttctacaaaatcaaatacatttgcccaagtggggaagataaggttggtaagttagctggtaccaattgtagcctaaaagtatacactgagattatatgattatgacttactgattttgataggtgaagaggtatcaacaagcaattttgcaactcatgtttgtgtcatctttttcggcctgaaacagttttcttcacagctcccactgagactagaaattgatcaagggatgataaagtcttcatgtcatcaggagggaagtaactgccagctttccccatgagtgatgcgaagagaagagagacggttggtcgagtgacatagcgctcacccaacagatcatccagaaacgcgaatgcagccaagaaggtagacctattggcgttgattggaccggcaaagtgagcagggattattctcttgaagttccagtcccttgtgattctatcaatccaatccctcacctgaattttcaaacgttttcatttttcagtttagtcatatgcttatatagatcatagagctaatattttgattccattactacaaatccatcactttgtttgttataagaaaagaaaattcaagcaacaaaatgaaatgttttttgctttagcatcatattttcctcaaattagtatgtttttaccttctctggaactttgctgaacactaatgtctttacaattggcgaaacaatcagcttctgtgacatttgagcaaagctggcattaggttccaacaaattcgatggaccaagaaataagatttgaagaaccatcctttcccaccctggaccaaaaaaaatagaacaatgttaccatattcaaccatcctttcctctcaatagtgaattgcatcacaatcaaatttagtacaaacggttttctcattggaatttcaaatggagaaccaacctttttgacggttcatactgttgtcaactactggttcattagggacttgttttcctttactaagaatttttacagccaaaccattctttgcagatgccaacaaggactctttgctaatacacttgggtggctgcttcggaacaaaaatgactgcatctgttaccagtagtgttcttgaacgcttatgatagaaagctacctcaacatatggcccaatacctgaaaaatccataagagaaaaagattcttgatcattcttcaaaaccagagttaaaaagtaagcacatatgtttgcagttcatattaccaacttctggtgagcttaaaactttctgctcaatctcatcagcccacggagtagacaagtcttcgtctttcaaggttttagaacgaaagattccaaaaaactcaagtggcaaattcaatggccaactccactgtcttggcgccacccaaacctgagcccgaggaaactttctagagaatggccaacaaaaattttgtgctcataagcaaatgtagggagaacaatgtactcaactggagcccctagctctttcacaagctgaaaagagaacacaatactcataagaaaaactcttaatctatgtaagcagaattagacaaaggtcagaggaaagaggagacaatagaaaacgaaatagaacctgaatgcattcatcagtgggagcaatgggagcatgaatccacaatccaccagatttgagtttgataactgtcattctaatgttcgttgagacactactgaaacccaatgcttgctcttgttcaaatagccaaatactgcctttcacagcctaaagacatgtggattgtggagtgaatccaaaaatgattgtaagaaagcagaacttctagatttgtttaagaaaactatatacttttgagccatcagaaataaaatttttatccaaggtttcactcaagcaaataagcagtttatgaattatagtttgtccttttcaagcccatagtgctgagagaggaatagtattaggctagttcagtcattcagatgatacatatgaaccaatcaagcagcaaatccacaaaaatactcagtgaattttcataagaataaaagagatgtttgttaaggtaagggagctgacctcagtcctggaagtggtcctattgagaaaaggaccaagcgggaatgggaagcctgtaaagttgaagtagaacctgcctccattactactactgctattattgctgctgggatttgctgaagcaacaaccaaaccgaaggagtctctactcttgtttcttggtctttgttgtaaacacaaacccttcaatgacccaccaaaagaattagcacttgggtctctcaggaaagtgggattttgaaaaaagtggattttgctgaggaagaggcaatggctgctgccattttctcgaagcttttcctttttcagtattcaccggaattcttgagtctaaactctaaaagcttgtaaattacaggacatgctttcgacacgtggaggtctacttggcttttctcagcttgaaatctctaggattttcagaatttatgtggtcgatgatgattgatgagaggcaacaaataatagagagagaagatgtggatgttcaagtataaattttttctagaacatatagacacctaagttcaatttggagcttttggtttaatttaaatacatttcttttcattcaaaactttttcttttattttttgagtgaatttttagtcaaatagttattattagtaatgatttgtgtgattcttttttctaagactaataccagtagagattcaaatttaccaacgtcagtgcaccatattttatgaacaaaaatatttgtaaaattacttttactaataaagattttcaaaactatttttacaaaaccctctacaccactgcacagccatttcatgtgtaaggatgtcaaagaggtgtgtaattagcaggtcaatgaatgtttcagtcccccctgccccgtctcgccaaagtcgggggcctgaccaaggactgctctatctccgctctattcccccatttgatcggagaatcccccgcagagaaaatacatccctattcatgtgcataacatcaataccaacatctcttattcaagagaaagatttaacaaacaaaatcattaacattgtttttaatagctaattacaacttatagaccaaccatacgtctgacttgggaaaaaagccgtcaaactcattacaatccattattgtcgaaactatatactatattgcattgtattcaaacaaaatcaactgaatttagttacataacaagcatagaacttattgtaacatatgaaaaggtttctcctcctcttcatacaaacaaaaaaaaaaacaaaaaaacaagagcttaacggacaatgtattgattcatactactgagtttacctgaaatctgaattctcactaaatcgtgaagcaattactttcaactgcatcatcaaacttccacatgatctcagataattgtaacaataacaaagaaaacttcgaatatcggtaaagtcgtcaaattacacatactgctgcaatatggaggtgataccacgtaggacagtaggtgaaacttctattcacagagcttgaaagcttggaagcaaatggcatctcaagtaacaatttctctcacaagccaatccaaactaggatatgcaaagtacaatatgagaaatgacgggagcgcaaacagaattgtgacgagtatgtacagagccaatatggcagcactggctggtatggcatataagacaataagaagaaatatcacaaccaagggaaacttggctgtcaaatgaacaaagaaaaacaatgacttcctaagagacgaatgtaacctttccatagttaaataattattgacatggacatggtcatttgacctcggtgtctcaggatgtcggatatgatgtcccctcctaagattacagtggctaacttgactagccgtagatgtattgccatttataggccagggttgttgatcttcagtgtaggttgaaggagtcttaactctatcaccattcatgctctcaaccatccaaaggagaaagtagttctttcgagggaatctgagattgccacggtaaaccagacggaaggacaagagattacaccaaggacaggaaataaagagtgggagctgaatcggtagagtggggaatttcacaactgcccattgcagtcccaagatgcaatttttacaaagggtatgcccacaccataaaacatagggaacattctcaacaatgttgaaggattcccagcatattgggcattctagcccttcctctctgccaaccactgaagacccctcatcatcagaacattcagaagcaggcttcgaagggtccttcttcgatccaacagttccagctatgcaagttgatgcaaaattccacattttggccacgcaggttgagtgattacacgcacagcaccaaataaaaatgaactaagtagtacatcataacgatctcattgaggaatgaaccagggataacaattgtgatatacccaatattgacatccaatgtgagccagaaaaattaaatctgaaaagtaaatcgctcaccgttaaattaatttaaaacattcatcttggattcaaacaaattaacatgagtagaaaacaaatataaccattaaccaggcagcttttctatcaaattctaatacaaatacaacaaaacaaaatggttacttttacaaagtcacattaccatttcgcaaccactttcagccgtccacccaatcagattataaaagacaaaacatagacgcacaaatacatatacaatgcgaagaaagccgaaacaaaacgaataaaaaaagctaacatggaaactagctgggatcagctgatcaagcaactcggcacgtatattacatgtattataatgatcactttctcaggaaaaattaactccaaattgtagaattgggacttattagcagatcgccatctctttaacaccaaaaagaaaaatgctagcagtcaacgatcaataaaagccagatcgtgaaattttcatttcatactctaagaaattactcatttcaactttcaagggtgccccgagaataaaaaagatatatatttccaacacaacagccaaacgtgagaaattcacggtgttcatcagaaccaaaaaaaatccaattcaaatatgcatctataagaaacaacatcgttaaaaaaaacgtgaagcaattacaccaccgtttacg

SEQ ID NO: 300304 - DNA, 3612 bp, Cannabis indica
ctggtaaaatatattccaacacgctacaccccaaagaaagtctcaccttattagttctaaatggcttcattttggaaacgctggcgacaataatcagagtagtggtggagatccaaagggaggtcgtggagttaattaatgtggtaattaatgcagatcaatgtcaatcaatattatttagtaatcaagttgttatcttggatgagaataaaggccttgaaggccaatttaatttgtcatccattcctgcaagtactatgggaaagactccaatgattgtgtaggagtcgtctatgatttatgagctggatgaaggggaaggtgagctggcagttgctgaatcaaaaaggaaagatcttcttaagaaaagtcaaatgggccttttgtttgggccaagtgcatgaaatagtggatgaaaagtgcatttttaaaatacttgagtggggggccttggcgattaagcccgccaagtgttatgactactataagttggaattgtcatgcgcttggaaacccacggactttacaattcctgaaggatgtgtgatcaagagaccctggttatgtttatttgtgaaactttttgtggtactgatattttagaaaaagctaagttaaaattgggctttgaaggcttatttggggttgaggcccaaggccacagtggaggtttagctatgatgtggcactttgaagaagaagctgagctaattaatttttccaacaagcacattaatattcttactaaaacacttgatattctaaattagagactagtggggatttatggtgaagccaatcatttctgtcaagctcagatttggaaccttattcgaagttttgctgaagacgaccggtgattgtgggctatcattaatgatctaaataatgtaacttcttaggcgaacaagcggggtggccatccttatctagagagcttaatttccagttttaatcaagttatctctgactgtaatttggttgattaagattattttgggtatccttttactttagataaagggaggggaagttctaactgggtggaagtgagattggacagagttcttgcttcatagaggtgggtggatagttttctttcaaccaggttatccaatcttaatttttctacttcagaccattgttcgattcttcttgatcttatagtttagaaagtttttactagtcctcattagttttattttgaaaattcatggcttcgtgagccattatgtgagaaaattgtagaagattgtgggaagaaggaagttcaacttcatattcagtcctgtataaagaaatttggtaaggctctaacaatttggggaaaatatttttctagtgatattcagaaacgaattgcttaaaagaaatcattgcttaagaggttgaagggcctgcgtgatcctttcttgcttgtaaagtatggagaggtagggaaagatttgtttgatattctctcacagagggaggtgttttggaagcagtgatccaaacaactttggttaaaataaggagatcaaaatagtaaattttttcatgcttctactagtgtgcgtaaacaaagcaatttaattcataagcttcaaggtgaaaatggctcagtgcacgattgggggtcgggtcatgaagattttatggctagttgtttcttcaatctccttactacatctcagaataattagggagatattacaaactgtattgtgccgattgtctctggtgagttgaatgacacccttctcaaacctgtttctgatgaggaagtcaaaaatgccgagtttcagatgcatcctaataaaagtctagggccagatagtatgactccaggtttatataaaaaatttagaatttagtgggcttggatgttattaatctggttagatttttttttagggtttgaatgatacaaatttgctctttatcttgaaaaggaagaatccattttctatgagtgagcttaggccaatatctttgtgcaatattgtttagaaaatcatttcaaaggcgtttgttaatcatttaaagggtgatcttgaccatgttgtctcgaaatctcaaagtgtctttattcctgaaagattgactaccaataatgttattgtctcctttgagatcatgcactacttaaagagaaaatctttgggtaaagtgggttaaatggctatcaagttggaaatgagcaacgcttacgacagggttgaatgaagttttttacaagctatgcttttaaagatgggttttggttcaacacttggtttcgttaattatggccttgtcacttagttaatattgaattcattccagtagtcatgttattagacccattattctatctaggattataaaacaaggaaaattcattgtctcattatctttttatactttgtgccgaaagttaatcaactctaatctaaagttttaaagtgtgtggtttgctaaaaagttgtaaaatagcaaagaatgcacctattatttcccatatatatatttttgcggatgatacctatttatattgtcgagcttcgaaagttgaggcaactaatgttgatgatttactttgttatttcaagcttgcttcgggtcaaaaggtgaatttttctaaatgttctatatttttagtaaaaatactgatgcaattgtgaaagagaggattcgttctacactgcatattcctgaactagggaaaattgtcattacttgggactgccaaataccatgtgtcagaataaaaatctaattttggggtttctaaaatgagatgaagaagaaaattgaaaggtggagtagcaaatttttatcttgagtaggtaaagaaattctcctcaaaacggttgcccaatctctacctcgctatgctatgaatgtaattttattgaccaaagggatatgtgcggagtcggagaccatgatgtatagtttttggtggaaaactacttaacagaatgggagaggtatccactggatgagttgggataagatgtgtttacacaaagaatttgagggtcttgggtttaggaatttgtgtgattttaatattgcattactgggtaaataaggcttgcagtttcaactatatcataattctttggtaggaagggtgatggaagaagggtgttatctatctagttcttttctgggtgcagatttgggtgctaatacaagtttcatttggcgtagcatgcatgaagcttaggctttgattataaaaggcaatcatttaacagctaatttggggatgagtattagtgttctcaattatccttggttacccaatgttggtaattcttttggtatctcttttcacccgtgtttactgggaagactatgattgttttctggttacacaatcatgtcagtgggatgtggactttgtgaaagatgtttttaacccgcatgatgcttttttaattcttaatattcctcctttctctttagcttctcaagacagatggagttggtcagctgagttcttaggcatttactcagttaagagtgcttatagacttatgttggaaattattttaccggaatcttagatctactcccaagtatgttgattaacaccctaaatatgaactttctaaagcgataaaataaacacatataaag

SEQ ID NO: 300305 - DNA, 1691 bp, Cannabis indica
atatatatatatatattaaactagtatatataatttaacgtggcaaatggacaaagggcatattgtacggcggcgggacaaagcggccggaatccgtacctgttaataaataattagaattcaataattagtggccattaatttgcggggttcacgtgattgtttgttaaaaagtgtattacccttaataagggtaggttaattttaattttagccctctcccaaaggataaggagagtacttgcttttctttttttcttggttatataccattactattagggaagaatgattagttggagtaatttaatttcctatatatcctagctagcaaaaataggagagggtttacctttaaaaaaatgtttaatattcattattattttataaaccaatgatggtgaatttcaccattatatgtatttgagtgaaagcctatgtaaccctagcggtccttcatccaagtgggggccaatcccacagtttatcatcactttttaatttttacagaataaataatatttatgtatttagagagtttctataataatgtttatttattttggttttattgttatttaataacgtgggtgtaacactataaattaacacgaaagttttatgtgtattatatacataagcacgtgaataatcatgttagcgccacttttgatgacacttttccttaaaaattatgtttttatatgacattatgatttgtctaataaaatttctgaatagaaagcattctatgtcaattttcgccaatgaaattgattttccattagtcaataacacaagaatatgtaatataaattaattatgtcattttacaaaaaataaagaaataaaaaaaaaaatccaaactagaatgcaaagatgaattaatttttacatatagtaaagttgaaaacaagatagaaaaacttgcaaagattaaaatttggaacaactaagagattatatatctaataaaaattaatatggaatgaaataaagaattattgtcaaaactcttttcattaagtttagaacattgacactatatataatactttggaacactttttaatagttattattacttatgtatatataaatactaaacaattttaactataaattttaattttacaaaatattaaatcattagatctaataacaaataataaaagagaaatttatgtttaatttagctatttaattaaataaatatctttttttgcactatataaaaaatatgtttatatataataaaaatattcaagacaaacttaacccttttttatctatctttacccaaaaactttttttaattatttttattttcaactaatgaaacaatctcagtccatataatgtaaaaatgaaagatttttcttagataaaaaaattaaacataaaaactcaaattttcctaatactacctattcatagctaatacgcataaaagtgcatcatatatatactaaaattgtttgttgttacttgttaaacaatgtatatacaatatatatatatatttatataatcaggcattttggtactatccatctcatttgacatctaggaaattgttttagctcaattattttctttatcgtgtatattataattatttatgatcacttgtaatatttataattacttattaattggcaaaaaatttaaataatttatagtgccgaaaa

SEQ ID NO: 300306 - DNA, 2365 bp, Cannabis indica
tagtgccacattgctaatgtgtggaaataaattgtgatatataagatgaatggactactcctcccattgccaattgattttgggatggaacctcattcatcttattcctcaaattctaacaaaactctagcattctactgtttttgtaaattaacaattttcgtagtcacttctctgtggaaccgtggaagtaaaatactttttgttatgtgtgatgcataatattggtgtaattgccattctttgccaactttttctcatcaatctcggtgtaggttccagatctctttcaaattggttgatgtattgcaattcaaatcatctaatttcctcaataacttggacaaattacatttggtgagagattgatttattttatttgtcttcgcatactcatatctgctcatccttaataaaaaagagatcattgcttctgttttacctggctgtagtactagtttgcggtctgttttgaaaagtccatcttatacttctattatttgtttgtatacatatatttatacatgttttaatttaaattcttgttctatgttttctttctttgaaattgaaccattgtgaggagaggtatattaccactaggttgttgtgcctatgaccacctatgttgttttaaaggcttttataatgttttggctttgataccatagctactttcatttttttaggaatagcactgaataaaactatacccttagtgggccatgcatttttcttcttaattaatttctagaaagattgttagtcttctcttgctgaagccatacatctacataggagtgcctgcaaaatgattttgtttttgccaccctaaaaattatctcattaaatccttactaagttatatttaaaattaatttaaatgtctgttcatttttatagcatattagtatgtgatatatctggacatacatttattataagatacaaaataccactttttttttatagcatagcattatattatcctttttatcattcctttccttctcttttttattggatgaccattttcaaagggcaaaacaaaacaaaaccatgagcataagtttgggtcgcaattttttgagccttaagtgcaatgtggggtcattatttattagaaagagaaatttgttgaaatagtagtccttgtagagcacaatgggtcgctgtgtttagttgctggggtccctagtatgtgcccaactacgttgtgcaaaggtagagattggctcggtcttgcccttctaaggtgggcactagttccacattcaatcattctcctctccatagccattaaaattgactagtgaccactacatctgatcatcgaaatggtaagcttccacagtacaatagggatacaattgggtccattatacattttgtatatagttttctttttatagtctcatttgataatatatcaattttggagagaaaatcttgttagccgaccttatctcactggctttctttttctttggtccaacttcaacgctgcaccacctaaagacccttttaatcgtctcacttttttgtatgttcatatttcttggcctctctttttgtgggtttgacaatccaagtacactagtgtccaatgtttacacttatagtcaaaaagtttaaaaggtatgagagttatttgtgccaatgggatgattgattctcaggcaatagtccaaataatgatacaatcattcgcagtgaatttttcatatgtcaaaaatttgattaggtactatggtttattaattgttacaactgttttttaaaaaggaagtgtaatgtttaatttagtttttatcctttaattatggcagttaagtttgagtttagttgtgattattgattatttcttttagtttgcagttcttttaggctgtagggtattgggtgtaaaacaaagttttagtcccacattagaagttcaggtaattggttaaaggaaataataatataaagaggtgataatgagatgttattacacattaatttattaaatttgctattttaatttatattttttattcttaaataaaataaatttaaatatttcaaaaaataaatattaaaggttgatttttaggattaaaaaaatatatttttgagcaaaataaaggaaaaggttctctcctataaatttttatagggaatatctttccctttccttacttaatttattttaatgttaattttattaattaaaaatgaaaaagacaaatatccctttaaacagaaaataattacatgttataataatggcaattttgtcaaattaaagcattccgatttgacaaatcattccgattacctttcctagttatgtaaacaaaataatatgattctggtttttttt

SEQ ID NO: 300307 - DNA, 1584 bp, Cannabis indica
gaggatgattttaacgatgacgtcacccttttcaaaggggaatccaaatcccgaataactaccccccaaattttcaaaagagaccctaacatactaccatacgaggggaaatcactaaatccaaaaatatcatcgtggatgccttcaatgaaataatgaaaaatgaagagggccacgagtaaagcgaggtgtcaatgcttcacggtgacgctccgaggtgcaccgtacatgtggttcaagagattgtctcctggatcaataagcttgtggatacaatttgttgatgagttcttgtcctaacattacacttctcgagactatgtcatcccgaggacgagcttagccaacatcaagcaaggggagaccgagagcttgaaaagctacatctagcgctttaatgctaaagcagccaaggttgggaggttgtccaaagaagagcataagatggccatagccgctagagttaggctaaaaagtaaactatggaacaatatgctcaagagagaactagataacctagaagatttcaatgagagaggcaacagatacatcttagtggaagacgagcatgagaatctaggaacgggtaaagacgaaaaatctaggaaggctcaagctgaagagtcacacaagaaaaggggttcgtatacaaggatgataggcaaaacaagaaagtcaagaaggagttggaaccactgcctcgtgagtatacccactacatggagctaacctactcaagagagcacatattccttacaaatgaacactgagtacccttcaagaggtccctacccttgaaaatagaaagaactaggagaaacctaaacaagtattattgcttccacacagatgtcagacatctcacaaaagagtgcaagcatctgaaagtcgaaattgaagagttaatacaacacgagtacttaggagggtatagaaatgagaattagaggccaaatgaggtgtgccagtaggaagatcttgaagaggctcccaaagtgtttttagggacatccaaactgtcattgaagacccaaaattagagatagaacctgcaagggaagggagaaatatgcccatgaagcgagacatgatcctcaagtctggaacctagagcaaagaccatcaaagggttttaagggagagaatgattcggtaacattcactaaggaggacgcaagaggtgtgcacttttgcaagaacgaaccattggtaattgtgatccaaattgccaacatgagtgtgcatcgaatgctagtggacaacagaagttttgtggacattgtgtgcttcgtaagcctcaagaagatgggactaggactcaaggacttaaagccatgtgcgatattgatctaagattctactggagactcaatcaaactacttggaacgatagagttagccctcaccattggagagaaccccaaacactccacagtgatggaaacatttttggtggtagattgtttggctgcattcaacatagtaatgggaagacccatgcacaaccacttgaaggttgtaacctcaacgtatcatttttccatgaagttttagttgggttttatgccctaaataaaactcttt

SEQ ID NO: 300308 - DNA, 2258 bp, Cannabis indica
gttaaagggtaccaatagtgtctaacacttttttatgtgttaatgtcgctattggtccaattaagtatttggtatcatataatttaatataataatttttagaaagtattgctagtcaatcacaacgcgacatatcgcaaaagtgctaagcaccactaatacctaatagcaatgctctatatatagagagagagattgatcagatattggatattattattgatcacctcttgaaagttatggactttcgaagctctaatgtggttgtgccatgtgtgcaagaattggcaaaagatcccaatatggtgagtgttccaccaagatacatacgcaatgatcaaactcaaattgatcaaaccaataattcttctgtaatttcttctgatgaaaccccagttatcaacttccaaaacttattgcttttctctcaatctcaccacccagaattgtatcaatctgaactcaataagctccactcagcatgcaaggaatggggcttcttccaggtataatttatatttatatatctttcttaatattgtgtttttgatactcacatagttataataattaattaagtctagatacatcttataaatactgaaaataaaattcaacttgcttttttctctatatagtaaattaattattctaactacgataataaatatagattagaatacacctacttttcagagatgtaagtgtattataataattaaaactcaaaaaacaatgtatggattcatggttcattttttgagagtgcactagtacaaagcaccctatataatattttatattgaattaatagtttttctcaataataataataataataataataatttgcagttggtaaaccatggtataagtgattctttggtggagaaaataaaagaagggatagaaaaattgtgcaaactgccgatcgaggagaagaacaagctatggcggaatccaggagatttagaaggcattggagatcctgttgttttttctgatgaacaaaaacttgattggaaagatgagttatttctcattactctaccacttgccttgaggaaccctcacttatttccaaatctccctcttcctttcaggttattttatttattcttatttttcttttttaattccttaacaattacatcttcaaatttagaaagatgctaaaacttatgtctaatttcaccaaaaatatatagcaggaccgggcaagctggacaaggcccgcgtctaggattcactcattctagggacctaaaacaatattttctctttaaaaatatataattttttaataatttttaaaaatactacatattttttaaataaagaacctattaatttttattttattaaggtccacttaattttagggtcaactttgatgtatagtaatgtattattaaggcatatttgcaaatgagtgcgtaattattaagtcttgtctggtaattactaggctagtaagatagtaataacattatatattttaaaattcagatataaattgataattatttactaattgccaaaaaataatatttttttaaaaattaagactgaaaatagaaagtttttagcaataattctcatcatgtaactaaaactctttaattatctctaattacataattagacaaatatatcaatttatgtataatgatttttaattacactcaaatccaaaatctctataattttctaaacacccatttaccgataaactttttaatgtatatctttttaaagcaaaaatccactaatatttgtatatgttattatcatagaacaacttctaacacacacacaaatgtgcagggaaaatttagaaatttattcattgcaattggcaaaactagccaaagacataatttcccaaatggagaaggttataggaatagaaagcaaagaaatttccaaattatttgaagatggaatacaatcaatgagtatcaactattatcctccatgcccacaaccagagaaagttacaggtgtggcccctcattctgatgcatgtggcattacctttctccttcaattgaaccaagttgatggctttcaagtcaagaaagatggcatgtggatccctatcaaacctctcccaaatgctttcattgtcactttaggagatctgctagaggtaactctaaatttacataaactacttttggtaaaaaattgagtaaatactattttggatcctctgttttgtaaaagttacaattggactttctgttttgtaaaag

SEQ ID NO: 300309 - DNA, 1907 bp, Cannabis indica
ttcaactttatattttttaaatagtcatataaattatatgatatataaatatatataataaaaacatataaatatatataaaaaaaaccttcttaatcgggttggtcgggttagttcaggttgattgggcaggttggtattatttttaacccacccaatataaagattgggcgagttatattttcgtcgggtttttcaatttgtaatttttttcggattatcttggtttggtttgggcggtttacaaaagtttatgtacaggcttacttgttattataaattaaaagggttagtcatttacaataacagagtaaataggtaaagggatattttccaaccaaaaacaagcctcgtccacccctaatgcgaacttagccaaaccgtgagcagccatattgattgtacgtttgacatgagaagtagttacattaggaaaaaatgataaaagacaagaaacatctacaatcaactcatataaaagaagagattgcattgaaggaagctctcaaagcattagaaaccatcagtgcgtctgtctctccatgtgaaatcggcaactgctgttataaaacccagtttaagctatggaatagcgctttggcctccatttcatgagatgagaagttgcctatgatcgacatggagagagcagcagtaacatatatgtttgtgtcccgaactatagctctaacaccaataatatttttctttacatctactgcagcatcaatgttcatcttaaatgcaccagcaagtggcggcttccatggtactggatcaggaacatgtgttgctggttgtgatggagcaatggtggcaacaacgtgatacttgagattggctgagcggtaattttgaaggtaggcagaggcaaaggaggcaagatccttagtcggttttatccttagtcggttttagcactttgaccatgaacaactttctttctcccagtccaaatcgaccatagtgtgcaaaagatttgttccatctcagattttgaatatatagaggttagatggaataagtaatcccccttttgcattgaggaacatgcttgccaatcgaacatcaagtttgaaaacctctaaactttttgagcatatttatagctaaagagggcatggccaattgtttcccaagcttgacggaaaacagagcatgttgagttcgtaatgtttttccttcgaactaaagaagtagcaataggtaaggcatcgtggatgactcgtcaggcaaaaattttcacttttagcggtacttggagagacttgaagaatttctaccatgaagaggttgagtttgagcttgaagtaatatcaatttcgtcgagagatgtggcaaggtggtaaccaatttgtatagtataaaaaccagagtgacaatgatgccaaatgagcgtgtcattagagttgaaataactaagtggcactgtcaaaattctgtccacatcaagaggggaaaaaattagtgtagtagagatatgttccattgcctttttgcagttattaagtttgctacaactccattcaaaggcttggtataccgaaaaggaagaaaagtattatgtccctgaattcatggatctgaaccgcacttaactgatcttctctctccaattttccaatacaaacccaccacaaggaggtttttaccccaatgtatgccctgccaagtcaagaaaaaaatatttaaataatgaagaaaaactaagatgatgttattaaaaaatttatgataagaagaaaaaaactatgatgattgagaagctcataaaagtgctctaattcattgtaaattttgagaaaaattacaaaaaccttttataatgattagtgggcttcaaatgattactcaatttatttaaggggtttttacatcacatactaaaatttcctttttttttttat

SEQ ID NO: 300310 - DNA, 2905 bp, Cannabis indica
tatttggtggcagtaatcgtattatcttaacagttgggattttggcttttcaataacaatatttcatatcaacgctccaaagtttcggattcgatcaatagatattgaggaactgagtgttagtagctcaaacacctttgatatgaaatttgaagctgaactaagcatcaagacagcgatttcggctacttcgatttcgaagaaacctcagttaggtttttctacaggggagctcctgttgccctagatgatggtggtgttgtgattgaggaaggaaaagtgaaagctcgatcaaccaagaagattagtttctcggctgaaatggggaccagtaattcgatttcacctgatgatatccaatgcagatgtttgactttgacttgtaatgcaacgatgaatgggacagttcacttgatgaagttgatcaagaggagaagatcttctgagatgaattgcactatcaacatcaatttgtataaaaaagttgtccttgatattaaatgcaaatagaaaacaatatatatattttttgtatgtttctatttcatagtttaagaaggtttattacgagtttaattactcagcaaatgataccttgttgatctaaaaaacaaatataggttgtttattaaattttgctgtactctaattttgattatatatatagttatgtataattattccacgagggtttgtaatttttaattattgagaataaattcatccaaacactacttattattaatctatagaattattatccaaatgaccttttgagtttgttgccatatacactcatgtacttggatttagtatatcttcttgttttgagattgatcgtaatataagtaaaaaggggtattcctatatattgaactggtgttcatcttaaatgatttttttttaaaggaaagaaactccattaaaaggctctaagcctaaaaaaattggagatacaaaaaataagtaaatttaaagaattaaatgtataactaagtccagctacaaacaggcctgatctcaaatgattttttgattatgtaaatgaacgtttacaactttattaaattgtccaaagaaaaagaaaaatgcactattatttagaaacttaaactttgattcttgattgagatttaactttgtatatttgttgctcataactttgcaacttaattaatttgtacccctgtttaaaatgggttggataattacattataaaaaatcttacttttagttacaacaaaatttataattaaaaataaaaaagttgtcactaattacaaatcattattcttacattggaacaaaaatcaaaatttgttgtaactaaatgtatttttagttacaatactaaaattatattaataataattcatatttaaatattatattttagtcacaattaattttttgttgtgattaagagtcacatttaatcacaattttttttttgttataactaaaaaattattagtactagtacctgtcttgtgttttgtgtagtgattacaatttgggagataaaatgttattacttagtaattttaatatttatttgagagttaaaaagaattgtatttattgaattgagagaaaaactgattcattgacattttgctaaaattagttttttcacaattaattcaagggtatttgtgccatgcatatttcataattacagtactaacatatatataagataattgcgtcattacattcgtaattttgtgagttagaattttagttttcaaggaattatttcgtctgtggcttgttttaattataattattatatgatccgagtatatatatatttgaaacagaagaaaatatagattctccagtccaaatatatgtacacattagaaatgaattcaaaaagaatcacttttcccacttataattatatcttcctaaagtctaaaagctagtatgttaaagtcaaatataagaaaattacgatattctcatattgacaataaatatttacgtacaattaatgaaaatattataagaaaaacttagttatacataaatatatttacatcaatattctatggtgggtcaatctgaaatacttagaaaaagaatattatagacatttggtgaacaaaataagacatgaatctgattaatgtgtgcacactttaattagcaaatacttaatttcacagatatgtactcaagattctctagctaattggtgaatttttggaaaaatgtatacagtactcattatctaaatcgagtatatgttggtttgttgagaaagaaaaagtttaaattaaaaagctgatatatgattgacaaggaaaactataaagatgatatggaaggatatttttcaatatatttaataaaatttcttcaattataattttgtcacccctacaaaataaataattaaataaataaattatagttgtcaccggccatttataattttttttttttggaaagggatggtaattttattaaataaaggctttaactattacaatagataaaggttcacttacagtattcttcatgcgaaaattacgaatgcaaacaagaaccacaaacaatacaatgagtatttttatttatagaacgtttaataaaagacaatttaacaaaattcaaagaagcttacactactacaaactgcacttttggtatcagttttaaattgtcacttatacctttagtatcggttcatagaaccgcgacacctatttcacattcacaaaaagttaaaatttaaatgtcggttataacactactacaatgtaagcctttagcttcccttttttcaacccaatttataaaaagggaagctaaagggtgtgaaaatatcagcattgatatttagaggcgattttttggtaaaaaccgtaggtatagaatgtatatatatctatg

SEQ ID NO: 300311 - DNA, 1254 bp, Cannabis indica
aagtctcaaacaccttatccgaaacgatatattccactcctgttaattaattattattattattatcaaaacgacaatcttaaacaacaaaacgacatcaatcaaaaaaacacaaaacgaaaacgacaccgttttactaatattaattaccaattaggtgagcggagatatggtcagaatcgtaaacggcgcactggagaaaatcctggttgagtcggctgacgtaatgatgagtcatcagctgacgtgtcatgtcgtgactgtaaagagcgaagctgcacacgtgttgattcatcttcttcactggtttcaacgactgcatcatctctgctcctgcatccaacacgtgctgttcgatcgtcatagcctttcccggcggtatcttcttcttctccggcaccggcatcggagacggtgacttatcactcgaagccatttatagcttttattatgtatgagagtttcatttggttatatatatagtggggtttgagatgacgtggagggttgtgagggctccacgtaagtagagtagtcatgcatgaggtgatgacgtggctcatagttatcaacttttggtttacacttggaatgcatgtatgtgtttgccttttattagattttgtcgttttatcaaaattttgttgttttattgaaaatttgtcgttttttgaaatttgttgttcttttctttgaaatcgaatgtaaattaataaaggatattcttgcatttatagattatgtatgaaacattacgtaagaactttgttacgttgaagtttttaaagtattgtcgttttcctttaatgttgtcgttttttcgtattattgtcgtttaatcgaaaatactgttgtttttgttaaatggtcgttttgaggaccttgtcttctcttttttggttaaaagataaatgctaattaagagcttgcatgtattataagtgttttcttttattagatttttgtcgttttaatttgaatcttggttctccaagtgttgtcgtttttccttaattttgtcgttttctcaaaatattgttctgttcaatgttgtcgttttctcaaattttatttgcatatataattttatttttatgttatacttttgtttattttattatttatttatttttattatttatatattatttttatattattatattgttatttttttgctattatatattcttattgttgttttccttattactttttacattggttttctttattatttctttatattttatt

SEQ ID NO: 300312 - DNA, 4146 bp, Cannabis indica
cagcgccagggccgtgggagggaatttgagtccgggtctggtcgtaataccaaaagaatgaattaaagaaaaaaaaaactagtttaaaaaaatattgaaagtgatttttgttgtttttaaaattttgatttctaattataaaattaaaaaagtaaaaacagttttatagaacatgtttttgaaaaatattttcacttttctatttttaaaaacagaaaactgattaaaaaagtgttaccaaacgccacctaagctactacatttaaaattaaattaatataagttaatatattaataataaaattttagatgaggtgttaatttttaattggagagacataatatgggataggtatttttgacagaggatcctcattcggaaacaccaacgttgacatctcatatctttttcttactttttttttgacacgtttaaaaactgatattcaacgcatacgtgtccttctccaattaggttattgaatctgattctgagtcaaaatcatatttaaattgtgaattaacaactacattttagtttccattttgttcgctactatatatttccaattccttaatcctaatcaaattcgttctttcccagaaacgcgtattgtttaggttcctttaaaggaacgttttatgtgttgagtcgggctgtcagagaagagaagatttgacagcccgactacattgaacgaaaagctcctagaatcgagagaggtaagaatatatagaagagaatatacttatcttttgtgctcatattcctgcgtccattctcttctacttcctcaataatcaatcacttttttgtttttattttgagactttaatattacatttggatataaagttaaaacccatatcgtaaatttgttacattgttaaagggttatcgtaatcccccaaccgttttgatcaagcgtttctcattctcggtttttctgggtttctgggtattcaggctagagccttttcgttgttctattagggtttggtttggtttgatattgttttgagagtcttcgggtgctgtttttgaacatgggttccttgtctggagcccttcaaagacctctggttgctgctactgccgttgccgttgcttctgtttcgaatgagttttccgataagttaccgtctcattctcataaatccccgacaacgttttcttcgtcttccccagatttattgaattcttcaatccgtgattcatttcaagaaccaaagtcttcgtgggcttccaatatttcagtttccaagctcgcaaacttatcgtttgtgagcaaaatacgagtgcccgtacctattgttaattttcccattcctcattcgggcactaactttgttcctaactcctttagtacttcaattgcttgttcccctgttctccatgatttgtttcaatcagctaagttggtcaaagcaccagtgccagttacacatcatggtttatctccttccccagcagatgttatgtacagatggcatttgcctgagccggcagccatagatgtttcaggtggttctgagtgttcatcagccaagtctaggacagtggtagttttgctagggtggttgggagcaaagcaaaaacatctcaagagatatgcagaatggtacacctcaaggggctttcatgtcattaccttcacgtttccaatgtctgagattcttagttatcaagttggtggaaaagccgagaagcacattaacttgcttgttgaccatttggctgaatggttagaagaggagcatggaaagaacctggtttttcacactttcagcaacactggatggctaacgtgagtccatttagttattcttcttcttctttttttttaatctcatatgcaactatatcttgttagagcattttttatatttcatatctatttaaaggtcttgatttgatgtgtaaaaaaaattccatattgttataggtatggggccatccttgaggggtttcagaaggacgatccttccttactgggaagaattagaggctgcattgtggattctgcacccgttgcagcacctgacccacaggtaatggagacatgtaatgcatagggatgtatatttattatgatatattaataaagatttgccttcaaagaatggctttgcattagtaaccactgagattctgatttgtcgccagcaagaattttgctagaattggacagtgattctcttgtttattgagtagctttctagttcactattgtgtcctgattatattttgtgtattcttgattatataaaggtatgggcttcaggtttctctgctgcatttttaaagaagaatagtgtgacaacaaaaggagccataaaattgaatgagtcgggaactggagttttggtcagcaccaatgaggctgtggaaccaaaaccagcagtaactgaggcagctttgatgttggttctggagaagttttttgaggtggtattgaaccttccagcagtgaacaggtaatttatcacaaaaatcactaccaatgtttcattaggattatcatctgcctgtttaattgaagtctgtgttctctttgattaagaaatgaatttcaaattacaatatatagagacgaatttgaggaaatatggagttctgaacttacaatacagagcctaagttcatacatacattacctgtttgcatatcatatatttgtccaagcatatcactgcattaaactcacgctgtttggttatgtgcttctgtaactcatcccagtgtgcctactgaaatttgcttaacaatttcatcatcctatcatgaattttcagtaccaaacattatgtcatatactaaggggatggttttttttaggccgtgattattatattaaaacttagttttcaattactactgcatcgaaaaagaaaataattgcctttcctgtcaatagttcactgcttaaggttgtatattctataaaaacattgatagaagagagaactgacacaaaccaagtagtttagaagggagccttttcaattgttagattaggaaagaagttgacataaatactgaagttcaaatttgcaaaacgtttatcaatccctttttttttattattattattgcttaagatacaacgatgctttcttttataaattgcctcgttaccctttctgatgcaatgcaaattcttgccattgtgcttcacttttgactagcacacgtccatggattctaatatgaaaatggttactcttattatattacaggagactttctgatgtgttggctttattgtctacacaacaaccaagctgtccacaattatatatttatagctctgcagatagagttatcccgtcagggtctgtggaatcattcattgagaagcaaaggagggccggacgtgaggtgagggcctgcaattttgtgtcgacgcctcatgttgatcatttcagaaacgacccgaaactttatacttctcagctaactcaatttttggaagactgtgtgcttgctaattgcaaaaagtcccattagttaaaactcaaactaaattctttttctcagtgaactgtacagaaaagagcggggaaaaaatcattatttcattggtatagatttggtgggaatgcagcatgaggatattcctattgtctgctctgttcacatgctgtaaacatatattcaaaagagggtgttataattatacagctcgtgcaatcttgagctttgatatacatatatatattttggcatacaaataaattaacctttggctaattttgtgtgataattctgtattttacttgtgtaataattctcattttcatgaattggtaaagcgtgaaggtatatatgacatgatggttgcaatcatccaaataccatgtgcactgcacatatgaagtgaatgtgtctcattccatttcaatttcatatgtaagcatgaaacaggcatctctgtgaaaacacccaaatggtgacacataatgatgatctttgattcaccgtgaataaccattgatagttattaaaaatttaactataaatattaattttaaaaatattaaattattaaattttaataaataataaaagagaaatttgaatttctacactaaatttagctccttaattaaaaaaaaatcaaaaaatatcacattttttcttaa

SEQ ID NO: 300313 - DNA, 763 bp, Cannabis indica
ttttcctttaaaaatactacattcttttaaataaaaagccaataattttattttttaaagacccatttaatttcaaggctaatcttgatagcttttcaatatgatctcattaattttcatggataaaaggttagtttattttgaaagcttgttcatatatgtacattgttattatgttatttaatttttcaaattaataataattaattagttgcatcaaaaaatgagttatgaaagactatattataatgatgaattataagagtatttctcctaattatttagaatcaaatttagtagctttaagtagtgtctcttattattactattatttagtcataaaaattaatatatttatatatcttttagagcatatacatccatacacaatattttatatatattatagaagattgattgtcataattttaataaatacacaatcaaaaataattatgaagttttgatataaaaaagagtgtacaatttttaggtgtctctaacattactaataataatatgatgtggtttataaattaatgggtttctcaatcattaattcaccaaaagattttgtgaatatatatgggacacacacacactctctctactaaaacatcatcacaaggtgatttcatctctcttctttccttaaacaccaagatatatatttatataatgtgcttagctatgtatgcattattttttcttttttcttgtttattatattattttttcttttttcttgtttattatattattt

SEQ ID NO: 300314 - DNA, 4168 bp, Cannabis indica
tctaatagaaagaacacaactttgaatgtctctttggaacaagaacggtccaagactccaactagggcacgtgccaaaacccaacacaatcctcacacgtgtgcatctcgggttaattaataaaaataataataacatttaacaacacaacaaaaagaagtgaaaaacaaaaaagacaaaataaaaacaaaatattttaaggttaaaaatctagaaaaaccaaaaataaaataaaataaaaattcctagtcttttttttttttctacattttttttttaaaagagtagagtcctttgcagatctcatctccactcttctttacactctacagctcccactccttaccattttttttttatttcaaattcaaaaaaaaaaaaaagattttccattgttacaccttcaaaaaaaaatagcttattaggagtgaccaaaggtacttccttttttctctcatggtgaagtttaatcaaaaggggtgtttcattatatgttcaaaaaatggtcttttttattttttgccaaacgtttttttttttcttgtttcttattttagttgttgaaacttgaaactactaatgttacttttagtataagtagtttaggtttcttgttgttttaggctacattgaaagtttctttttctcacttagatctattctatgcattatgtgaaataagttactttaaactctcaactattttctacctatattgcattatttttctcttttatgtttggttgctgagaaagtgtgtgatgatcagtaagaaaacttattaaagttacaatctttaatgagtttactatatcatatgccttgacaacattattttcttttttggattatgcaggttaacacaatctggtttaaagcttagtaaaatgtactattattgattttgattctttaatcttttttttcaaatttctgccatttttcatgtttgttttgagtaaatgcaactaaattgtttgattagtgtgaaaagtgagaactttttctttgtttgaaatttaattatctctgttttccacagtgagaaaatatgcagaagccaccacaggctgtagattttgctctaaaggagacctcaccgaagatcggtgcaggcgcaatcacaggagataagctctcatgtacttatgatcttgttgagcaaatgcagtacctttatgttagagttgttaaagccaaagatttgcctggaaaagatgtaacaggtagttgtgatccttttgttgaagtgaaacttgggaattacaaaggtgttactaagtatttcgagaagaaatcgaaccccgaatggaaccaatgttttgctttctctaaagaaagaattcaagcttcaacattagaagttgttgttaaagataaggatgttgtgattgatgacataattggtagagttatgtttgaacttaatgacataccgaaaagggttcctccagatagtcctttggcgccacaatggtatagattggaggataggaaaggtagtaaggcaaaaggagagcttatgttagctgtgtggatgggaactcaagctgatgaggctttccctgaagcttggcattctgatgctgcatcggttagtactgatggcgttgctaatattagatcaaaagtttacctttctccaaagctttggtatgttagagtgaatgtgattgaagctcaagatttgcagcctggtgataagactaggtaccctgaagtttttgtcaaagctgtgcttggaaatcaggctttgaggactagaacatcaccgagtaagagtattaatccgatgtggaatgaggatttgatgtttgttgttgctgagccttttgaggagcctttgattcttagtgtggaagataaaggtgaagtgttggggaagtgtttgatcccattgcagaatgttcagaagagacttgatcataagcctgtcaacactaggtggtttaatctcgaaaggtatataatggtagatggggaacagaagaaagatactaaatttgctagtaggattcatttgaggatttgtttggatggagggtatcatgttttggatgaatcaacacattatagtagcgatttaaggccgacggctaagcaattgtggagaccgagcattgggattttcgagctgggagtcataagtgccatgggacttatgccaatgaaaaccaaagatggtagaggaacaacagacgcgtattgtgtagctaagtatggacagaaatgggttcgaactagaacaatcgtcgatagctcaactcctaaatggaatgagcagtacacatgggaggttttcgacccttgtactgtcattacaattggagttttcgacaatggacacattcatggagagaaaggaggaagtgggaaagatgcaaggattggtaaagtgagaattcgcctctcaacactcgaaactgatagagtttacactcattcataccctcttctagtgctgcattcatctggtgtgaaaaaaaatgggagaagttcaattagcagtgaggttcacatgctcatctttaatcaacatgttgcatatgtactcacaccctttactccccaaaatgcattacattcaccccttgtctgtaatccaactagatagtttgagacaccaagctatgcaaatcgtttcgatgagactaacaagagctgaaccagctctaagaaaagaggttgtggaatacatgcttgatgttgattcacacatgtggagtatgagaagaagcaaagctaatttcttcagaatcatgggagttctaagtggtttaattgcagttggaaaatggtttgatcaaatttgctattggagaaaccccattacaactatactaattcacatactattcatcatactagttctttaccctgaattgattctcccaactgtttttctttaccttttcttgattggtatttggaacttcagatggagatcaagacaccctcctcacatggacacaaggctttcacatgctgatgctgttcaccccgacgagctagacgaggaattcgatactttcccaacttcaaggccttcagacattgttaggatgagatatgacagacttaggagcatagcaggcagagttcagacagttgttggtgatttggcaacacaaggagaaagatttcagtctcttcttagttggagagatccaagagcaagcacattgtttgtcacattttgtttgattgcagccattgttttgtatgttactccattccaaattgtgttacttcttacagggatttacatgttgaggcacccgagatttcgccataagcttccttctgttcctctcaacttttttagaagattgccttcaagatcagatagcatgttgtaaaaggatcaaggagaaagacttgcttaattattagttgttgttgttgttgttgcatttgatgtttttatttggaattatgtttaatgtgtaatgaaaaacatgttttagtttgtttttgagttcattagtctttatgttttgacttcaatgaatgcatttcatgtaatgtaatataataaataaacatgaataaaaatgattgagggtgtgttcttatttggtatttattttgatgttgtgcatatttagtattccgaactcaaatttgatccataaaatttgtctactaaatttaaatttaatcatatataacgatgaatagtttagttaaattgatcaaatttgattttaaatattcacatcaaatgctttaaaatatttaaagaactaaatttaaaacacattacattagtaagttttaaacttttttttttatttatttattttttattttatagttttttttaaatttactattcatactctactatttattattgtaaatatattttattaatcatttgaattttagttttacttttaatatatgaagatatgtataaatattaatattatatgtttaaaatgaataaaatatttaaaattaaaaaaaaaatagattacagtaacatatttttttaaaaaaattaatatatgatataatataaaagtttgaagtaaaatagaaacgaataacgatgagattttgaaaatatattttaaatgatagaataaagaagctgatgaaaatgctctaagtattattaaaaacttagtacagtagaacctctatttaagaatactctatt

SEQ ID NO: 300315 - DNA, 2712 bp, Cannabis indica
gtaattatgaaacttttgtaaaaatctaaaaattaaaaaataaaacttttataaatgtttaaatttaagtaaccgaacattgacaaaaatgtaaaaagttggcaaaaagtggcacctaagtgtaaaaatcccaattttagacggctacttcggctgcgactgctccttccacggctcccattgttcctcccgcggatcccgttgctccgctcacgacggctccgatcgtcctcgagtcggctcccgtctcttccagtcaaccagctccgatcgctcctccctcggctcctccgacaacagctccgaccgttcatattggtgatcactttctctcactaataaactctgtgaggaagctgtcttttatctgtccaactacaatggatcctgaagtggcactagaacttgtgaaacacggtgccacattttttctcctcgatgttcctcaatacacccttgttggaatagatactcaggtaagatcatcacttgattggctgcttagaaaagccaaggaaaattaagtacttcattgttttcagtcagcatttcattcgtcactgtcttgcaggtgtttacagttgggccttcttttaaagggataaagatgattccttctggtccccatttcgtcttttatagctcatcaaccaggttgcttatttgttcttgcatgtatatacatttaaatatctttacatatctgtataagtcacttaatttaaattattttattttatcatcacgaagattagtctttttcttgagagacgctcttggtcagggattgatgatattcatatgttaaatttcttaccgaatactcttctacgattgatttttagtatgtatgtttaaaattctgaatactgtgaaaatagctcggttgggaatatttatatgttttcataatcatagggaaattaaatttgtttatatttttttaatcactgtttgcagagatggcaaggagttctctccaattattgggtttttcaaatatgttgatccctcggaggtttttcttgttacttctttcaatgtttacctgccactgggtttcttactaacgtttatgtattagttggttcctataatttgatggtaagattacatttgttgtatttgatcactcctacagataattgttcgaaaatgggatcaacaagaggaaaggctgataaaagtattagaagaagaggttctaaattgtgttcttttccttttactaatttctgttataggtgcagatataacatgttggtattaaaatttactttgatgccttaagatggagtcatgttggttattggcagcatcaaagtgctaggatggagtcatgttagacgagtcaagtgtattatatcactgaaaatatgggatgcaaaatctaaacataaattttattcatctttgcttgaattatacaactatgatctgtattactaatattttttctatccctttcttgccctttcctccaatcaaggagagaggtttgtgaagcagttagaagattggagtttgatagacaccttggtccttatatttaagccagtatgcaacttggaagagtttatctaattacattacgaaggacatcatagaacggataggtactatctaatagctatttcaagggttttttatttattgttttcttgatattatcatcatgttccttcattgttgtttccatttttgcaattaatgaaacctttgattcagtttttttactggtctgaattctgttgtgttttaactatttcctagttgaattttattgtttcatagcattttctgtctgttgtattgccttttttgttttggatatgattttgtcctatgatggactatgaaagatgccttgggttttgagacatttataaagaaagctaccacacagtgaattgtatctcattttgtttggtaataatgtttgtctctgactaagaaaactagaacgaatcacatagtgtattatgctggacacatgtgaaattcaattggtttgttttacagaacctattggaggagaaattactgttgcgagtgaacctgcaatgatgaaaaatactcctaaaacaacagtggagaaagctctagatgagcaactgaaagatagcaagtgctcaatatctgctgaaaactctcagcagacaggatgctattacacatcaattcctcgcatcatcaaacaaaaaggaattcaggggcaagaacttacggccttgaatcttgacaaagtaagtctcattcaaattttctcaaatattagtgggttattattggtttttcctatctaatttctctatgtagacccatttgttagaaagcttgctggtaaaagagtatggaggttctgaggatttgcttcttggagaactgcaatttgcattcattgcatttgtggtatgtgtaaaatcctatgttcatttgtatacatgtaatataaagccagattttatgacatctaaaggatgcagatgggacaatcactcgaagcatttctacagtggaagtctatagtcagccttctatttggatgcactgaagctgtaaggatttgcttttgcatattcccaactagtctatagctttatttgggaaaatctacaatttaaaatggcatgaaactaaaatgtactttctagtaacatgcctttgtgggtacgagctgcacgttttgttttgttttaacttttaggttgt

SEQ ID NO: 300316 - DNA, 1164 bp, Cannabis indica
ttttttttaattaagaaaaaaatcttaattgataatcatcattagtgatcccctaatcttggacttttcttgtcttttataaaatctctgtcatgttcttgcaatttcataacatgattaacaaaatgggctccacttaaataatttagttagtgttttgccctactactccatcacccccaatttgttattaataataataataataattaatatttaaacaatatataaatattttaataaaatctattaatgttgttcaagtatacctttctttctttctttctctctttaatttatttttctttattaagatgaaatcttagttgttccaatcagggattttgtgtctgtaattaaggtttcaagtgtgcctttcagtgtttggattataattatatatatttatatatttttaattaaactaaattatatgtcttatgttcttctgtcggatttccatatagcatggtaattagaagtactaatgtttcattttttgttacaaatttattagtattaattattagaattattaatttagaaaaaagaccaaaacttttatatttagtgctaattacaatatgtgggaaaagcaataaaaatattcatatgcttattttcagtatagtatttttcttttaatttccaacttttattgtgtatatatagggaaaaaaataactaaataaatttttgaatgttgttataataaaattgtgggaacatcaacaaaccaattaagttcctccctctttttagcactaatacacgaatggttgtttgtgtattttgcaaaatgaatcaaatgaatacatagaactcaattttagttttttttttttaattggtatcttgaactttacttttaggatgtgtttggaactaactgagtaattactaagaaaggtaattattagggtagtaagtgtaaaaaccgcttagtttaatttggaaattagcagttaattataattaattatgaaaattatttatagccatttaaataatttattatactattatttattgaattcagaaatgcatttttatgtcatgtagtagtttgcataattttgcattccggtggccggtattttggaacccggtgtttggctcagtagaaatcacaacttagtatgttagtagtttggggcggtttat

SEQ ID NO: 300317 - DNA, 2110 bp, Cannabis indica
aatataaaaaaatagtaatttaaaagtctaatatatataatacaattatattacaaaatttaatagatagaatgtatattctattcttatatttttttttctacatacaatttaaaataaaattaaatattttttttatatatacaattttttttcttcctttgaatttgttattttatttatttaatgtgttgttggagacataaaataactataatttgttttattttgttgctagttatgtgaaaaaaatatttttttcataaatattaaataatttaatattaaaaagtaaccaatccaaagtacccgatccaatccgcacttttgcggattggattggattggatttgagctattgtgcggattggattggatccaaaaaatgaaatccgcacttagtgcggattggatgttgtttgaccaaaagtgcaaattggatcggatgaacagccctaccagagaatccaacccttaatctgtaggattcattgggtttatagaattttgagaattacacttagtttctctttttcctctattggggagtttactctgaattacatatttgggctgcctcgtgaagtccaacccacgagagtatgattttctgactaggcaaaggcgatacgactgaattagtccaaactatcctataattgtggacaattaatcgtgaattaattgcttgatttctattttagaaagttttccattttagcttgatacaatctctatcagatttgggatgtcaattatttcctttatctatgcgtcaggaataaaaagagaaaccaaactagtcttctaggaacaagctgtcttactctttctgcatcacggtaccggacttgcttccggagttgaaatacattcctagaaggtcctatctaagtgggtttggcccactttatcttctttggggacccaatgatgggcctttgttgttgacctggattacacgtgttccagagtatagaagattgtattaagagagaatcgttcaatatagtccttcaagaatacatcccacttctttagccaaaaaaagaatacatccgtcctgccagaaacaagcaattggtgttggtgatgaaaaagaaaaagaggcaagattgcgtgccaccttgtaagctgatctttacataatataaaaactgctctccaagcatttcttatatagccatttctatgccatattctgattgagataaagggaaagaaaaggcccaagaaagttaatacaaggcctacagtttttctgaaacgtaactcctttcttattacaaacaattatatttattgagaatctgcacaatgatgtctgggtgtctgtttaactatacaaatggtcagataagcggtatgtccttcaaaaattcaggttcaaatgtcttcaaaatgtaaaaacatgaccggaaaaaagaaaaaaaaaatcattcctacaaaagtagttgatgtatccaaacacaccaccagatcaaaaactaacggaattttgaaattgaaaaattcgaaataagaaaaaagctaaaagcaaaactctaatcctcattctctatagttaaactccaatattaagccaggtgatttagaaaatgagattgaatatgacacccttatctctagatgcaccatttgaaaacaaaaaagactcaccatctaacgagtagaggccttgcacgcttaggaagatccaagggataaattcaggcatacattttttttttatccattaatcaaaaataccctcaaattatatttcaataatatgtacctatgagtgagttatctaatacactcttactctctactttacattacctaaaaatataatggggacatatctataaaagtgtgtatattttaaagaatatagaaataaaggtaaaaattaaaacgtataaaataaagtgagtatacaataaaatttcttcaaaatccaatgcctaatcgcaatgaaatcatatgactagaagggcaccatctaaaataccatacaactctcagcaaagcgatatatggacttgacaactagcagcctaatatccaatagcccattattttttgagacattactatatctgaattcctctccagaatttaattt

SEQ ID NO: 300318 - DNA, 3531 bp, Cannabis indica
ctaagcatagataagctcttacagttataacagtgtaagtgagatgagtctagtaatgtccacgtgtactgtaagcttgtaaggggatttaatttcaacaactttcacctaaattcccttagaaacttattgtcatagtgaaggtccattcccatgggtcctaactctttcggcaatgatctatcctccattgcttattcctaacaacttcaagcaatgcttgaactttattaggttcaaaatctttgtccttccatcagcatgattctcatctgttggcaccttctagatgtgaatctcttcttgtgtcaccttgtcctgtatgaaatggcactttatttcaacatacttggtcctatcatggaacacatgatttttacacaggtgtatacaactttggctatccgagcagactgtaggagtttgatttgatagcttcagttctgtcgtcatacccttgatctaagttccttcttttatggcctcagtcactgcaacaattctaactcagttgttgataaagcaacaatgggttgtaattgaaccatccaactagcacaattgtcacctagctataagaaaatagtatgctgaagtagacattttgtgatctctatcactagcaaagtcagcatcactatatccttccataattatcttgttgtttctcttactgaacaccaattccacatcttgtgttcttaacaaatatataagcacccatttgacaaccttccaatgttctttccctggatgtacttgctcaatacactcatggcgtatgcaatatctgccatgagttacatcaatgaacccactgcgttagtatagggaacatccttcgttttttccttctctgcttgattcttggggcactgatccttacttcgatgatactgtttagtcataggttgtttagttatctttgcttctgtcatagaaaattttccaatgatcttttaaggtatctagtttgtggcaacatcagttctcctttgtctccgttccttctgatattaattccaagtatcttgactgcaataccaaggtccttcatctcaaattctaatttgagttatcctttcattaattctatcttagacctttctttgtgtatgataagcatgacatctatatatagcaagaggtagatgacttcactaatatcagtaccttttaaatagagacaataatcataatagcttctagtcaatcccttcttttttatgaatgcgtcaaatttcttgttccattgtctaggagattgttttagtccatacaaggacttgacaagcttgcacaccatctctagattctcttttgaatcaaagtattttggttgttccatatagatttcttcttctaattctccataaaagaagggtgtggtcacatccatttgatcaacttctagatcgaactgagttacaagtgttaacattatcttgattgttttgtacttaacaacaagtgagaaaatctcagtaaaatcaatccttttgtgtgaaccccttgacaaccaatctagccatatatctcataggctcattgttgtcccttccttctttgtgctcgaacaaccatttacatgatactacattcaccctttcaggccttaacactagtatctacgtttttttcttcaacaatgatctcatctcttcattcatggcatgcaaccatttcttgaaatcacttcttgccaatgcttcttcatgagattctggttctgctttgtctaagccaacaatgcatgtaaaagcataaactattatctcttcccaagcactgtagttgaacttttggtttggctttgcagctcttgtggccctatctcttgtgagttgataatctgtaaggtcttcagagttcttgtatgtgtcttcatttgattccacttgactggtgccatcatttatcacttcagtttctacctgatcttgttcttcctaagtttgttcctcttgagctggttccactaaaacttggttgggtacttgtggttctgaaccatgatctagtctggtttaaaaattcattgtgttacctgcagggttagttttaaaactggaacctgcactagaattggagtttgtaacataaggaaatatatcccttttaaatatcacatctctactaagcatagttttcaaaccatatttctcccttacccataacttgtagcctttggttaccttcggatatcctaggaacacgcactaaaataatgaagtagatataatcacttagaaaaacataaaagaaccacacacctcaaaattcttttgccagtgaactagttaaatatatttataagagaatcaaaatcaaaaaatcaagaaaacaaccatagagaaagaagaagaaacatatttatatcctccatcttccacagccacagacagaaccaccatagcaacacgagaacatttagaaaacaaccattaattccagcaagatagagcaagaatagagaaatcgacgtcaaataaataaatcatggtaaaataactgtaaaacaacactaaaataaataaaaaagaaaaagaaaaaaaaaattaaaaaaaaaaactaactatcttttgtacaaccttaacactagatgctaaagtggctatatttgtaaggccaattttaaaaattagaataaaaaattatactcttatctttactaaaaaaacgactagaaaaaattaaaaaattaaaagaaaaaatgaaaaagaagatgaagaagaacaactaaacaagaaataaaattgggtaaaaaaaaaaaaaacaaaagaagaagatgaacaagagagagttttcaaaaacaatgaaaaataaataatgtgtgtttgattatctattaattcaagataaatatttatataaacatatatatttttttgaggatgaggaaatcacatgggccgttgtctaaatttcaataaaataaaaaacacaaataaaaatatgtattaaaaagtgttttaacttgtcatcataaattttaaatataaaaaaatgtcaacaaatgacatgcccaaccaaatcaacaaatcagaataaacacacattttttttttcttgaaacggaggaaatcacgtgggctcttgtctaattttttttttctaaaatagatggaaaacacaaataggaacatgtattagaaggtatttcaatttttcattatcaattttaagtaaaaaaatgtaaaaaaataaaggaaaaccagtcacaaaactcgcatgctcaatcaaattaacactttctacaaacttaaaatataatacaattggttagaataaacccgaactaatttttttttatctatacagtatattaatagggcagtaaaaacgtaaatttatgcgaaatacagggtgtaaatttcccattatatatgagaaatttacatagtatactaacttttgtcattttttttacaaaaatactgtcaggcggtattttttacctttttactgtgttttttttataagtttcatactgcagtatactgtgttaagttctactggtgttttttagtt

SEQ ID NO: 300319 - DNA, 1236 bp, Cannabis indica
tttttttatcaaataatttagtattttattttgtatgattacttgaaataataattaaggaaagagagaaaaattagactgacctcattgtgatgagtgaagtagttgttagaaatggtaagtgcagtggagcccattatagcatccacaagaccatcagcacagttagacagagaattatgatcaatccaaatatgacttgatccaaaaatggatatggcatctccatcagccattgtcctccaaccataatgacttggtgagcttctaaccatggcattaccagtgggtttgcaatcatgaatatgtagaccatgaataattacattggtcacaaattggatggtaatacaagcaccataagcaatatgaacattgacacctcttgcatcaatggtcttaaagctattcattaaaagctcttgtttgagtgtgatgaccatgtctcttttgaacacaatccacaatggtctatcttggatgaccgcgtgacggagtgttccgggtcttgggttaacagggtcatcgtcgcgagggttgttgacgacgtagtacttaccgtcacggccaccaacggcgttacgaccgaaaccaatggcgcaattggctaggtgtttacgccgtaagtgccaacggcggtcgcaacgccagcagtcgtcgattggattccctgttccacatgagaaatatcccaatttccttctttccgtgtgattgcggatattcctgaaatagattcaaacagttgtttatcactaataattgaagcatgtagtagaacatggggtacggacagtgtttacggtctatacggagagactttgactgctttaacctttttttgtcgaagattttcattttagagtaataataatttaatgctaaattttgaagaagagaattatttcagtcttgtacagaacaatggctgtgtcggtggagactttttaaagggtcatttaatgaggccatgctggtctcgttgaagaacatagttctgtcagtaaagccatattctcagaagataaaaatgcaattttgtgatataagaaaccagatctgtgattttgtaactttttaagctattatatgaaatgatggacaggctggtaattgaggggccaatataaagtagtatgccccacttttctcgagaataatacacaaaaatggatatgggtgaaattttttggcccttgtttagaactacgagagttagtaacaaaaatgtgctct

SEQ ID NO: 300320 - DNA, 3475 bp, Cannabis indica
cacgaatgatttaggggtgctcaggtttatcttgggagttgaagttactcagagtaaataatgtttttttctatctcaaaaaaagtatgtacttgatttgttaactagcacaggaaaattgggagcaaaatcttatagtactccaatgaatccagttgtgcatcttacgcgtgggagaaccatttgaagatcctaaaaaatatcgcaaattagttagaaagttgaattatctaactatgactcgtccagatattgcattctcagttagtgttgttagtcggattatgttttcttcaacaattcatcattgggtaatattagcaaatttttaattacttgaaattggaatagcaagatgagatattgtttacaaggatcatggacacacccaactttaccgtttctttgatgcagattgggcagactccaaggtagatagacgatccactcctggttattgtgtatttgttgggggcaatctaatctcttgaaagagtaaaaaacaaatgttgtgtctagattcagtgtagaatcagaatataaagttaaggcacggtctgtgtgcgagatagtatgactgaattcaaatttaaaacgtcaattctagcaaaattatggtgtgggataatcaagtttttcttcatattgcctcaaatcctatgttccacaagcaaactaaggatattgagattgatagttattttgttcgtgaaaaaactcaacacaacctgatctccccgagatatgttaagactagagaacaattaggatatatttttacaaaggcgttgaatggggtgcgggttgattatctatgtaacaagctgagcatgattaatatttatgttccaatttaaggggggggggtgttagaatatattagttatattgattttatttaattagtttcctgttaactctaattacttagtttcatatttactctccctaattttgtatataaatacatacttttctattgaatataatacataattcattgaccaaatcttacaatcaagaaaatttggatttcgttggccccgaggttagtgattttattctatccttttaaattcagggaaatttcttaaaaagatcaatgccacttctatcactctcaatcccaagactacatgttcagataatgtgagtcactttcgacatatctcttgttgcattgtgatttataaagttgatgcgaagatgatatgttcaaggcttcgagaagttctactatatttaaaagcaaaaaaaggggcgatttgttcaaggacgatacatagctcataagatcattatatgtgaggacatggttagacattatggaagaagaattgtaagcttagttgtatgatcaaacttgatctgaggaaagtgtacgacacgattgagtgagactttatagaagagatgcttgttgcatataagtctcctcataacttcatcgaactcataatggtttgtgttagaactctaaaattctccttgttgatcaatgtggaaatacacggtttctttgcttctaagtgggaattgagataagaagacccaatgtctcctcttttatttgttctaggcatgcaatacatgtctaaaatagtgatcaaaatgggttcttggccagggtataaatatttcgacaagtgctctcatatgaaattaaatcattcgtgctttggagatgacttcttacttttccatcatggtgattatatatccatattattgatcatggccggccctgagggtaagcgagctaggcgtgcgcctcgggcctccgaacgctcagggccccaaaattgtgaaaaaaaaaattattaatatgtagataaaatattaaataaaaagaaaatataacaaaaattgtttggtctagtggtaatggatcttattgtaaactaagagatcaagggatcaattcacaagccctacttttctatttttttttaaaaaaatatttaatgaatgtatagttatgaaagattgaactttggatctcttaagagtttttaaaatctttaccaatacactaaatcattagaattatcattttgataatagttaaactatatataggggtcccaaaatttgacttcaccttaggccccatataccttaggaccggccttattgttgatgctcagaggtctcaagttattttcattttcctctggtctcctaccgaatgatactaaatatgtagtttactacagtggtacgattgatgctgatatgaacagggtgttggaggtctccgaattcacaagaagtcagttacctttcaggtatcttggcatccaaatatgctcaaagaaaaaatatccaatgcaaactctagtagtattctagagaaaatgttacaaaggatccgagtttagagttcaaggaacttatccaatatgagaatagttaccttaattaatgtagtcttgatttcgatacactcctacgtactcgacttagagaatgatattgcctaagaagatttagtgaaatgttgaagccatttgtagagctttttttggaagggaatgtcttatagctcaggtccaagactagttacttggaataatatgtgtcttccaaagaaagtgagagattttgggattcaagaaagtaatatattggaacattactgccctgagaagatatgtttgggtgattgccgctaagaaagataacttgcttgtgagatggattcacaatgtgtatttaaatgaccttaattagaagagattggcagctgtcaaggatgctttcaaaaccagattgatttgaatgtttttactgcaaaggtctataccataaaagtagggcaccttttgcttttgacacatgcaaataaagtccattagagtactattgtttgggaacgattaagtattcctaaatatcgctttattctttggcttgtaatgttgcagaggctccacaccagagaccagataagaaagtttgatcccatatagatctaacctgcttattgtgtggagaggctaatcttttttttaatgtcattatagcagagcttgcttgaggagaatcaaagattggttagagtggagagcacaaacagagaaactagaaagatttctcctctcaattactcgagaaaaagaattgagcaaaagctaggaagagtatgctatatgcagcagtctcaattttagtttaacacctatggcgagtttgtaatgatgtttttaggtctcaaaaactatgacatattaactatactgtacaaacaattaaagagattttatattaatcatattgccactataaaaaaaaaaattacttttagtgacaacattatagtcacaagataaattttttgtgactaaatgcgacttttagtcacaaccaaaagttacttgtaactaaaatatattatttagatacaaattgtaacaagtttagtttttttttaataaaaatcataacatttattaattaataaattcatttaaaa

SEQ ID NO: 300321 - DNA, 4969 bp, Cannabis indica
ggcttttataattcacacaactgagtccgcttttattgggccgagatgaccgcgttattaaagatatacggtaaaccttatccatatgtttgtcttcgctgagaatggagccaagttaactttgatgacgagcagttgctgtcatctgacttcccgagaataatattattttaactttgataactatattttctggagtcgagatagcctttcttgcacgcacaccatcttctagtgagataaaggcctcactgtctattatcttgactcgtcaaactatctacacttagtttagtatattcgtgtaatatacgctaagtgtttttagcgttgtcgtttctcttccacgcagagaggttgatgccacgtcatgcacacgtgcacccacatgatttcttgtcaatacataaattagcagttcgtacgtttttgtctcgcagagggctattcagccaaatgaattataaacatactatgcgaattatatttccaacaagttattccatgctaagtgtactttcgtttgggtgtttgagttcttcgttcttcccagctcgacacatgtcgttgtcagatgtgcttaccgaatttctcgtataacagatattatgtttataaaatataacatatcaattatcataaaaaaaaaaaattaaatgtaaaaaacttccgaagagttataaaattataaatattatatttttgtaactttttttataaaatttcatattctataaataatagattgaaaatgattccatggagagaggtcgggtggggctattttggaatattaatgtagagtcgtgaacaatagaagagagaatccttcgataaaagaccgagctgaataaggaaggcaatgccggtaagagtggtggatacctccgccccttctcagatttctggtacttttctcttctccgtctcttttcctcctcatcgctacccattgcatccatcacctacatcttctacacttgtatatatgtgtgtgtctgaaatttgcttgagagtttttaattttttttcctacctaacaactcgatttaatttttagtttgactaaactgagaacccaaaagttacaggatcgttgtttgttaatttgtacgattcaattcgatttgaaataagattttcttttattgatttctcgttcagaaggtgcaaattctgggcaaacggcaccacaagcttgtacccttttaagtgttggacaggtttatcttcttaacttcgtctctatctccaaacatgttcgacagttttttctgttggtacttcaactttacttggttaacaaagctcttattctcagttgaatacgtcatttttagcattatttatctttttaacttctgactgctttgttcgaactatgaattgggttttgttttgttagaatttggaataagatgaatgaagtttcattttgaaactaattaccaatggaaagagtagttcatttatcttatatatgacaattcattctgcaagtgcgagtaacaaaacaggccgaaaggtcccaaatagaggttaaaggggagacggaagtatctttctggaccgatgacacgtggctatgatacatgttagaatttgggataagatgaatgagattctatctcaaaactaattgacaatgagaagagtagctgattcatcttacatatgataatttctttccacacataaatagtatgggactaactctaatatgttttgtaatttattgaattgaaagcttttcttgattcctacaagatttttggttgacacattttgctcaacaactaagtatgtttattacagccctgtgttttttacctcattctttatgcaacagcaattggtatgtgccaatatgggtgcttatgttgtcatacgatagtgtgaggcttttagtctttgttaagataagtgggatggggagagagatgaggggtgactgcttttgtcatcttgttttagctggcatttttgcttagtgttcatataaccaatacttgctccctggttaaggtttcgaagtttttatgtttactcaccgaacatttctttcttttatagaccttctcaggtactcagaatgtttctggtttgcaaaaagatgaagcatggagggtaaatgtttgcatacaaggatgtgaccttgaacatggttatctatgcggtaccatggaagctcttaatgttcccatggcagatacaccagtaagaattttattctattcgcatttcataccttggaactatataagtagtctcagtcttttatttattttctgctttggacacttatttataattacacacaagtatgtttgattgatttagaaaatttccttgcttaaactagaaagagtgcatttcatagaacaaagctgctgctttgttgtttgagaattgcattttgtgaaaaacatttgacattggtagaagacatctgttgtacatagcttaataactcactgcatgtcgcattctatttggtcccatattgcaatttcacaaaatgagatggatttagatatggaaattttatgtaaataatctccaattagtttacttctcgttatatattgacgataatgattctcccttattcaaaacttccttactctttattggctgcttgcaatataacatatttagtccatgatagcatgtgctgttgcatttctgtatttgatatatatattctgcatttcattatgttgaataacacatgctttgatgtgatgaattcacagtgtatatcattatctgtaactataagttcagcatatctctagcaatttcacttcttttaaaattcctggctaatcttgtactctgctcttttaactcatatcaggttgtaaccttttgggaaggagaaattgttgataccaagaattatactttcttcactggcaaatgggaagcaacgtatatttctttttattgatttttattttttttccttgtaaactttcattcaatattatatactgcgcctccctttaacaagatgattatgtagaagtagaaccataaacctattttcgaatgcctatctatttgtactcttaacagaccagaggatgatataaggcactggaccaagttttcttcttttaatcctttacttgtaaggagtttccgtcttctttcctcttctttatattatatattttattaaaacaaaaaaagtattttataagagcaaaaaaatgcaataggaaacgtccaatgtaatctaccaattcataattgcggtgttgtttcttattttcttacagagccaagtggaggttgatggaggcaaatctttggacttgagtaactatccatacatatttatggtaatttcatctcccattatttctgctacttggtgtacccacgtaacccatatgtgaaataaaatcttgcctaaaattcttttggtggtgcagagatggaaagaacagtactttgtcaatgttgggacagactgtgggttaactatagctggcttttactatgtttgcttttcttgtagtgatggctccattaatggattctactatgatcctaatagcaggttcctttttcttttcttttctttttctacgatggctaaactaattttacctgatataaatttactctctctctaaattaagggaactaagctatttcagtaatcaatgattgatgaaatttgtgatagctatgctaatgaaatgacctgttattttctaatctttcaaccttttaaaataactgattgatggatatgtacttgaatgaacctacagcccattccagaagttggagctgaaatctactaatgagggaagatcaggtttcagtttctcttcatacgagttacgatagagattaagaagatttaaggttttggtgttcggagaaacttgagagattgcacgagtttctcgctttcttggtgtataagttttattttaacttagggaaactagtttggctgcttttagctactactttgtagcttttttctgttcatgtatatgttaaaattaaattttaaggaataatcaaccttgcttttttaaattcttttaactgaacttgtccagataccaactctatctgagtgatgaaatatatatgaaaagaaaacaacaaaaatttgtgatctttgccttttcttttctcccttaccctatgtttgatagaaaagaaatgagggaggaaataaaagcgtgaggagaaaagtggatggaattatttttttttttgggtaaaagaataaagattgaagaaaaaaatgatggaaaatccgtggctcacaaaattctctctcccctaaaaatgaatgtttattattattattattatttttttttttctttttttttacgtttaggtagttaaactaaatttcttatttactaagcactaaaaaacaaattacttcattcgaaaaaaaaaacaaaaacatattacttattaataactttttttttgtaagtaagaatattattgcacatttaaacttcttacaacttacaaaccaattagagaactaataagttgctctcaatccctccaatcaaataataacctttatacttgttctctcttttgaaatgagaaaatttaaaataaatttctcaattaattctttttataagaaaattaaccataaatacatgagcatttcataaagtattatttcgggcgtcccaaacaaagtacataagcattcaggacaattatatagacttctcggtagaatttgggcctcctacatcttttcacccatttaagacactgttcaagatcagagtgttttccagtgatacctgcccaattacatatctcaaccataatttgaacactatacgtgcatttaaagaaaagatgctagtgtgataatcagtagtcatgtgatctgtaaggggaaatatcgggtaagctgtgtaatcccacaccgcttggggaaggtcaagtgtga

SEQ ID NO: 300322 - DNA, 2806 bp, Cannabis indica
accttgttcctttttagaaaaactaaaaaccttataattaagtatattaaattattaataattatggttataagacatttatacctttttcgtcaaaggtaataatattgatacaacaagattacttcttttcacctttatcaaaactcctttttcagcataaacccattttacaacttttactgtaaaagaagagaaccacacatttatacatgttgactgaatcaatgaagatataaaccccattttacaactttatatgaaatcgatattaacgatgagtattacctttgtcataaaggccactagtgtgtcctcatttcctcatgcatatcataccccctgctttttcttatcaattatatatcacctttaattataccaatatatatttattataattatacattgttatttttaattaaatttttggaatcgttacacattcccacttgttgtatatctaagctaacacaaatatcacaaccctacgaaagaaagaaataaagaaagaaaagaggttcaaaagcagtacaataatatatatatatatatatggaacacgtatataattacacaaagcaagaatgcacgcatgcagacccaaaatatgagtcaaaatgagaaataacacccatggatgagtcacgcgtgccttggcagacccaatataccacacaatatatatatatatatatatatataatgtgtatatattatatatatatgtacatttatatatagtagtttttgtacagaggaagagaacttataatatcacataaaataacaagaaaaatctaggaggatcgaaaacaataaatggtaggcatgtactcttgttgctatatatatacataaatatatctctaacgtttgttacatatatttaattttttaaagcatactcccttatattttttatatgaatatgctgagtgactaattaactagtctctttgcttttcattctgacccctatattttcttcccaaaacttttcacaataattaaataactaattgaatagaagtacgtggtctctgcccacatgagtagaattagataataattttcggttttatctttttgagtctagaaaatgtaccttttttttttacaaaaagataataagaaagaaaaaataaaaaggttttctccttcttgttttaacccatttcaatggacaaatgcaactagggctattaatttcattgacagttaacatcatgaaacacagtcagatacaatgcttcttgcaaggaaatgaccaaattattcaagagtaatcaaatcaagcacattcatgataagagtataattaacttaagaactaataaagtattggtaaatacttattttgtatctcttgttttatccaaatgcaaatttagtactttatattttttttaaaatgctcatttggtatcatctaacttaaaaattaattatacggtagcctaagaatcaaaactatgatataaaagtaaataaattctatatatgttagatattgatatataaaacataaaacattaaagcatgtgaacattttattattgaagaaaatttaaaatatataattctaaattttatatttcaaaagagaaattcacacaagtgtataggcacaccacaaaactttatttaattgagactacaacaaaataattctcaataacaagactacaatatataagattaattgtcttattttatttactttttcgatatcaatttaacatctaaagaaataggtatttataataacccaaataaaatacaaaccacatatcttaatttaattagttaatcatatccatacatgattatatataaacttaatttacacatacttaatttatatatactcaatatagatttagttttatttaggagttaatattgattttaacactcccctcaatgttagctcattctttaaactattctaagttgatggcgaaagttttcaaactttctagttgctcatatgtcttcacttgtttcattaaaatctcatcttgtagaactttttcttgaagaaaatgatagtttccacgtgtttaatccttgcatggaagactagaatttttgccaaacgaattattgattacttgtcacagtacaataacattgcaagaactctctttagctgtcattactgctgctcgatattctgtttcagttgttgacaaagcacaatcaattttctcttactatatcaagaaatcattcaagatacaattagcatcaacatatatcccatacttgatccaagtatcatgattccttgcataatcaacgtcacaataatccacagtttacaattaattgtcacctttcttgtacataagtccataatccattgtacattttatatatttgaacatccgctcaactacttctaaatgagacttctttgaattttcaattttgcatgtatcgactcatgactctaactaaataagagatatcaaggtgagttaaggtcaaatagcttatactgcctgcaatctatcaatgcatggatgcatcgatcctccaaattctttttctttgtgcacacatacactacaacatttgactttattagcggcggacaactccgccgctaatacccctaaattggccgctatagagtattaggggtggatttcggccgctattggtccgccgctaatgcgtggccgctattataatagtattagcggtcgaaatagggtccgctgctattaatagcattagcggtgagatcccaccactaatactctttgtcagtttcgtgttgagagagagagagaga

SEQ ID NO: 300323 - DNA, 3139 bp, Cannabis indica
tggtctagaataaataatatacttagactcaccagctcaataaataaataataattttaaaaaaaataaaaaaataaaaactctgaatatatatatatattattagtttaaagaagctagtaaattatgtaaggttttggtaaagtagaaaatactgaagttgaaaaataaattatttttaattattatcataataaaatgacttgcttacgtttgacatttgattgcaaacaaactcaacatattgcggtatcaaaatgttatttaccaaaaaaaaaaaaaattgttatgtagagaaagatacaaaaatatatgtattatttcttcattcattactatgaaaaataatcataatacatattattatgaaaaataaagtgttcccttaacttgcaaaaattataatcaaaatgtacttcaaaatatattattggtaagtgattaaaaatattgaatattctatacacatattatccatagttattagactatacaagttaacaatttttaatgggagttttacaaaaatattaaagttttggtaaaagtttataattttgttatacggaatttttttataaaaataaccgtaaaataataaaacagaacaattaaaacaacaggaataattaaaaaattatcgtggaacaacagtgaaaacttaacacagtgtatagtataaaacttgcatgtattttttaaaaaaattctaccccacaataaaaaataaaaaaattaaaaattttagtatgccatgtaaaaactctttcttaatatcacgtatttaattaaaatatatagaatttccatattagattatattcataactatattacaatttgtatgttttttttttttttttttgaatggaacattttgtatggttagtgttatgcaatatattaaatatatcctattttcttataaaaaattgaatatgctttcttttaagaaagaattaaatatgtgttcgaattcaattcctatttttaaaaataaatataatgacaccaaaaataagactatgctattttgttctttcagatcaattgttaaagatggttaagtgttatattgttattggtataatgaaatattaagcctcatataatgagcattgttattgggcatcagtaatgtctagcacatttaggcatgttgtcttgcgattgactagcgatactctttaaaagttatttgctagacaccattagtgtcttttagtatttctcctatataatttaatataataactattaaagaatatcgctaactaatcgcaagtagatacatctaaaaaatactaagcaactgatgcttaataaaaatatttcactatttatgtggtgctccataatttggaatgtcatttatattgtgatataagatattttagcaaaataaataaataaattagaaaaaaaatgggcttttaaatgaaatgctttcaataaagggaggcatttgattggatgcaattgtcccacctcaatttttttaaatatttatttaggtaaatataatctcttttatatttatttcttacatttaagttataaagtagttctataatgtataccttaaaataagtgatgcaattttatttgagaaataaaattaaatttaatttttttatagtatattatagttatttaagatattctgtaaaattttaaaaaaatcagaataattttataatatagaaaataatgttcaaatagtttttttttacacgcgtatataataaaaaaaatcatacgtgcaatatagatattttaaaccctatttttagcatgttaaatttttttaaattttacaaaatgtcttaaataattataatatacacgatcataaaaaaataattttcctaaattatagtgacttttggtaatacttttgttttctaaattttttattacaaaataaaagtaaaatttttatttttaaaaataaaaatggtaacgacttttgttttttaatttttaaaacagaaaataaaagtgtgttttgtaaagttcatttttatttttattttttatttttatttaagtctggtctaagtacaaagttagattcgggttcgggtcagagaccgagttcagtaccaggaccgtagggagatttgggtttgggtctagtcggagtccaaaatattaattaagaaaaaaaaaattatttagaaaaatattgaaagatattgaaagtgattttttttatttttaaaattttgattcttaattaaaaaattaaaaaatgaaaacaattttataaaacatatcttttaaaaacattttcattttttaaattttaaaaataaaacactcattaaaataatattaccaaacactatttacatttatcaatttatttgccattttatttatgtcacttaccttaaaatttacataaatagacaataacatttgaccgcaggtggacaacaaactttctgagcttcaaactcatgaattggcagaaacatcagtcagagactcacacctacccattctatacgtcttttcttttttaatatatgtaatatgattatgaacgccatttaaagtaaatatataaattcaataaataattaaatttaatttttaatattaacatgttattttttattagtatatataaaaaataaaaatttaataatcaaataattattaggtaaaaattttaaaattataacttatatattattaccattaatatttaaatttaaatttttatttataagtgaaaattaaacacacataaattaattatatttttacaatttttatttttgagaattgttattgagtattattagtacctagagatggaaattggtcggttaatgtacggggaatgcaatccccgcccccatccccgttacctatttatacccccatccccgccccatccccgtctaataaccaacggattcggggtaggggaatacccatcggttatggggaacccatcgggtatccattaaggtaaaatgaaaaaacaaattaatttaaaataagttaaactaatattctcacaaatatttattatggattcataattcatagaagataaaaaataaacctacttaaaaaaagcataacctaatagaaaataaaaactaaatatgtgtcaaagttt

SEQ ID NO: 300324 - DNA, 4112 bp, Cannabis indica
aaacttagtacagattgtgatgtactactataacactttggccaatttatgtgtttcgagaataaattgggtccccaaacctctagtaaagctgcagttccactatttggatcaacagcaccaaatgtccaggcatctcgatgattacccagaatcacaaatctacaaaataattcctaattaagccaactctactcaagtctcaaatcaaaccaaagtcgtttgactttatctagttcttacaaaagtcaaaacaaatataaaaaacataccgatcaggctcttctgctccttcaatcacaccaataacattctcaattgtcccaatcacaagctccccctgaaaattgcataccccacactccaattcagctcaacaattccaaacaaaaaaaaaaaaacagtatataattaatagttactcaactgtgtaactcaagttcacaattcccggaccaggtccaactctgtaaacaggggcgtcaacgctcccttgccaatcatcgtttgccacctgtccaccgatcgacataagtatcaactcaccatctttaccggacacaggcagcgaaggtatcatcggaacttcaccactttcctcaacctcagtctccgaaatcctttcacattcctctgtactcgcccacccaggcgtggtaggatccccaagcgcattataagtagtacccatctggaccccacttggcggcatccaccgatcgtcagggaaccaccgagctccaccgccgccgccgccgtagtccttcctatcagtataaactaacgccccaatagccccagccttgtacgcgttacgaataatatcacctctgaatatttctccataccttgccaagactacggagccgttcacgctcacacccatctccctcagcgtcgcgtagtcttccacgcgtccgtagtttacgtagaccgccggcccgacggcagtgccggacttggcgtaggcgtggaacgtgggaacgacttctttagccgcgtcggcgtaagggtcttcgtcgtagacttcctgtcggagctcgaactcgaggggcggatccggcggcggagggatcaacttcagtgaacgcgaaacggggtagctcagggcgacgcggtaggaggttatgtgggtgggaatgtcggaggaggtgaagatggaattgacgtaggcggcggcttcggcgttggcggctgagccggcgatgtgggggcggcgcgtgagggtgtataggtggtgggatatggaggcattatcagataaggaagtgtagagggaatggtatgtggatttgggaaccggtgagaggaggtagaagacgaaggagctgactatggctataaaagttgctgttttaagcattatttttttggttattccaatcaacatatatatatatatatatataaatagtttatgtgatcagtgttatggcttttgtgtcttttttattgagattgtactactgtttatgactggttttagtaacaaaaccagctctgaaaatccatggaagtaaacgaaagagacattgcttaatgcttatgctatttttgctagttaagttaaagtcggttctttttaggataatatgatatgataatgatgtaatgatagcttaataataataatacatgtccaaaaattattggttagttattaatttaacataaaacaaggtacatatgttccaagcttcaaaatttttaccataatgatagaaaggagatgggatccaacatagaatatttaagaagataaaggaagttatttgtataacatattaaattaactatatagaaagagacataatttttttttttaagaaaatgtaataaatcgttttcgtttgaatttatcattgtcttatactagctttttatataaaccttttccgtgaagtttaggttactaaaaagacaagggcagttctttttcaataaaaataataaataaaaatctaactttgatgtaaactaacatgcatgcttaaattttcttgggactaacttagtgacttgtatctcattgtcttggtttcatctgtgattttgtggtttctgtatctggttaggatagaatgagaatgaaaaatcccactctatatctatctacactctttgtttgtttgtttccttttgagcacaataattctctagttctagagcaaaaaatattaggtacatataaaaaaagaaatggatgatacatctcatctgggaataaatttgacagatagctcatcatgtggtttaaactcactggtccagctggtttgattgaccacctgcttgattctgtttggattttctttactcacgggaaccaatattaagaccattattggtttaatactttattgacatttttggttaagtccttccaaaatggcctaataagtaaaaccaaatcattctatgaagccaagactagataggggtactatttgttcacaatgataaattcatatcaagattaactcatgtagctgccaaattgttatgtcaatgggaattcaacacgtggatttgcttttcagtcaaataattacgaactttttttattgtgccaacagaagctatggtgcctgtggtggacggtggtggtgggggtgagtgaagcacgtcaagaaagcaagaaaatggaatgacacgtttacaaaaagcacaaaatggtgttatagatattgatcttattcaatcaaaagctattgtttgaaaaaactaagagaaaataataatagtcataataaagtacttctatggtgtttgctattttcggctaatggatatatatttcacatatatattatttaataaaaggcatttgtgcaatttcgaacacaattatttttatttatttatttatttatttgacagtatagtgataatgagatgtatactgttaagaggttagtaacttactcaagctctaagaatcaacttcttctggttcctcctgttggtagaagcttctttgggacctcaatcttcccccaaaaataaaaaaaattactttgaaagcaagtttacattttttgcaggcctatatcaatttgaccgatcatggtcttcatatttacaagagttatcctatttgttttgagaacaatgagactaccactcatgcactttagttatgttctttgcttaaattaattcgttttgagtgagttgttaaaggtcttgattccttaaaagatgcttcttgcttctatctatgagtttctgctgagttgtatgtatattttgagttaataggaattagaggagcttatatctctttattggtgtatttagtataggcacaatattttttgttcatagccactagttctagataatatggttagttcttgggctattaattatttgtggatgtatcaagacgctcaaagtggtcgttcttcgagcattggtaagccatctacttatttggatccgatagctacttctgtcaccattggagagttgacattaggtgatgttaatctttttattaatgccggactttgtgttgaggatttgaaaatgggaacgggaatggttgctttggattccaacgaggtaatgttgttttctggtgtgttttctttgtctggctctgtcgagccttatgttgcggaggcgatgtcgttgtttcatggtcttttcttttaccttcggttgggcttcaaaaatattactgctttttttgattgccttcgtttggtcttaacggtcaatggtcatgatattcgttataatgagtttggtactgtgcttaatgaaatatcttatgttatgaaatctctccttagtttatcattttctcattgtagtaggtctttaaatgctattgctcattttttagcaaggagaacgcttgttttagataggtctcattctttatcattggttggggctccctatggatataattgtttgattttgagctcttctttgtgctttatgaccttttaggttttgtgccttgtaattaaatatttttcaaaaaaaaaatatatatatatactagcacattaagaaagtcatatctatgcttcaaaataaagttttttttaaaatatttaaagaattaaactaataacgctaaatcagatgctctaaat

SEQ ID NO: 300325 - DNA, 533 bp, Cannabis indica
tcttaatttctaattaatttaaatataacgtgcaaagtaacccttggtaacttgggcaatagtgtttggaaaatattaggcaatcttacatttaactctaagaactatatttatgtttagaacttatgataaatattgtaagcaatgtactaatgatcactttttatttagtctttgatagtgaccacttggtgtattttatggtttaattttttggaagtaatatttttcatatatattagttgtaacaatattaatatttgtcgctcatacattgattaagtatgtcctatttagaatagatattgatcatattcttttttatggaaaaaccctatttagtgagtgttttactttgtttggtataattaaattatgtttaattatgtcgtaaaagttaatactgattgttttttattttgttaaatgataaaatagattccgtatttttaaaaataataataagactttgagcttaatttttgacaatttttttcttaatatcataaagacaatttttagcacgaacagat

SEQ ID NO: 300326 - DNA, 649 bp, Cannabis indica
ggtaaaattatttccaacaactcaaaccccggaccccaacccaaacgcgaccccagacccggcctggacctcagactcggacacacactcgcacctagacccataattggactcgaaccccagcctaaaccctagacccaaacctgcacccagaatcaaacttcaaaccttggaccttggacctcagacccagaccgcgaacccaaacacggactcggacccggattcgaacccgaacccagacctcaaactcggaccacaaaccaaactcggaccccagaccccagatttggacctcgacccagaccttagacctagattcgaacccagacttggacctcggaccccagacaccgaacctggaatccaaagcccaaaatcaaagcccacacccaaacatggacctcggacccggaccgggactctaaccccaaaccatacctgaacccctaaacgcgactcgaatggacctcgagatccggccctagacctttgccctgtccttggacctcgaacacaaccccagactatagactcggacccaaacggacccctggacccagccccgtgttggttttgtggtactaaatcaggtacgcagtagaataataatttatgattatcatcatactgttagaaattattttac

SEQ ID NO: 300327 - DNA, 3877 bp, Cannabis indica
tattgtttgatggcaacctttctagttccaatgaccatgcaagaatggtcatttcccattagaactttacctccatcagcttatttataatcataaaatgattctctactcggacacatctgataagtacatttgaagtcaaatatccactccttgttcattgaagattttgagatggagaataattcttcctgctcatctctctctctctcactttctctctcctaaattttcttctttttgttttttttttttgtaaaaggttctctctcccaaatcctaatctttcaaacaccatcaattacatataaaatacaatctaaaaaatgtcgacatataacaatactcgacattctgatatctgatgccataaaagtactgtactctatgtatatagaaaaatatgtttagttgttcagtaaattgaatattccaattattttcaattagttttatctagctacctcaaaatcaaaaactgctacaaagtgcagttgctattataacttatttatttttactactaattattaattattaatatttttcaaataagtaatcataattatatatataatataaaagaaaaattcaaattcctcatcaataaaaaattatttcatatatattcataaatatatacatatcaattaattaaggattcctacaataaaaaatttctaatacaacaacatgaagaagataataataataataataataattacatctttgtctatactctcatccatggagattaaagttgatcaaacttccaagtactagagctctttgtctagattaatccccaaagctctgatggtgattcatttaaatcactcaaaaacatttcaaaactataaagagtttctcaatgttttccaggtgttcgatcaattgcctctgagaaccaagtctcaaaatttttgtgaagaatcatgaaaattcttgtgtacccaccatttttcatccacttaaacgagaagtgagattgacaaaggtgtcttctgggcatggaatggtgagtcctcccatgggatgactatatccatattcttccacagctttactcaacaaagctctaaactcatggtgattcaaatacgaaaccggaatcacgaaacgtttcttttgtacttcatctccaacgtaaactgcacaacacccctttggaacaatattattattcaaagcaatcttcattctaagaagttgcttaggattaacaacattaccaaacctaatagccatgacaaaagttgatacacttgaagaacttgataatgaagagagaaaaggctagggtttaattagctagtaaaggtatgaaattttgatgagttgatatgatacttgagtgaatattatgtgtatatatatgtgtggaatttgatgaatgatattgattagcgtgtggggaatcacatttgtgttataatatatattatgtgtggttcattttgatgagtcataaagtttgattttaagggtgtcattcatagttaaagacaaataatgtccccacatgtttagggaaagtaaccccattacatgtagaaatatctactttgttatgttgtaaagacaatttaaagttgagtacgttttcttcctttatctttagtttataaccaaaagacaaatttaattgcctttattactcaccattgattcatcaactactattattatagcataagaaaagatcttagtgggagggtgggtcttttttgatccattattaacacaagttggctggatattctacttataatcaaagattcttgtcaaaacaacaaaaattaggttctaactaaaagtataaaaaaaataattaataataattgttgatgagaagtgtaataattaatttttctaatggagtgctaaaatagtgatgtaatttttttttttgacaaaaagagatgtattttattcatgaccagacaaatcatttaccaaaatagcttgaaaagtagtagggacaaaccctctaccataaccacgaccttaggaggaacaagcagtagtcgccaaataattgactgccttgttcccagaatattgtttaacaaaaatacaaaaaatattgttaaaatcaaacattaaagtatgacaataaaaaataactaaaccgacgacaagtttttcttgctaagtgaaacatagagagagatgagaagataaggaggtggcggttgagtatatgttaggggatttcgttagggttttatcatgagcttcgacccattaaaaaacacgagcaccctatagggtaacgcatgttactctatggttgcgattatttccaaataatcgtagtttaagggattccacgataactttttcccttctaccttcaattttcttaatgtaaatgaagttatatgtgagtgactaatagttgtgagagtactaggctatgacttcatttttttaatgattgaaaaaatctatagctaaaggtctttttttgtagtagtgtaccgctattttattttttaaaaatattgcaattcacttcactttaaaaccgatgacaatgtctactgtctgtttatagccgatgctaattaaaggggtattattaccgccgatcttcgaaaaaatctaattttctgatcagtgagaattcgctcttttgtagtaatgatcaaatatatgttacgattattagccattgttgcatgttttacatagccttaagttaccaataggaaaatgtcgtatttcctcctatgacattaggtgatccccgatgcctagagctttgctccaatccaccccagttggtcagattatttttgccaatccatgaacatgatcaatacaggcacatcgatttacagaatcatacatctcgatcgtaaaaaaatcaatagaaacttaaataattagaattgatcgatatagttttcgaaataaacgaaaaagaaatgaaagactaaacataaattatggatcaactaaacccttcttggaaattttttaagaataagaaaaagaaatctcgtgcaaatatcataaaatacgtacgaaaacattgaatttagcattgaacatgttgcgccggatgccctagatgaattgaagcaatgtcccacacttcataagtgtgtgggtagtgaagatctagtataaaaataaatgaacatagagttataaaaatgtggtgtgcgttggtagatgatgggtaaggtaacaattaagtcaagtaattgactttacaaattaaggtccaaattcaaaaccagcttacatattgactatatatgtacggtctatcacatggctttgttcactcaaaacttattgtgaggataagatgtgagatgggatagatttgctgacctatactaccttgttgtatgtaacaattattataattataaataggaatggttatgaaacttgtttttatattcttttcattccttgtgttcatttttgccaaaaggattctaaaactcaacttttaattctatataattatatattgaactctactgattaaattgaagtatttaaaaaagaaatagtaatgaaaaaataaataaaattcatatgagctatctttttctaagttttaaaagtgggtaatgaaatagaatcatgccatgtgcaccatgaaaaaacgtgttgtttcttgcaaacggccaccgtacgaaggattttttgtagttttaggccggtgagggcatctaatgcaattatttatatttatttttaaaggaaacatttgttaacgaagaaattagactttttgatcattacaaaataaatatgttagcaaataagcaacagataaataattaaactgttgtgggtaaaagctcatatttaatcatattatgagcaacaaaattattactaattg

SEQ ID NO: 300328 - DNA, 4003 bp, Cannabis indica
ttattattcttatttcagttttcacaaacaatcagcctaaggatcgatctgaatctctcatttcatttcaggtaaatgttttaatcaataatctatatgaaatatatataaatatatatattgcattctttttctgtgtattgcaaactcttgaatttcctaaaattttattaaacacgaatgtgtatgagttaaggtaattaagggttcattcatgtaataatttatatgctttaattaattaataacatctctaatattgttttggctaatcgatttgtgggattgaaaaggatgtgaaactttgatccaataattctttcacatcacattcacatttacattatatcaactcaactttggtgttactttccttaacattaaacattgattactcatttcttattttgcagaaaacaaacaattaaaaagatctttggttttgattcaactttccaattctggactattacatttgaaatcaacttgaatctatactatactccaaatctgaataaggtgtaacatgtgttaatttaacaaaggtatatatatattatatgaacttactattacttagtgttatcttattcatttacaaattcttttctgtgtaaattttaggtttcgatgttatgtttttaagttatagcttctgaaattgatgcaccacccactcttatatggtaagttcaaagtgttaactaatgatgtaatatttattttaattttcctattttttttttaaaacattagtagaagattaactattgggatgaaaccaaggtttgatcaactaaacactaaatgtgccaataataatataaaaaatctcgatgtactattacacaaaatgagctgtaaatttttcttttatgtgtatttaattaagtagttaatttttgtattgatcaaatttgattcaaggtaattttcaaattataaattaaatcagaaagtgaacattaatatgagatccaaaatttgtgttttgaatgaaaataagctaccaaataattaataataataatctaatttttttaattttttttttttaaaaaaaaaagctgaaatgaaagaagggtccatttttctaatgattattgaccttttcttgatttggttattattttctgtttccttttttttgggccatcttcattcatattgtgactctttttaatttaatgaagaaggaagagaagaagaagttgttcaagtcattgttccgtccgtacaatggcatgcatgatgaagctgggatctaagtctgaagtttttcgccttcatggtgaaacatggtacattttatttatttatttatttttaaatttataatttatgggaatttattattattttgaatcttgaataggaaatgattatatgcataatatactcaaaaactggtttgaaaaaatttggactcatcatattggttatacaagttaaaaagtatttcacttgagaattttgatgagttgatctcatttagtctactttcttttgttcaacacatttcatatgctatttttgtaggttttgctcaacagggtcttcctagtgatgtcactgttgaagttgggataaggtaattttttattatttttggtcggattttgaattgaaaatatattgtttctcttacattaaggtagtgtttggtttgaggtaataaaatggaaaggaatagaaagaaattgatttcaagtattgaaatatcatttttattttagttatgttttaattcctttcaaccaaaccccatctaatgagatatttattatgtgagtttgagttgaagagagtagagttagaaggagtaaacttggagggaatatgaagtgttggagaagattaacattactactattttaatttaaaaagtaggatccacttggaaacacaaaccccttagacgtcattaaaatttaatttagtctcatattcaagtctaaacctcgtaccaaacgctccctaagaatatattagcaatttcttagtagtatgaaatacctataaatatataattgtatagttattaatagttatgaaatgagataatagaatttggaagatttgtcctgtctcaaaaagacccattacctatcagtttcatttgtatttgtcaatttttttatgaaaatcttctctttaatttatgagcctgttgtaatcataatcatgttgactctttttcatctttcttaattggtgttcaaccagtttccattgttatccaaaagtggaatgttggaaaaccttattggagaattttctagaagagaagacaaccattgtatcttacaactaaatgatttgcctggtggagccaaagctttcctattaatagcaaaattctgttatggtgtgaaagtagaactcaatgcatcaaacattgttatagtaagatgtgcagccgaatatcttcaaatgacagaagattatggagaagggaacctcatttctcaaaccgaaaactttctaaatgagatctttggccattggacagactcacttaaagtgcttctaagttgtgaagaggttttctcacaagctgaagagcttcacattgtgtcaagatgcataaactcgttggccactaaagcttgcgcggttaatccaagcttgtttagttggccagtctcggatggaggagggctgagttcagtacagagtccagaaagtggtattttttggaatggaataagtagtaataaaactaaacaaaatccaagtggtgaagattggtggtatgaagatgtgtcctttctaagattacatttatacaaacgtttcattcttgctattgaatcaagaggaatgaaacctgagaagatttcaggttcattaattcattacacaaagaaacatctttgtttattaggtagggaatcaagtcttagaaatggtaacaataatgtagcttctgtctcaacaatttcatcaccacctgattcagatcagaggaatctccttgaagagatagttggattattaccttaccaaaagggtgtcactccaactaatttccttcttagactacttagaacatctatgattttgaatgctaatgcttcgtgtcgcgaaaatttggaaaaacgaataggggttcaattggatcaggttgttcttgaagatcttttgataccaagtatggggtactcaatggagacactttatgacattgattgtgttcaaaggattcttgatcatttcatggtaatggaacatgagacaagtgagagtagttcgaattcggttgtggtagatgaagaagggcaaatggttggagctaataatggtggttctcattcactaactcctattactatggtggctaatctcattgatggttttcttgctgaggttgctcctgatgctaatcttaagttgatgaaatttcagtcattggctgctgttattcctgaatatgctaggcctttagatgatgggatttaccgtgctattgatatttacctcaaggtaaactaaaagaaaactaatgcttttaattttaacctgttcgacaagactatagtaggaatatcaccttaaggagtactaccgtcaatttcatattataacctcttagtcaatctctacgcttaaaaataacatgtcagaagttttttttattttttttattttttacgtttaagcatatataatataacaatttgttcatagtatctactattgaagaaaaaaatgcattaatcaatccaaccaacaaacaaacaacttcatattcatgttcatgaatcatgataaaagtgaaaactaaaatatttcaaaatacatccatatccaatatccatagtccataaaaatctaaagtccatattatatatataaaaacagtaataaaaaatatatataatatatttataaaccgggttggcgggcgggttcgcgggttcaacccgaaacccggtacccctaaaatctcaacccgccaacccacccgaagggtaccgggttgaacccaacccgcctgaaa

SEQ ID NO: 300329 - DNA, 1766 bp, Cannabis indica
tcatcatcatcatcgtcgtcatcgtagacgtcgtttttggccgcgccactcttctcactggatgacttgggattcttccagttatacaagaagacccttttgtctttaccattccctgagccattctgattcagaggatcaagtgcagaagccccataaaacccttttcccccaccattttcagagctttccctccgagtaacagaagtaaaagccgccgcagatctagcggaagcgagaggagacctccacgaagaagtggtaccgggatcacgaagaacccgagcagccttccgaatctgagtgagctctttcttcaagtggagtttgctcggatcagagaagcgcgtttccgccattgtcgttttcttctttctatatttaaatactagtcttacaatagactcaaaatgagtaaaaagccaaaaacccagacaggtaaatacaaaatggtctctttttcagttatagatttctctcaaagtaaactgagaccaaagtaagaagtcctactgatctattcacattagaactcaaaaacccagtaaatcccacatccccattgatgttcaaactccacaaaagcatggcttctccttctgagagaggcctacacatacatacattcatatattatatatagatggcaatggagaaaggagatggataatcattgaaaatgaatgcatttgatgaagttgataatatttatgagatgaagcagctatacagatctgacaaacacagcacgggcgcgaaggaccctcaaagtttgagactttgctttctttgtatttgactatgtatctatctctctctctcactgcctctgtttctttctgtgttgtctggttcatttcattatgcttctgtttgtttagtattagtatatgctctttatatataatattgtagggtttggcataataaatatgaatcactcataatataaatttatttatgtcaccaaaataatttaatacaataacaaaagaaaattgggaattgggaagtgaaattgaattgacaatggagaaatctcaaatctccctccaaacaaaataccaatcattctctctctcttcttttctttttcttatttgtcttctttcatttcatttcacatttcacaagtgagatggcattgtctaagttttaatataataaatatatttgtaaatttcaaaatatatatttgtagagaaaattaagcggtttaatgtgtactattggtataaatgttctttttctaggggagaaagaaaagaaagtaaaagaaataatttgtttttcttttctctttacaaattcaaaaggaaaggagaataaaagaaaaagcttcaatttgtctattgtaaatgaaaaattgtgtacactcgaaatgaggattagttgactatggctcgtaagctaaaatacaaaagtgtttaaatgtgtaattggagaaattatgtactaaaattctgtgattttaggaagaaagtacctacataaatgatttgattgcctgttttatatgtatatcgcttaattaatgagtatcggggccgaaaacaaatcatacattaattataaatttcacacctttacatataaatattgacctattattattattagttatgtgttgcgattgctaccacacacacagttgtagtttatgggaaatttcaatttttgaccctaataatacaacctatatcaaaatttatacccctttataatttgtacaaatttagtccattaattacatgaacttcccattt

SEQ ID NO: 300330 - DNA, 3233 bp, Cannabis indica
caattccttgaattaatcaaatcaaaaactggtttttgaaataaataattcaataattgttttttgaaatgactttaatacaaaaccagatgacgcataaattaaaatagaaccaatttcacaactaaataaataaaaataaataacacacaataacttgataaccggttataattctaaaaacactgatacataaattataaaagaacaggccattaattactagtcgagttataaagcctcagaaattacaattctgtaaaattactgcaacgaacaagccattaattttcgtgtttactttgaataataatcattatatggtgattctagaaccctaaccaaattctttccatattaatataaaaatatagcatgaatttatatatcatttttttcaattaaatgataaaactttaatatttgtagatggatcgattcaatactctactgtcttcaaatcaaacatctaaactaaacccaaaaaaagttcaacttaccatattactagagcaaatatcaaaagaaaaactaccgaattgcaattagcaaacatacaatcttcaggtacgaaatttcccattttagagaattaatgtataatattcatactattgatcttaaatttggctaaccgacaacaaagtcgtatttataattgatattaccacgtgtacacaataagaacatgaaaataaagagacacattatttttatagaagtttagcgccccttagttagcgagtaatgatctactcccattttagttgtattaataacagagataataccactcagattacaagagttgtggattttgaagtggctctcttaagattacaataatgagaatcagtaggcaaatctcaagtgagagagatgaaagagacttagtctcttcaacaattcctaggatgtatagaagagagagaaaaagagagttggggttttagacttaaagcttgagagctttagggttcttcaaacttagagaaattaggttcaggttgaggcttgttatgtaggagagcttacaagagaataataacataatatccctgaaaatagaaaacataacatatgtattgcataataaaataataaataattaatatgttaattaatcaccaaaaataggtaaatatttgatatttattccctatttttgtggattattgaagcccaatttgcaacttggattgctgtccaggatgtaagctgcgcaccaagtgcctgccagagtgaatgctacacaccaagtacctgctagggtgtaagctggccggccaagtgcctgccaggatgtaagctggcctgcccttcctttgctagaggttggctggcctatgctggtcataaggccagccaagggggttcgatcagaccctttaaggtggccagttcgttgtctctttgttatgcttaagtattcagacttctcgtcaactgatatattgtgtatgatgacttggcttcttattgacaagttatactacatgtgtccttaaccttgcccacatagatatgccacatcatgtgtgcaaaaattgggatatttatccccgatgtctccgtgcagatgtctgtatggatagggactttccataatcagtttggactgatggagccttaaccggccagatcttccaatatattcagtcttgaaatgttttctcttgcttgtttgatcacattcctaagcagaaagctgataatatttatacatgttattttttttgcatgttgcatggtaaatgagagaggggcacatcagaagctatataagcttagttggtgtaactcattctcattccacatttctcattctctgtctttgaaaaaggaaaccaaagaaagctcttcactttttttcgatggtccaatctttccaccatctttcccgaaggttttcactagtgggtaagcttttgaatcccgctctctgcttatttatttggatttgccattgtttcattcaagcttttccatgctttaaatattctttgattctcacgttagattgtagtctttttggtattttaatcttcatgatagttttagaatgcataatgtgtgatttcgtgacgaaaaatatttgatttcggccttcgttgtgattcttgactctttgagtcacgaagaacacgaagaccatgttcgagttttgaaaaacatacattttgatccaaaactaccgttagccgaacctaggagtcttgtttaagatatagctagccctagggttttttcatggggactggccagttttagcgtttcaccctagaaagttggtcggttcatggttgggtcctgtgaccctggccggttcttggatgggtcatgggaccctagctgacgctttcaaagctttgggaccctggccgacctaggccttggtctcaagtaggtggctaattttctatcctcttttgacctcggcaagaatcctgtcatagccttgtgggcatatacaaccttagtcttatacctggttcccttagaaactctatatgaaacttaatggtgagtctattatagtcgaattctcaacttaagactcaacatttgtccaagctgttgcacttgagactgtacttcgccaatacccagccttgtacgatgaaattgtctggcaagtacccttgggtatagttgactagagcgttttctagaccttgtcgctttgtcaggtgataactctgtgaaaatagagctatttagctcttctgtgcattaaattagttttgttttcaagtatttttagtttattttagtaatctttttatttagatttgaataaatattaattttaatatttttttattagttttaattaatattttttcatgttaaatttttatttatttagtctcccgattaattaaatacaatcatgtgtggtgttgtaagagtttaaaatgcaaaattggcatttagtgtattgggctattttttgttacttgtgaagcccaaatcttatgaaaagtgtccaaatttgtctatggtgaagcaggcatggcttgaattgaaggaggggacaggcggctgctccaagagctccaggaacacctacatcaagaaaaaaaaaatgaagaaaatgaagaaaagaagaaaaagaaaaagagagagttttatttgagcattatttaagattttaatttagcatgtttggtattattttttgttttttgttttcaaaaaattgtttttgaaatgaaaacaaaaaatagttt

SEQ ID NO: 300331 - DNA, 2785 bp, Cannabis indica
cctgaaattaattattaatttgccatcgctattattaggtgcccatttattttcataaagattattatataatagtgattagcatatgtggtataaacgtcaatgtatgtaatatataatgcaaattaataattaatttcaggtttttggacaaagcttgcatcaaaagccaagatgggacgatgagtagtagtactactagcagtaacagaaaagagtctccatggagattatgcagtgttagtcaagtgaatcaagtgaagatattgctgtcagtgattcctatcttcgcttgcacaatcattttcaacaccattttagctcagctccaaactttctcagtccaacaagggagcatgatggacacccgtctcaccaaatccttccacattcccccagcctccctccagtccatcccatacatcatgctcatcttcgtggtccctctctacgacgctttcttcgtcccattcatccgccgtttcaccggccacccctccgggatctcgcccttgcagcgaattggatttggcctcttcttcgcgaccttttccatggtttcggctgccctaatggagaagaaaagaagggactctgccaccaaatcaaatgaaataatctctatcttttggatcactccacaattcttgatcttcggaatatctgagatgtttacagctgtaggtctcattgagttcttctacaaacaatccatgaaagggatgcaagctttcttgacagccataacctattgttcatactcatttggattctatttgagctcccttttggtgtctattgttaataagatcacttcaaggtcctctgatgggggttggttgggtgataataatctcaacaaggacaggcttgacctcttctattggctacttgcagcactaagtttccttaactttctcaattatctcttttggtctagatggttctctcgtgacgattattcatcttcatcgtcttcaactactggccaccagaacatggaacaggatcacctcaataaaattcattgcttcaactcctcaaaactcgatgctgctcaattaggcgaacagaatataccataactacttctgctgcttaattattaataattattatatatttaaatctagctgggtgtagcctgaaatatatattatataattaagttgctgaaaaaaaaatcatatacaaaaaaaggaaaaattatctaattgtttccataaaatgtatagaaataatataagctagctagctgtatgtgttatacagcaccataatattagtgatatatatgagaaagtggcatggatttcatagtctcttaatttgaatatccttaatttagagaaatatatatttcgccccaatttccttgaattaaaacaattggaaagctaactaaatatatattatttgtctaattgcaagttcttttattaacaatatttctaagtcatgtgttacaatatattggaacaataatattgtagcatatctgaataaataattgaatgaccaactttttgaggaccaagcagtttgtgtgcatgttgatttgaaaaagataagtctatgggaatttccggtataataataaattaaagctttacttatgtaataatgtatgtatatatgttattctatataattagaagattcattgcactaaaataaaataagttgaaaaacttgacatatatatatgtggatggctgtggatgatccccctttgattaagggtaggcgtctttccatcactttgttgttgggaggcataaaataaggatttgtaagtgcttcctattgctagtgcgttcttacttgaataaagttggtgctttcatgaaaatcttactgcactgacgtgatgcatgaatttggtataaatatataaatatatatatatatagatacgaaattatataattagctatactcacaacttttttacgaaaaaataaatttaattattaacgaagtcaaaaagtaaaagtaatttccaaaaagagagatatatatagtaatcgattaagaagaaaaactagaataaatgttatatgctattcatcccatttgaagcttctcagctcttacctttctacgaagagacatgtctgggacatgtcttctatgttggaggtaggacccctttctcacccatttgcatttccttcttaaagtaatggaaaacttgcataaatgtagtgttggctaaaagattggcatttttaagatagagggggtcccccacacaaacctctcaacactatcatacaaatatatacatatatatatacactaaatagcatcaatttaaatccacacatatccctgttaatacataaaggcccttttggtaagtaggattggactggactggacaagattggattatgctaaaagtaatcctgtgtttggtttaacaatagactagactattttttttatgaataagatgatttcattactccaaacaaccaattgtacacccaaagagcatcctcaaataaaaagagaggacctcacttctatactatatacactttacaaggaatcaagccacactttgtcactatagactttctttggccatatacatgatactctattctttgttacattttgtacttgttgaaaaatcaccttacaattattctctttaccatcccaaagcttgagatttcggcaaagccacagttggtagatcatggcagcaagagcagcagcatacacgcctctcttgagcttgctcatcctagcttttccaagccacaacacagcc

SEQ ID NO: 300332 - DNA, 1852 bp, Cannabis indica
aaaaattaataataaatatatattttttagatatgtggaatgaatttaaatttgaaatacaattaatataagatatacaagataagagagatcaaattaaatttaatataatgtttagagtttgaatttgatgaactttctgttacattacctattatacagatgtttatcaaatattattttgttgtgttttaaaaaaatattgttgttttattaatttttttttaaacacaacaaaataatgtttgaataatatttattttattttattttgatagaagcatattatttattagaaaattatattgttattgttgttgaaattgatacttttggcggtaagaaatgttgtataccaatattttatttagttttaacttcttaattaggataaattagttttactttaaaatattcttacataaatattattaaagtctcatatatatttggtaatatatgcttgatccactaaataaggtgaaagtaaatcctacccgaacaaactatttttattagagtgagttagacccaataactttcttaataaagattatgtaattatatatataaaaaaaaatagtattaatttaacctttcttgataaaaatggctatttcatgaggttggagcgccacatgcatggacttaagtttgccttggacaagagtgcaaaaaaaaatgataaaaataggattgtactatagcattcttaatttagtttattttcacaatgtgtgattaaaatatttaatgacatattgtgattttattaattttagtagtgttagtaggtgtttgagtgtgtattggtttataatatatatatttatattatgacaatgtgaatgtgtgatgattatgtttgttctagaaaacgatgtatatgtacatgtagtgtttgtttttgctaattaatatcttagaattagtagttagttaatcgattatgacttattcccaactttataagatggtgatgagaccatatagaaagctcttgagacaaaccattgaccaaaaagtgtcctaagtatattggtcaagtagctatgtatattttatgttttttttttctcctttggataaaacaactacattactacatttgtagtcattttccaacaaaagtaagtaccggtatatataagagagtcaaaacttttcaaaccaaacctacttcttctttcaaaaaataaacataaaatgtctattctagctaggggggtcaatacctgaaaacatgtatctatacaaaccctttcactcaaattatacatgtagtcaagaagaaataaactaatatatatattgccacttagtcattatatttggcaataagcaacaacattattagattatcttcaactaaagcctttttgtaaggagaccaaaatttatagtgtgttttggtcaatatatagtgtgtgatgagttgtacatatattgttcttcccttgttttaggtagcattgtcgaatgtgacttaatttgattactatgtttccctgtcttgtgggtgcctggtggtcttaggtcaaaatcctattatatatgcttatgtttaggaagctttgccttaatgaagggtagtgtttacttttggaaattggaaatggagtttttagttattacctaccctaacaattcatgtttggtacaagtcaaggacaaaagtacataccaattataaaggacaacaagaattttgtttcctcaactatgactttctagaattcggcctctatttttttttttcaaaaatctccccaaactatataaactagggtaaatatcattttggaccctgtgttttgcaaaagttacagattggaccctgtattttgttaaa

SEQ ID NO: 300333 - DNA, 2193 bp, Cannabis indica
aatatatatatatatatatataacacaatctatatatttattactaaacgaccctactatttattgtcatagaccagcaatatgtatatatatatatatacttcaattggtggtctaattctcttttctttttctttccgagatcattataatttttaaatgaaagccaggcgcccacactacctacatcccttcaaaatctatgtatacgaatattataatatttatatatgtatatatttgaatattacaagcatagctttggatcgatatcattctcttgttatcatttactactaagaaattgaaatatatctatacacatatattatcaataaatatgaaatcgaagtcacgaaaatgatatcacgcaatttgtaattaatatctacatttaagtgattattatacggccacataatctgatctagatatatacataacatattattatcgagtaattaacgaccttgcttgaattatatacacatattaataatttatgataaatttggattcgttttgtaaatattgaagtgtgtatagggtttaggattcaaagcttaggaagaatatattacgctttaattattgatgataaatgaccacacggataataaagcgaattcgaaaaagagatattgtaggatcgaactactagctatatatatatatatatagtagtgcttaattaattgatatataaatgtttttatatttatatatagagtatggaccttcttcttgtcttggaaactgacctatcataaggcccctccctacataatattatttgtgtaccaaaatcgtcaagtttagggtttggtttggtcccccaaaacacttttacaagtcataataatatcaaagcaaataaattgatatacttactaaattatacttgtacttgtataatattatgtatatttatatttatattgatccatgattatcatgttatacgaatagtataattagttcgagtgaatattgatatatatagaggaagaaatatttttgttattaatgaatataaacatataagtagtagaaagtatgcaatactatcgaataatattaatatggagttcatttttatcaactattaaagtatatataacatcaaatgtttctttctttctttttcttattggtcccaaaagagtgttattgtttgttacagagaataattgtgaaaagaagacacattaaattatcacttccaattttttttttttaaaataataataataatcatatgataaaagagtttctaaaattcgatcttgatgagccccctcttggtgatgggcacctaccctttctagttcctctccctaaaaaccaaaggttaaaattatgatttggatgcaccgaatgaatggatgtaaataggacagtaatacaagagaattatactactatgaatggatgttaatttgaggttaaaacccccgattattattccacttgcatttacttctttaagcttaaatttaatttggtggtaaaatcctccgaactaataaactgtacgctagcaaattaaggtatcaatctatttactacatggacttttatgtatgcatttttatacacatataatttgctttttcttttttactaaataaatcaaacaataataatatattattaataaaaaaatcttagcctcttccccaccctaaagcatgaaaagtccaaattttaactcaggttaaaatttatttctcagacagtattatgaaatctatttcagatctaaacactttgtctatatggttacaatactcatcatctaagctacaatgtaagtttacatgtacaataacaaaatatgtttggttaccgagaaaatgagaaagaacattgcaaagatagatcgaacatatggaatccttgatgcttgtaacgtccttgatctcgtacaaaatttttgggtaggaattgataacacaccaattgagtttgatgacaaagctttcgccgaggtcacaacagccgtctttgtcttccttgtcatcctcatcaactcacatacctgaaaagttaacagaaaaattagatctaaaagtcaaacataaaacccaaatttgataaaagggtaacaaaaaaaaaaaaaaaaaaaaaaagaagaagaagaggagagatcgagaacaataaacacctacacacacagagagagagagagag

SEQ ID NO: 300334 - DNA, 2523 bp, Cannabis indica
actctgaccaaagtgaagcacatacaagtgttccaacagccatcatccacagaaatatcacagagtagtcaacaactggtcgttttggagaatataatagtagttccactgcaatggacaattacaaatcattagaagaaaaaatattaatagttaataagtagcttgtacggacacaaagtcagcattaagtcatttgcaaaaataaataaacaatatgtaaacaatttttttttaaaaaaaagtaactggaaggaaatgttgctcaaatgtacatcacagtaaataaacaaatagttcaatcaagtgttaaaaaaaatcaaatagtacattcgaaacatagggcacagtcaagcattagttggctaaaactattctaaagctataaaccccgtcaagtttacatcaaacccctacctaaattaacctcttctgcacatttttcacattcttagagcattttgaaagtttaaaaagaagaaggaaaaaaaaaagcaatatcctaattacaacaaatttttaaaaaaaaaaaaacaatttggaaggaaatattgctcacatgtacatcacaggaaataaacaaatagttcaatcaagtgtttaaataaaaaaatcaattgtaaaaaaaaattgtaataggtccaatcatcagtggattagctaactatataaagagaacaagctgaatgacaagcttcttgctaattaaagagttagttagcaaagcataatgaaaggcattgtataatataaagtagcaaggataatttacttatatttttctactatttggactgcttaacctttagaagacatgaagctatagtatcaaccctggaggaatcttattaattcaaaataccctgtgcaattgttacacagactcaaagactaattggaaattttctttgggacgacaatggagcacgtgatagttcatttggcaactttggaaatacagcttcataataaagtccttttgtataaatgacaaggaggtttctggtggaaagcgagacattatgtcataaggttatcaaaagaaaatgtgaatatggtattaatagaaattataagatgctccataagtttcattgaaacccttggaagtccattgcgtctttagtttatttattcaaacactataccatacaatgtaggaaatgttagataattcagaatctaaaaagagtgttagaaagttggattataatttctattttgtgactattgcatcctgtttcccagtttacttcctcttgtcaccagaatcaacattctaggtaacacaattttgaccaacgtttaagaattttacaactaacctctctttccacttgccagagacttgttaagagcatctcctccagactttggaatcatcacaacaggaattgaaatgtttaaagcagtgccattctcagaacaaaccatcttgtaaagatctgataccatagatttaaaagagagcattagaggtgaagagtcaaaaaaaaaaaacacttcagcattaatttccatttgcaacatgtttgttttgcttactttcttcttttactactttggacaaatcaactatcgttaacaaaattcaattagaaaaacatgtttaatatgtttttttttttgaaaaaagaggaggccacaagtgtgcaaggggtagtagttaattacaccaaaaagcaaaaacaaagcagtgccattctcagaacaaacaaagcagttacctacaccaagaaagaaaatatgttctgtattattatgtttcctgatttgaactattatatttatgtttctcatggtattcctccacaacaaatgaggttatcaatacataattcaccggtgggaggagtctaagacaagtgcacacttcccaccaatcaactccccacccacaaatgaatggaattttaaccctataatcattaggattcacaaggagagcatgcaggattctgagaaactctccctctctctttcattctggccatgccaaatatagatgaacacccaacttcacatcaaacaactaaaaagggtgaaaacagacataaaaataagagtttcacatatatccttcacaggaaaatgttatgctacaattttaattataagaggtccatggaggaccagatgaaactaagttgtttgcttgagaagtgggaggatctttgaaggagttgaaaatgcggctgaagtggtttggggaaagattaaatactgggtggctaactgactatttaagtcaaaagggtttgaggggttagcacctcaagatttgactagagaatggagtctcattttgcactaagaaaacatagtctgctgtaaataagattcatgtttgtatttatctattatttttgagtctcgtgcttgttttgtaaccacaattttcctccgccataagcaatgctcccgaatgaattttgggagggggttagtctaagacaagtgccctcaatctctttttcataaaaaaaaaataataaaaaactaaaaaaaaaagaaagaaaagca

SEQ ID NO: 300335 - DNA, 731 bp, Cannabis indica
ttttcatttatgcccttttcgattatcagattggtacagatattgaagacttcaaatgctcttggttggttgtgaaagcacttgaaatagttaccgatgaacaaaagaagctattatttgtaagccaaatcgtttcatatgaaaatgtgtctcaatagaatgtatgttacttctgtttacatgtttgtattctgtgttttccaggagcattatggcaaagcagatgaagcatctgttaaaaaagtgaaagagttatataaaactcttgatcttgaggtgttcattcattcattcattctctttttctatccatgttttttttttcgagtttgtggagtaaccctttactaaattcgatttttcggttttgtttgcagggtgtgtttgcagattatgagagcacaagttaccaaaagcttaataaatcgattgaagctcacccgaaaaaagaagttcaagctgtgctcaaatctttcttggctaaaatctacaaaaggcagaagtaaagagataacaaaattgtactttgtgtgaacattagagcatttctttcactctttttaataaaagggtaacttttagtaattgtttttggttactagtcataagaattcttagtagttcattttcaatgtttcttacttaccctactaagtgtggtggatattttaatgtaatattatgtgttttctagggtatgaaaataaataatttctaatgagaaatttgca

SEQ ID NO: 300336 - DNA, 594 bp, Cannabis indica
tacaatattttctccactaaaaacggtggccggaagtagagactaaaaagattttttgctctctcttggagaagagccttccctgtaggaatgcctcaaacgcctgatctgactatggaagatcttcttgatcgaacggggaacttaagaatcaaagacgaagatggatgggaagttaatgaagcaagggaatcagaggtggggaaatcgtgcctcatgggcaggtttgctctaacaagaacatgaacagatccctcattcgaagtatcctgggaagagtttggggtttagcggaagtggattggggtgtgaagatcaaaagggtcacaacagaagctatgtttatgattttctctttcaagaatgaaaatgatttgaaaagaattgtgaagaagtcaccatggctgttgaacaatggagtattgattcttcaacgactctaaagattctgacgaagtgggaggacgaattgactcgctttcctttggcggggagggtgttaaaatcttcctacgaaaatcaataactcggaacaatatgctacggttagcaacaatggcgggcgaggtgttgggaattattttaccaggatct

SEQ ID NO: 300337 - DNA, 2980 bp, Cannabis indica
tatcgttaaaataaaaaaaaaaaaagaaaagtaaattttttttttataaaaatcaatgtttttccttacaaaattaaaataaataaagaagggaaaggggaatggatttggatattttattgtctttttccttgaaaaatgaaaaatcttaccttaactataaaaatccaatcttgttggaaaatatgagccacaatccgaacgagtggttgtggtgtttcatcacttagatttctttttgaaacagtttgtaataaatctcacttcttctttcaatccaaaatccaaatatccattactaagtaaccttcttcactccatcatcaatggcaaccataacaaacttgttaccaagagtaacaccttcatcactttccacactccacaaacccaaaacaacaacttcatcaaactccttattatttcccattctaccctcttcctccccaaaacccaaaccccaaaccctaaaacaaacccaccgttccaatttcgtcgtttcaaaagccacaaccgcttccggagctaagaaaaagcccttaaacgacgaaaaggtacagaaagtccacagcacagaggaattcgacgatgccctaaaggcagccaagaacaaattagtggtggtggaattcgcgaaaaaagacagctcacaaagcagccaaatctacccattcatggtggatctaagcaggagctgtagcgacgtcgttttcatactggtaatgggagacgaatcagataaaacgaaagagctttgcgagagagaaaagatcgataaagttcctcactttacattctacaaaagcatggagaagattcacgaagaagaagcaatcggtccagacatgttgatgggagacgtgttatactacggtgataaccactcagctgtggtgcaactgcactgccgtgatgacgtggagaagttaatcgacggtcataaaatcgatcacaagttaatcgtgcttgatgtgggtttgaagcattgtggaccgtgcgttaaggtgtatccgacggttgttaagctgtctaagcaaatggctgatagtgtggtttttgcaagaatgaatggggatgaaaacgaaagctgtatggattttttgaaggatatggatgtggttgaagttcctacttttttgtttataagagatggtcagatttgtgggagatatgttgggtctggtaaaggagagcttattggtgagattcttagataccaaggtgtacgtgttacttattagtaattcatatattgtaatttcaaaattcatactaaacttcatttcactataatagatattgttttgtattaatttttgtttaattttaatcattaaaatttttacacttttgtaatctagaaagcataactaagtacataaacaatcattgaaatgaaattgaacaaaaattcttaaattcaataattaagtcatgatttagtacatgttaatgtttaggtaaaaaaaaaattcaaaattaataaattaacttagagggaatttgtttgtctgatgtcgacaatatagattactaaacttatttttgtttttttttaaataataattataaaattatgtaaatacttgcatttagtgaaattttttgagagaaaagtatggagataaaaaaaaaaaaatgtatgtttggtaagagaaaaagtaaagtgggtggggagaaagaaaatatggatcccaaaaaagaaaaaaaaaaatctagtcgagaactttatatagctaataattactaatataatttttactaaattaattttacaataacaataaaaaaaataagattatatatttaaattgggtgcctatggtttatggtgtgacttaacatacccttaagataggagcttctgtggtgaaagaaagaaatccctatttcgatctcttatattttcacaaataacttccaatggtgattttaccactttataaaaataaaataagtcttaaaaagaaaagtgttaaaagattaaaataaaagtaaaaacaatgtcaaacaaattcaaacaagtagttgagtgatatacttgagaattattttattcaactttttccaattaaaagaccaaaaattggaacatggaatgcaacaaaactgaaattcaataaatatatttatcccataacttccaactttttgccttccctttttaaaggttacaattgggaagaaatctctctctttgctgctaaaggatgaaaagataatgtttctctgcaacaaactagatgcatagtaaaaaagaagagaaaaaaaaaacaccttttcataaatcacttagctaagatcgtccgggtccaaatctttcgcgaagattctgataaattcgagtaacctgaagaaggcgaggatcatctgcaggaatctcacgtgtctgcaattcacagttagaaattagtccggtagttcaagtgaaacacatggatttagatgacacaactcaaaacaacatcaattcggctactctatcatcaagatttaccacaaccagtttggtattagactattagtggtaataatttcctaataaacagtagaagaattctcagtccagctagtgctataagatttacataaaacttttgctagaagatgaaacgaaaaccaaactgatctgatcaacagaaaagactcacttttaagccattgtaatatgcttgcactgctggaaatgtaggagtcattctgcgggtctgcatcatgtcccatataaggttggcaatagtatagccaccggtctgcaaaaatagaaaggagaggttgttacatcagtgtagctttttttagagacactagaatatagtatatacacaggaaataaagactgttactattggcacaccttttcgccagcagcttgaagaagaagatcacttcccatctttgggctcaagaaaaatcccctggaattcatatttacctacattgaagaacgaagccatacaaataagttcaaaccaagtcc

SEQ ID NO: 300338 - DNA, 2599 bp, Cannabis indica
tttaccagcgcatttacgcgctaggaaaagtcattttttgcttagcacttttttatttttgtgctggcaattaaaagttctaatatcaacgttgatttagccaaccccttttagccaacacattagaagtaaattccattttagcagcgcaataccaaacttttgccagcacaaaaatgcactggcaagagtgacatttcttgtagtgatgcgagagtattggtggagattgcgattactcataagctttcgaaccaggtggagtttattaatgagagggatgaaacgcagatgggagaagtttattatgaatggaaaccattacattgtgaaaagtatgatggttatgggcataccaaagaagatagtaaaaaagaggctaaaccgctatggattcctaaaaagaagactgaagaagcagtgatagaaaaaggaaaagataagaaaaagggtgattttgaaggattcatgccagctaaggggagacctcaaaaatctaactctgctcaagtggaaaagttagaagtcactcctattaaaaatgcttttcaggttttggaggaaatctgaaggggaaaattaatagggaaaagttttgtgtgatttgggagttaaacaggggggggggagtgcctccccatcctaatggatataattagctagaatgtcagggggtcaacaatcgcaagaagcaacttgaagttaaaagatttattcaaagtaaagatgtggggttaattggtctccttggaacaaaggttaaatctcctaatttgggagatttatacattaataatatgtttgaatgatggtattttacaacaactaatttttaccatccgaatggtagaattatgttagcgtggaaaagtactagttttgcagtagagttattaggaggttcgagtcagattattcattgtaaagttaagcctaaaagtggtgcaaaattcttggtgacattcatttatgctttcaataattttgctggtcgagaagttttatgggaggaacctgtagtaaatggaaagttaacgatgagcctgtgttattttaggtgatttcaatgttatttgtcatccagaagagagagtgaagtttaatgggattgctaaagactatcgtgtgctgaaagattacatggaggattggtaaatgtgtgatataaaatttaatggctgcttcttcacttggaacaacaaataagataggcaggatcgagtttacgccaagcttaatagagcaatcaaaaaccaaagctagctgaattcttatacaatggttgaggtaactttctttccaaaaggagaattcgatcactgcccctatctacattcagtttatcatgagattaaagctgctaggaaacctttctaacttttacatttgtggtgtgagcatgaagaatttcagttacatagctgaagtgtgggcaaaattttttaaaggcgtagagatgtttgtagttgttcaaaagttgaaagctgtgaaaagtatactaaaagactaataaacacattattggagatgttgttgtacattatcatcaatttttgcaaaatttacaattgatttaagagaagatggataaagctcctttaaatgaggtaatagttgccaaagaacttgagactccacagttatttaaagtggaaagaaagaattatagttcttttttggctcaaaaagcaaaaattgggtaaattaaggaggggatgataatacgaaattgttttacaaaagtattaaaatgaaaagggagcagagtaaggtttatgcaatcagaactgagtatggtacctgggttgatgattatgaaaaggtaactgaagcatttgtggaattctataaaaagcttctagggataaacggagaaaaaatggacaaaaaagtggtgcaagaacgaccaattctttttttatactcgactttttctaatgaggccatatggtgaaaaggaagtcaaaaaagtaattttttctattccccatgagaaagttcctggtccggattggtttaatagtgcatcttttaaaagaacttggactgtagtgggagaagatgtcactaaggccatcctttcatttttgaattcaagggccttactgaaagagataaatgtcacagcattgactttggggccgaaagtaaaatgtctgaattcagtggtagatttttggctaattgcttgccgtgatgttaagtacaaagcaaccacgaagatgatatgtgcttggcttcatctcgtcttaccatgtataatttctcaagaccaaggtggcttcgtccatgggaggtttattgctcataacattatgtgtgtcaatacttggttagacattatgggaggaaaaattgtaaaccatcttgtatgattaagaaggcatatgacactattgttggaagttgttttaccaggatctaattttactaacatgtatgtttgattatattctataatctaacatcctaaacatgaatttcctaaaaataatgaattaaacacatataaagttctagaaagccttacactggtggcagcagaatattatgactccttccgttcagatctttatcccttgttcttttttatcgcaga

SEQ ID NO: 300339 - DNA, 708 bp, Cannabis indica
aaaaaataataatgacagtattgaccgaacatgagaacctttattgataatatttgtagagttaaagacattttgttttttgacattagtttaaaaagggtgcataaaattgagtaattaatgttattctatctggaaataatacaaaatattatgaatgttgcgtattaacatcttctcacaaaatttattactcttactttcactattagtaaaatttaactttgtgacacattatatagtttgaagtaaaattttggtataaaaaatggcaaaatattattgtttccggagggaagggagcatgtggggggtatgtccccaaaaactatttatttataaagatgcatctaaacgtattattatttacatttctaaaaaacaaaaaacgtattattatttatatttttactcctttttaatttttctttccaacaacacccttattaattttcttagggcaagtttggcacactattttttatcacacaatagtttttgaggtacaacaactacattgggggtaacatgtacgtgttgtttgaggggactcattattagttttaagctaatcaattttgtttgtttgttttttttgttgggcaaattaagaaaagagaaaggaaaaggaaaaaaagaaaaagaaaaaaaaaaaaaaataatttttttttacattgatttaattatttttataatatttaataataa

SEQ ID NO: 300340 - DNA, 2136 bp, Cannabis indica
tttcaccgccaatttttgaggttgaggactaatcggtatcaacctcaagttttttgggacttttgccgcaattatcccaaagaattataattacaattacaagtaaatacacagaattttgaactcgtacaactcttaaaataataaacatatttttaattttaaactttacaatttttattttttttttgacaataactttacaattcttttaattatataagaaattaaatttttattatcattttaattcaaataattattcttatattatcgatgtttactatgccaggacatatgaatcattctcacatgttatgtctttggatttattgtgcttgatatgcttgacacgattctggtacattatccagacaaaaaattgatcttatgcacaattgtaattaaggttgacatttcttttttttttttttagttcaaggttgacatttcttaataggacatgacaaatgatacaaaataaatatattttggtgacacatttaattttgtgtcgccacttttaattacaaagtttactaaacatgtctttttgggtgatttttttttttgaataaataaactatgaatctaataagtaatgtttgtgtttatatatataataataattatattaatcgtatcaattttgtataacatcttaaaatattattttttttttgaatggaatcttaaaatatttaatagtgtgttaaacgcgatagttttgagtttgtgtaataaatgtgatcatgtacatgttaataaattgtatcgtgttcgtatttagagtcttaacacaataaataattatgtcgtgtttgtcacagaaaaacgagctatagtttcgcattttagtttggacagttttaaactaacaccatatagcgttggatgattcattgacgttttttcacaattgacgcttagtacataatttttttatttctcccacctaaagctatgactttttagtgtcaattatgcgctaacaaggctttgttgtgtgttatactgtcgcaaatgaggttttaacattggttataaattgtcgcaaacaatatttttagcgtcaattatatgcatttactaatgagctaacctaaaagaggaataaggatagtaaaaataagtcgaaactcatataaccattaacttaaattcgtaacactctttatacacccattttttactagttaactttcttttctttttattttagaattagtgatagctgaaatgacaatttatttttaaaaaataaatgaatagttacataataaataataaaatcttataatgatgtttttaacgcctgttataaattgtcattaatgcaaagaccattagcgccattagaatagatgtcggttcaaaaagtaactaatttcaacgaagttggttatagacctatggctaatccctttttttttggcagcgtgtgttcactataaatgtgccatcaacatgacacgataaacatgattggctagctctaatcctagtccattggatgtggctaccttatatgttcgatcaattctcatcttaacattgctcagtcatcctccctccttcccacccttggttaccccgttataagcaccacaactagctggatttctcctccaaaacttttaagtgcatgcatatgcattgttaattttattttttgaaatttatattgatatatttccaatgaaagtatatttgtacttacattttttgttttgacagaagaagattgtacttatattattattattagtgggtagcatacttctgcttaaaatttgatgaaattttgatatttttattttatgatagctttctttgtttttttattaaaaaaactaatgattttaatttttttaaatatatggtaataaaactataatgatgtactgttaggatttataaacactcgaaaaaatatatattacatatttaaacatatttctaaaagtgttttaatatagaaaactctaaatcataaatttatataacctttgctaaatttaagaagaaaaatatgataaaaagataagcagaagcactaacctgaagtcattgttggagattgcagagaaggttatgatcttccaagaatacactatttcttaaagtattttctct

SEQ ID NO: 300341 - DNA, 3096 bp, Cannabis indica
ctcattatattgaatttcatgaaaaatgaatcatgcatgcacttgatgggctattattggaacataaaccaaattcagaattctcttcttaataccttattatagttaatatatattcactgttttttcaaaatatatatatatatatatatatccactgatattgcgcctaaaaatgtgtatttaaagaactgggaggattaataggaataacaaaggagaactagggaaatttacgagctgacaattaactctaaaagtctgggctattagtagaagatgtgttgagtctactatctaagaaatcaaatcacatgtaccaatgcatgagactgctcttacaactatatatagttcacatagatacggacttttattatggtaaagtaatcccacgtgaattgttcacaatttttatttaattttttagtatgttatagatttttcacaatttcaacgagaaaacggatatacttactttccaaatgtatctcgaccaaaagaaccgaaaataaaacgttgaatacaaggttttttctaaaacaattcaatgaattaatcttaatttaaatttgaaaattaaaatatcgtttagttggaatgaataaaatataagaatatgattagaatgacaataaaaataggagtggaatcaaatttaaatttcataaaaaaaaaatttaataaaaaaattattaaagttttctcatgttacgaatggtgtttcttttcattttcaaaatagaatagtcattctaccaaaataatagaaaggacattctattgtagtgacattctaatacttttaaattcaaccaaacaaaaaaattaaatgaaaattattctatttcattaccttcaaccaaatgcccacttaaatttgcattaaaacaatattattactagcactttacatctcctttttgttcaatataaaaatttcaaaacaaaaacaaaaatgttttattaagattaagagtcaaatctaaaaatcaaagtaaatctcttttctaattctagttcacataatcataaagatttaaaattttgaacaatcgagaagatcaaaaataagaatatttttacaaaaattgaaattagaatcaaattttataattaccaaataacataatttatctgtataatttattttatactcattattttttcagaataattaatattttagctctttataaacacctgtattagatgtaacctagtacccttaagacgtgtcgccttatgattggctagcgatactccttaaaagctattatattaaactatatgggactcgatactaaattagaccaatagcgatattgacacgtaggaggatgcttggcagtactgatgcattttagcatttctctttattcatatgtcattattcaatttttatatttttttaatataatttattgtataatttaaggacatgtttaattaatttataattaaagaaaaaattagtttcatcacgatgaactaagttattgtttaagttcaaaaacacaaacaaaattaatctgtaaatcgagaatgaacctaattaagtctcacttaaaaggctcataacacgccaaaaacaaatgataaataatctaaatttaatcaagcacaaagaaagaattaaaatcaagggtaacactgaaatcattgagttttaatattttagttatacgtaacaaatcccaattctttaagcttacatttaaagcctaattagtttagtagacatggctacggccctatgcaataaaaaaggaacagcatatacattttttgtacatttaagaaagataattaaattgaatggcgtcaactcgttaaacgggtagttgataagttcaatctaaacttttaaatacaattgaccagaatttatagaatgagtaagttcatatatgcatggttatggccaattcaatcaactcatcttctttcaccaccattattaattttgttatgttcacattcagacttcagtggcaaagaaaaaaaagctattgcttatcttgaaagaacttctacaagtgtaaaactatgaattaaacattcagtcttggaaattagacgattaaaacacaaaatattaggagcatgaaaacaagcaaaggaaccaaaaatctttgcctagatacaacatctttccaacccttgcacaccattacaaatcaatccaagaaggtatccatgacatcagcgtacatacccccttgctcagaattcctatagtccccttgttggtggtgattaagatgatgatgatgatgatgatcgaccgaagtggatgaagacgatgcagccattcttgcaggcaaagtaaagctcctcttgaacttgttttccatgctattattcttcctaccaccctcagctgtgtggctgtctaaactcaataactcgtttgaatttccatgacaagcattatctgaattggagtgatggttttggttctcctgtttgtttcccaagctgtcggtgttgaagagaagctttgcatcgtcgcttcttccagtgagcgcgttgaagaaggacagaccgttgggccatttgatttcattttcatgatgatctcccccgccaccaccactgcctcctcctcccaacatgtcttccattcgagtttcggacgatgaatgaggaaggaggaacatgtgtgtctcgtctttgggctggggaaagcctagtcttgctgcagagttctggtaattaggagaaggaagcagagaattgggagttgggataggcctttgtgcccaattgaagagtggaggaggtggtcggattggcatggcagattgttttgaaggaattgaagtggaagatgatgagtttctggttgaagaaaataattgggagaggtagaaaccggattggtagccaagagactcaaaggtatgcctcattcttagcacaaaatgaaggtcttcaggtatctgtagatacgtatatatatatacatgttcatcgttagtactaattgctacacaaatgacatattcaaatccaaaggggaatagagaacagagtttgaaaaagaaaactcacaatcttgcaggagcccaactgcagaagaccatgaccagc

SEQ ID NO: 300342 - DNA, 3201 bp, Cannabis indica
aagcaacatgaaatcatttattttaactaaatcttaccctttccattttcttggaggtatcaacattggcacataaggaattgggatgagcttaacctgttagaaacaggcagatgataattacataaatgcagtcaaataaaaattaacaaatagttataggccgctttcatatgtatatcacgttcggtatatgtttaaaatatttgagaaaccaataagaaatcaagatatatgcagactatagacataattaggtctcacaaactgtttccaaggaaacccaagtgcacaaagttgagataacattaaaaagaaaaaatgttaatgtcgttggagttaaagaaatagtaattttctaaccatgatgaatcaaaaagttaaaataaatttaataatgcaaattactttcatacgttttggaaaagggtaaacgaaaacaaagagatttcataacttacagttctatcaagccctgcaagaagtaagggatcggcttctataactccataattcctcagaaatttctgcctgttaggatttttttaaaaaaaagtttcacaataacaacatgaacaaagaaaaaaaaaataacagtcactttatcaagtctattcttgtgttaaaactataataattgctcaataaccaacttataaggtagtgttgtgcattatcattatgttccaaggtacatactccaaatcggattctcggattctaagaagtgagttgcttctttattgttctttgacaaaaactaaatcaaacaattcttccgaaagactcaccctgtctttgcaatggattttaatctatgcctaaatgcaggtctaacatcaggtggaacatctcctgactgatcaagtggaggttgtatgaaagctgtttcagttaataaatctatcagacgacatcccagctgcaaaattacagtgagtaaaaaaatgtctcaaagtcatgaatttttgttcaaaatctgattcattaaccattcagaataataagatatgccaagagccacaaaccttagcctgggtttctcgactccaaggctcaaactcttcttttaccagtagcttttgtgccaaactcaatcttctcgttctaatcaaaccgataatattcttcctgagtatctctttttccttacttaaaccctcttcattgtcatctacactctcctttttctgaatctttttagtattctccataaaactttgaattctcacctgaaatattaacaataatgataacccatgatgcttcactcatccccaacttagtgaagttagcagagaaaagtgtaagccaaacaaaacacaaagatattaccagtgtcatgtagtaaacaagtatatttttttatgccaaaaaggaaaaaaatacacaaacaactagaaggtgaatatttcagcaaagtcttaacctcaacacattcaggcaatgtctactgatttgcaatgaccccataatggaaagtaaatgaaggaggtgttttctttcttatccatgtctttgctttgacaatcaagattttattaattacaatccttgattctttatcttattccttccccattacaattcatttaataatagaacagtcaacattcccttactatcaacactacttgcttgaaagtttaatttaatctaatgcaacttgactacacacaaactcataatctttagcaataattctctaactacaaaaagttacaataacttaattaacaaaggtcaataagattttaaaggcatttgaacatacctcctcctctatagccatggctatctgaatagcagcatgaaccacctgaacgcagccatcataagaagctgacatcatcaaacccatcatcttatgcataacaataagagcaatcttatcagcagacaacagaccaatattaggagcaaaagccatcttttttttactatggggcaacttctgttctctctcaatagcttcctttaatggctcaaaccaacccaaaaacaaagacttaacatgaggcaaattaggagcaagcttcttctcacgcatttctctctctaactcattatactcatccaccattttctcccaagcttcagtctcagccttaatctgtctcctcctcaacagattatactttctcttctcaatcttcataaactccaacctcacttctctcttagactttttgaatataccctttaagaaaagtgaggcaatccaaggtgggtcttggataaaaatccttgggggtgattcccgaggcataacatgaccaaattcgttaatgggtatctgtaaattcattgaactctccaaattctcgaccaaataatcttgaacagagtctaatatgggtcggaactgaattgggtcagaaggggttttgaggcttagtgggaaaggagttgaggaagagagtgatggcttaaagagacagttagaggatgacccaaataggaaatggaggtttttgagagacctttcgttagtttttgggggcttccgccatgttgagttggatatttgagattgaggagttgtataggaagctgtggaagccattttgggtagagagagagagagagagagataagctagtgtcagttgaggatgaaggagaagaggagaaaggatagagaaaaggagccgaaacctcgcttaaaccttggctcccaacatctttaaggatatttccttatttatatttatttattatcattatcgtaggaaataaaatttgaaaaaattaccttaatatatatgaaccactatttttattatttattttatttaaatttcattattttttctgaaaaaaaaaattatttttttacatatattttcctagaaaatggaaattttatgcaatggacggagattttttattttatatagtgagtgatatcaaattttatgttcttagaatgttaaacgaagcagatatgaggttgacttgatccaacaaatcgagagttttgttttaggttaattataatctttgtcctctgaacttttatattgactaaatcatgcttcttgaatttttggttaaaaatttcccttaattattgagattgttaatttaagaatttttgtttaattttagtaaaaaaaaaactaacataaatcaaaatttaaatgtacatgttaaagtgcataatttgctagatattaaactaaggaacataatttaatac

SEQ ID NO: 300343 - DNA, 2290 bp, Cannabis indica
gtaccaagggccctattattattattaacatggaaacggattgtaaactcgtacatggaaatgtcataaatatacatatatttttttattgaaaactacatatatagatattgaaaaataataaaaagagatgagtgaaattatgccaataaagacaatatatgtccttttgtagtaggatcatgacaataaagttcaatgtttcttgcatctataatgttatcatattcatatttatatttgttcaaaaaatatatatttatatgattttttgcgtgagaagtaatcaagttaatacaagttttctgcacatatatataatttagttttacattacttacttggtttgactaatactaaacttttctatatctgttaaacaaataaataaataaataaataaaacttttccatatgactttgtagtaatatatatcgcttcaaatctccaaactcattagtcattactctattaattaattaacttgtacttcagacatcatactggatccaccgactaaacttacacaaaaataaagatgaaaaagttattaatattttatcatgagttgtgactaaaaaaataacacactttggataaataacaaaaaattacaaaaacgaattttaaatatttttatgatttttttattttatttacagaaaatacggtctttttatattgtactatcttgttaatttgttgttgtttttttgttatctgtatgttaatttttgttattgttttgatgttatttagattatttttcatgttacatttatgtagttttcttgttgtttttataaaaaattgtaaaaatgttaaaaaaaaatttaaacgtaaaaatattgtaatttttttataaaaaataatatcttatataattatctctaaacatttatcaaattgttatagacgactcatgtgtacttttataaataaatttatagtaataagctcaactttaaactttaaaacacgtttaattaaaaatttatatttagatatatttaaaaattctaaattacaatctctttattggggatcccaatttaaaaactaaacactattattgtgtaaactgttatttaaatgaaaagggctaaataaaaattatcagtcttaaaatctattccaaactattaactcaaccttgtaagctgaacagaccggaaaatgtacaactacttctctcttcaactcatggttgtacaaggttttcttgcttttacctacaacatagaacactaatgagtcacaaaaactcgacaagaaagcattaaaataccaaacaatacttataaaagcattcaaaataattccttataaacacaaacaatagtaatatttacataatccatttgctactaataaaataacattaattaatcactaatcaacaaaatatacattcaactaagaaagtaatgtctaataagacaactcaaattctgttacctaataagctaaccagttaccaccgttgcttaataaagtgacagattatctcctattatctaataagacaatcatatttacccatcatactcattctaatatgaacttttcttacctccaatctaaattcaagtgtgtcaaccaacctgcgtagaaattgctcgacgatccagagcctatgttacattagtgataaactaataaatatctattccaaaatacttcctaatacacgtaaatagaatctagagtttttttttaccaaactacatagtgaaaacccctaaaacaaaacacattttttggctctaaatatacatcatgttgtagagtttttcacgtgctttcaaacgatatataaaatgtaaaaaatagatacttgagtgaaaagttatggctaaaatacgaaaattggcctttctgaaattacccaattggactttcggttggtacaaccctataacatccagaattccagttgtctaggcagattttactcaaaaatactcaagttttaaagagttgagtgaaaaaagggagaaagctctccgttcatggttatcttgtagctggatacttcggaattgcacaaatccttagttagaatgtgattccaacttagcacattttgagattttgagaagagttgcatgcgttttggagagcacagtacgatgaaagttgtaagctgtgttcatggagagctattgtctatcgttggcctctatggtagtcgagggcctgagaggcagtacggtttaccatgtggcggatgttagcggtttgagtctgcttatctctaactcgtgaacttagccgatacaaagctat

SEQ ID NO: 300344 - DNA, 5542 bp, Cannabis indica
ggcataaaacccaacaatttttagtgtctggtgaggatagcgattccacttagcacttttgagtctggaggagattctttcaatgtcccccatggacgtacctcctatagatgtggatctcaaagacccaactttagatgaggcaccttttgaatctatttagaccaaacgatgagaaaaaggcaaaggcaaggctcgcgtcgcatctccagctcctcttgtgcaaaatgattccatataggaaatagaccaaaggccaaaccagttgagaaattatggcctgttggagacatactttgctaatagaggtgtatgaaacattctgggactcatgtggcaccagatgtttgtccttggagagtcatcatcccagagcgtagatggtttcagagcatggagttgggcccatatctcctgcggagcccaccttttgctcagaacttactttgctcaattttgtatcaaagctagagttgctcctttctaggtcttcttcagtcgcgtacaagctactctctaggtggtttatattttgtaggtcccgaggtcaggccggcccaaccctggaagaaattttgtacttttgtgacttgaaatcacaacctatgcaagggtatcctacaaagattggcttttatcgcctctagatgttcaaacacattcggtgtcccacaagctcttcttcccattgtccataacaaggaagtactagttcttcaccatgggctttcccatgaggcgtgttccaaaaatttccttggacatcaaatttctctgtaaaatcctcatccttcttcattttccttgatagcttaaaagaggattccatttcacgatctgatgctggtttgttttttgttgaatccatccctacaacagtacccaaagatgagctgaggcagcggatcaccttccacaaacccttcacaaaggaagaactgaaggtggaggacatggtgacctccaaatttctatgccaataaagcttcattgccaggtttaaaagcattcacggagtaagtggcaggggtaaacctcaaactcttagtgacctcaaagaaataactaccctagaatttttaatttcgatagcaaagtcaaccaaggatgaggagcttcttcccgctgcctgggaaaattatcatcctaaacccctcatgaaagaagaggaaatccaagctaggttccatgcagtgtactcggatgtgagcactttcgaaacaagtactctagaagagggaaactgcccttttgcattattcgtactgccagcttatctcagatgtcactgatagacaaaggggtttttaaccattttttcctaagcttggatcctcgtagatatccgatgaaggattattttgatagagtagataaaatagttaggcacctaaatagataggaattccccccaaacattactaaactgcgtcctttccttactatgttcttcacaaactttagggaatatgatagcttcattagtcaggaagaaataactttatttgcatgaggggaaccttataattacaccttcaacggttgcaatcacatgatatctctgttattttatgctgtgtggtttaagttgctatttcctacttctttgactaatttgatcatggtggtgtttggatattttcagatacgcttgagtccaggatgctaagtgatctggtgagcattattcataaggttaatgctatagctgacaacaaagggaaatagaagaaatctcaggccaaaaaggtcagccacacaatggaccctctagcacccctactcaggatcaaggagatttcgatgacccgaatgactcttagaggtggtagtaatggagccacctaatcgctagctccatcaggcgctgtgcctaaagagagggaacacatgcttcccttaggcaaagaagacttcgtagagggattggtatccccaaaggcgattgttgcattgaaacatgcaaacattgctcctcatctcagaagggaggataagagggctaggcactcgtcttccggggactcagaatctaccaaagcaggaagccttccttcccgaaacaacaaccaccctcatcaactcaacccccaaatgacaacgccaatgaaaggtagctggtccttgtggccaccaatactttgacctaaatccagtcaaaaaaacaatacaaccaatctaaacaccccgcaaaacttcaggcaaccaagcaatctcggcctcaacctcctcaacaattctatctaagctaaatcagcgcctccaaactaacttaccaaagatcccacctttactgtttaagttccctgtgaagcccactcatcctgggcccgacatcttagagtaggtttggaaggtggatgcatgcatcaagcgcagacttgcggaaaataatagtgtcatctagtctcaaaccgatcggctgtctgcggttaagaaagtcgagattagatagggtattgaaagcttagggtacttgacacctaaaacagacctcccagccgtgggtatgcagttaggtgtcgatgctcttgaggacattgctaccagtatgatggaactaacaaccgagaagtgggctgttggaagtagctccgaacctatgctcttggccaacacttcgaggtaataagcagctgggttatttctcatttctgctttggtttttcaatttacttaatgaaaaataccactcttttccttgacttttttcaatttgttctagatggcattctttgcggagcaaacctactaggaagtgcaaacaatggcggtccaactagacctttccctgactgcctagaaggacacaaaactccaaattgaatccatgaagaaagaggttgaatatcattgcaataaagctgactcactagctattaagaaatacatttaaaagtacaatgagtataaggcgtccttcacatcccagaccgaggaaaaataaaaggctcattttgaggagctagaggttgctaagtccacacttactaaggagcttgaggaagccttgaatgctaaaacaaacctttagaatcatgtaactgtcaataatcttgagctttagaacaggaaagattacttcaaatggctagaggccaaggtcaacatggacaaggtgttactaaagctggtagaggattcagtcatcactttgaaggttcgcattgaaaagaagataagcaaatcgaggcacagtccaaaactgtaacagggctgaaagagaccaaactcttatatcaacaaggctgagacgatgctttgaaagaaatctcctccctgtgcaaagctctggatatttagcggcaagagcactaagaagagcaagagtctcaccagcaagccctaaacattttgtgaaccaagctcacattattttatttgcccgccttgaataaagtatcccaaatgtgtaaaagcatcttggtaaggatgttgaggagctttccaaaagggtcgatgtcttcaaacatagtgtcgatgagtattttgatatctacgatagggttctgaccactatggttgatggagccgagactactgcccaagggactgagaatggaccagctagaaaagacaagacactagagattgtagacattccatcaggagaggacgactctttgcctcagaatacctccaaagtgccaccctaagatccaaattccaagtcagaacgctcctcctcactaacaaacataacttgttttcttttttaacttaatatcttttcgagatagttttttttttatgtttacagagctatttttctaaggttagtatgcagggcactttgccatgatttgtaagactactattttttccttttttttttgctgagacaattttatttgtttggtttgcggggttctgtaatagtgtttaggcctttatactcatttctttgcctcgagctttgattcccatgtgttggcttgttagattattttaatggtttttatcctagggtgttttgaattttgtggttctaacgtctaccacttcaaacattagactttatttgacacttacttcctctactaatttaggaaatgtttacaaatacttgcttcctattttcaagtaggattaccttggttagaacccttttaggaatctacaaacttaagttgattaaattttctaacaatacaaattggcttttcaacttttcccagacatttgtgtggtctaagagttttagcactttttgatttccttgaatagttaattacttactcaccaaactgctcactgaatgctagtcagggatggttttctcacgaaagggcgagcttctgcattgtccctaggaaaattggttgaagatgttatagatttcaggcattgtcccttgtttaagaatcgggctcaaactatgataactttcaagcgtgttttcccaccctaaacttcatccacaagagttttttgccactagggctgtttataaattaacgggcgagttttacacactatggattttttacaatgtcttatgaacaaggaaaggctaaaaatgcacaagagttcaaacgagaccttcccatttcatttcaaaaatttcaacaaacttaaactttaggaaatccactaaaatttttcgagaaggaattcaggcaaatctctccttcttaggagatttggctgaaaactcatttcatttgagagcttaccctaattttcaatgtcaagaaggaatttaagcatatcttttccttggggaatttggttgaaaacacatcctattttagggtttgaatcaatgcaagttataataaaaatttaacatgcataagcaaagaaaataagcatagcacaatgtacattttttgggtcattcacaactaggcatagtaccccaaagtgagctaagatgtttggacgtctccaacttctcggtcacttgtttgaaacatagctcatggcttagaaagtgtataacataaatttatatgtaaactgcttctattttcatttaaatttacccaaaggttctacctaaagaagttaattacataaatatttacacaaagctcatgggatttcatcaaggcttggtcacctagcctattggtagtaccgacataagcggtcttcattctaggctaagaactacacatacatggcagccctctctcaaaaagtttaaactattcaaacttcatctcctctctcttaattacagtcgcacaaaacttagggtttcacttgtcttcttcacgggttgggttctacggttattatgggttacgttttcttctctcttctctttacaacagccacgaacacatttttcttcatcttttctcagccatgatgacgacagacagtagacgagatccaccagcaaaggacgcacctagaataactctttttattattatatttactttacatgttattatttaaatttttatattggttgataaatattttaattgattaagaaaaagagaatggcgtggataactaggttttaccataattaaatatattttttattttcttatctacttattaattatagctgtactttttt

SEQ ID NO: 300345 - DNA, 3170 bp, Cannabis indica
ttttacaaaaaaaaaaaagaacatttatctatgtttattaacttgttttggccaattttttcagttcaatccaaccattctttcactcgaaaaaaaaaacaaattaaatgcgactgtcttttaactacaataaaaaagaagaaatattcttgttaaattactgggaaaaaaaacccaataagttccaaccattttatttatggccaagttttagggattagtgtattccacttccaattccccaacaaaattgaaatcgcattattacttctttttctgctagtaacaaaattatattggtatttagttagaatgaataaaaacataaaaatagaattagaatgaaaatgaggataaaaatagaaataaaatgtaatcaaatttaaaatatacaaaaaattaaaaaattattttttttttcttgtattagaatgatcattccatttattttaaaatggaatagtcaaagtcattctattagaattacattaacactttaaaaaatacaactaaataaaggaatgaaataaagtttatttcattctattttattttattatctctaatcaatcaccaccaacaacaaagtaaagttagatccaagcatagttttagagtgaattaataattgatgtgttgtcgaaagttattttagtaataatggattcattataaataaacactttgtttctagtacaaggaaagaatatattatcacaaatacactgtagtacccaccaacaatactactcactcagcaccatattattaggctttacactctggatcacatcaaatatgtcaaaccttagacattataataacatattagatggtaaccaatcccactgcctaaaaaaaatgagccttagccaaattcaatgtagcatatgatgcctcacacttcctactctttatagactttttccattccatggtggagtagagtcaattattgcatacacaaataactgtaattctcacacacacatacaaaaaaatatcttctattatgccggtttcttcttcttttgactacttaattttccatgtttgaaaaagctatgttttgatacaataactaagtcattttttattttccaatatctatttgagggggattagaaagagcccttttgatacacccacacatacatgcaattatgcaatgaataataatcacaaaaatatttctaaatttcatcatttcaaacaacataaaggctaaatttttgggaaagataaaaaaagtgaaagcactcatataagatgtacgagttcgtatatagtttgtaaatcccaagattgatgcttttacattgggtaatggcagtagtagtagtagtagtaataataagtaaaaaaagagtacaaaattcgagtaccaaaacctgaagaaaatcacagaaacatgcgttgatggttgctgtgttggggtcattctacatataaaacccacgtgaccactgtaactcttccacgtggggtctgcacacacacacacatatagttacatttggtctcctttggggtacaaactgctttttatttttgtacttgttttattattattgttatttttttcttttaagtggcaatggcgtatggctcatggcaatgtggctttaacaagggttttattcactgcaggtgaaaaaggaccagctctgatagcactgacccccacaagtactagtatggaaagtatttcatgcttttttagtataaaacaaaacacagtacggttgtccaagaatttgactatatttccaataaaaagaccacaaaattaaaagccaagggaatattttcaggtttaaactagtcatttttagctgaatcattgcagggtttttaactcctgtttcgctttcttttttacttttgtaacgttccatcagaacaaataagaaaaaaaaagaagaaaaagcctctctatctctctctattggaaaaaagattctaagaaactgaaaactagtaaagaaatcaatgacagggttgcattatcaagaagctaggcatcagaggatcactggtaactatataagaaaaaaaacatgaatagacaagatgggaacaattaatctgaacaggctcaaatagtcacttgatgttttctgattactgttgttcaaggaatgttaacaaaaagcaaactgtatctgaatctcaaattcccttctataattcctgccatatgaatttagtgctcttctttttccaactatatatcctcaaaattaatgacagaaacaagacaaaagtcttttccggtaacaaatcaaccaactatacatcattatgcaatgtaccaacgtgccagagttacccatctgaaaataaccaaattaagtaaccattgttgattcagtagtcattcatagtccagaaataggtcttatttggcatttcatattaaatattctgcacatttattccatttctcctctttttgttctccacataccacatacaagtcatagaaacaagaaacaaatgtatggttattcaaagcaaaattatctgccatatctgaacagcacacttataacattttagaaaattttttccactggtaaaaaaaaacagacacacagacaaagagtggcttacacaaacatttatagcaaaagataataagccacttcacctgtttctggtgcatagtctcatctgcgtgtctgtgtgtaaagttgcatatatgaattatagactttttggcaagtaaatttaattattgaaattggaaatatccatacttaatgcttctagaacagccattatattgttggaatgtccaaatagaaaactattcctagcctatcattctcaataatcaactctcaatgcattacaaagagtgtgtcaaatataggcagaaacattggtaatctgtttaatcaaacaatgagtagcgagcatcatccacaggattacagtgtaataactcaattctaaaaaaaaaaaataagaaaaagaaaatgttttcttaaaatttcatcagtctaagccaaagcaaaggaagaatggtttgaaattaaatacccatgcagttacagacaaacatgcttagcagggtaacagtactgaaatactattatcgaaaagagatatcgttaacaaacataaacatctccaacaataataaagctagttgcgaacttctt

SEQ ID NO: 300346 - DNA, 3910 bp, Cannabis indica
ttgttttttttttttttttccatatttcatatatatttatatattttgtgtcaggtgacaaaatgggtctgcctaggccaccagcatttctagatccatctttaactgaagatattatgctagaaaaaggagtgaattatgcctctggaggtggtgggattttgaatgcaactggtacctactttgtaagttattattattcttttatatcataaaacacataatcttttatatatagtttatttatttgcttattgttttcataatatattaaggagcgaagattaaaattttttctatatatatttatatacttaatgttgcagattcaaaggttttcactttacaaacaaattgaactgtttgaagggacacaaaagcttataagaagcaaaattgggaaggaggcagctgaaaaattcttccaaaactcacgttatgtggtggctttaggcagcaatgatttcattaacaattacctaatgcctgtttacagtgattcatggacttataatgatgtcacttttgttgaccacttgatggaaactcttaaagatcaactaaaggtttatttcaatcaacattaatatttaaggatgaggctcatcattagtttgataagcatatatatgatttcagtagtgttatttttgtagattttgcataaattaggagcgaggaagttgatggtatttgggctaggcccaatgggctgtattcccctccaaagggtgcttagtacctcaggttcaggtggctgccaagaaagatcaaacaaactagcacttagcttcaacaaagaagcaagcaaattgttaaaagaattatcaagcacccttcctaatgccaattatcaatttggtgatgcttatgatgttgttaacgatgtcataactaatccttctaaatatggtaagtaactaattaactcctaaatgtaacatattaataatccttctaaaaaagaacttgagttattattctacattaattaattgctcatgatcaaaacttgtagaactagtaaaataaaaatgttaccatatagtgttagagtctcattttcttttttgggttttgtttaggattctcgaactcagaatcgccatgctgttcattcgggagaattaggccatctcttacatgtgttcctgcatcatcattgtgcaaggatagaagcaagtatgtgttttgggatgagtaccatccatcagatgctgctaatcagataattgctaatgagatcattaagaaacttgggtttatgcatgatcaaaatcaaccaattgaaccatctccagcacctgcttttggtccatcgtcacaggatgaagaagatgaacaataaaaataataatcaacttattttcgataaattatgtcgaagtctctaatgcgaacttgtttttattattattaatttgatatctatataaacttaaatttgtatgggaataaaagttttctttcttttatttttaattatctgatgagttgagttacaaaaattaatgcgtcaaatgtatttttaattggttaattagaactgtttgctgaagttaagaacaatgatttatcttaatattgtgtatgggaaatgttaaaggtgcttatggtgcctagtacttgtgagatctaatatcgttattggtccagcttattaacatcatatcgtgtcccgcttattttagtttgataaatatgttaaaaaatcgctaatcaattatatagtaatacttcatcgtggttctaggaacaatgggtgtggctcataacaatattcattctatatatatatatttgattagattgactttctacagccaaaataaatctccactctaacattgttcctaacaccttactaaactagataaagaaaactatgtataattttcggttgattaaaacttaggaataaaaaaaatagattttaagagaaattactataaatatacactactataaaatatgatttttctgtcagtcaacacgacagtcaaagcccaaaaccgacataaaaagactacattaaaatttttgtcaatttagaactgacgacattttgcattggactaatgttattccaatttctacataacgtaatttgatatctatctgggtgacacgttgaaaagaccctataccctggacaggcaatttctcctacaatgtttcctacaaagagatttggtacttaaatcatagaagaagctggaaatatctgaggttagtgtacaataacatctgaccagcttccattgcgcagaaagctcacatacatacgcggacaaaataatataaattaaatactttcagagatatatcctatatatctgcaagtttgtaagtcacgataatatctctaaattcatgggatagattcgcggtaacaaagaagagaggaaacctaccaagtttcccattttgttgtatttatttaaagaacataaacaagttttctattttaattcttattagttttgagaaacacatctaatgtaattcttccctataaacagtgaagtcatttcactattcagggatacaagaaaaatcagagaaaaaaggatcataaattcaagagagaaatatttagaaatcattgtaagagctttcgagagagattaagaacttcttgcatttcttctcacaagtgaatacaagtaaaaggggcgtaggatattaccatcatcatggggtcgatcctctataacaactacaatgttctctttgctttatttttatcattcttgctatttaattatttctaatcactttaattgaatcattgttattggctaaaagggaggtcaatattttagtactttcattgagagcagataaacacaatctttgtttgagtcttgtcaagacacacaaagatggctatatccacgaggagaggaaatcaaaacaatacgactgatctgatggtaacagatcctgatgtgcaaactcttagaaatcgaagatatccactcaggatggatcccgaccatactttttactcgacctccaataggtcctcaatcaatagggctaggagtgacgacccctctggcaaagttcactccaggcatgcaagaaactgagaccactagtactcctgctgagaaaactacccttggtactaaaaatccatctattggaaatcctcaaaggacaattggtgacgacactaaactgcaaaatttacaagccaaactagggcagttgaaagagcataccaacactcttcaccatgattagcaagatacgcaagcagctgtaaatttttcttttgagaagcaaagacgccaattccaagagtggatggatcaacagatggaaatcatgaaagcccagcgagagtcgactgacaacttgttaggttatttttagtactaattttagattaattttagtatatttttaatttagttttacttgtatttggagcaaatttacgcttgttatcttttatttttgtagatttataattgatgaagatttgaataatatcaacgaaaaaagatgagaataaatgataaaagatctcgtaaaatatcaatgtgaaaaatcaaaatcctgcttagaagaaaagatattacgcgtcgcacacgtgggagaaattgcacacgggccgcaacccaagaatgggcataccgcggcccgcatatgggaaatcaagtccctacacgtgaaatgctcacacgggctgtgacccatgaaagagggcgctgcggcccgcccctctactgcagcaaaaatattatctttttcctcacgtgggcctggtgtggcttcctaattcaaagctgaataggattttcagcatgtgcgtttttctatcttttttgtccttcaatggctatataaggagtgaacttcagtttttttcgggaagcaatttgggaggaaataaata

SEQ ID NO: 300347 - DNA, 3058 bp, Cannabis indica
ttttttttttaaaaaaacgttttaattttataatataaatttaactaaaatattatttattaaaattaaaacataacaaaacttaattaacaaaaaatctgttcggttgaaactaaaacaaaatataattttcattgcgggtcctatatgtagcatatctgcctcaacataattttttaatatttattaaattaatgcacatatagggggttcactttaggatcgcccgggtctggattccttctagattagggttcgggatccaaattgcaagccggtggccaatgtccaaatctagggtcaggtttaaaaatattgataaaagaaaacacaaatatactataattaaaaaataaaaaatgaatataattttacaaaatatgtttttttttaaatatttgtatgtttctaatttaaaaataaaaaatcaattaaaacaagattatggaaggcacttataatgtttcatgtgttattaaatttttgtataaatcttttgttttacaccatatttttctttttgaataattataggaaagggatggaggtttgtatatagatgttattattattattactctttacacatttttatttctatattttccttatttttttttttcattaaaatttaaccttaaattattgttcttttaactgataattttgttgctgggtaagagcttgatgaggactaacagaaaatggttcggatgtaatttcttctaccatgacttcttttaaaaatatataatagtatgggggcaaatttgaaaaatcaaacaaccgtaagggtaagataagaaatttccaaacattagagattgagttttatctggttatctcaatctcttggtatatatatgcccacttgggatttttagatattatataccctttacaaatatgtaatctaaaggcaaaagagacactaattatggagaaacttttggacaaacagttattcaacaatggagtcctgtggttcaactgtaagctctactccattcatttacatatacataactaatttaatcaatgataattattttgtctttagctctttctacctgtgttttgaatccatgaaagcctgtaatctcagcatgtgcaaattttgagttgagaatgtggaattaaataaacacctggggttttcccattattttggaaaagattttcaccattgcaaaattgaagattatcaagtttgaaaagtctctaaaaaactagttttgcagccaaagaagcaacacattaccatattcaaacgccatcgtttcacttgagatcagcaggactaagtgagtggtatcccagttgttatatccatacaaaaatgcctaaaatggccagccaatgcagaacttcagtgaaggtatccaatttttggactttgatatatgatgttgtaaccacacattaaatttcttagtaactttttggggtcagatttatgcagtgagaaggagaaggatatatgaaagctcagaaacttatgtactattggaaccaggagaggatgagaagtttgtatctgaagaagaattgaggattaagctaaagggttggctggaaaaatggccaggcgagtctcttcctccagaccttgctagatttgaaagcattgatgatgctgtttcttacttggtcacctctgtttgtgagcttgaaattcaaggagatgttggttcagttcaatggtatgaagttcgtttggaataataataataataataataataattattttgtgaaactataatctgagctgctttagtgtcaagcttttatttataagaatcaatttcttaaccaaagcaaagcatagggacatgctgagcagaatcttattgataaataaatagaaaatatatttaaattacattaacaaacaccccctttgaaaaaagaacaaccctttcagatacaataatacccaaaatcttgaatcactgaagtagagccacatctgggagaagcaaatcctgaatctgtaccagtatgacatgataaaatgagctatgtaaacgaaatacaaataataattcatttgattcaattatacatatacagaccttaagttgatttttacttggtggcaaaagtgatgctccctttctggttcttgcaagaagatttttcgttacaggggacatcatcgaatcagtggggcttctatacctacaaaatcaaaacaaatagaataagttttcagttactaatgttatgtatataagaatgattataatctaatctgttacctttctgggtatttaaatgccttgggaacattaagacgatctggggtggtgggcttgcgcaagtcgatcccagaactgggagagtcgtgagtattttgatctgtttggataagaactggggttggtgtgattggctgggaaactgttttctcaggtacgcttgggctttcaataggcatttcaaccctgttctccattgattattattatatctgtgtgtggtttacctgaaaacaaagcaggaagaagaagaagaaataataaggggttgaatggaaaaacagggtatggagagaatgattggtgtgaaagaaaaacaaggtttaggagggatttaacgttggaatggaagaagattgtgttttttagaggtgaccgtttggggatgagagggataatttttgcaacggtcggatttcatttcaaggcggcctgctcattcaaaaaaaataaaagaacgaaagaaagttggtggcttcggcggtgattaaaggcccaatttcagtgcaggcccaagcagcccatctatattttcactacaactaagaggtatatttaaattaaatttgataggaaggtaaatttgattaatatataaagaaaatggtattttttaactttttccaaatcgggactaatatcttgggctatatatatatataaaatggaaaaaaaaaaatagaaagtttatataaatataaagagaaaattacactctataccctttttatattgtcctcttttatttttactttcttttttaaaaatctatcatttttatttctttttttaaa

SEQ ID NO: 300348 - DNA, 1427 bp, Cannabis indica
atccatgttagaatttttttactaaaattagacaaaaatccttaaatctaacaatctcaatagttcaaggagaatttttaacggccaaaaaaattcagagggcatgatttgatacatgtcaaaattcgaaagaaaaaattaataattaacttaaatttaaatatatataaaaaaactttatattaaaatacacccataacaacattaacattatcttaataatttttattacttaatagagtatatacatatatatagcaaaacaacaaaatagtcaaatacataaaagtgtaacccttttcgggtaatagatagatatggtcttatatatattataacgacttatcaataaaaagagtaacatatatgactatatatagtttcaacaagaaagccctagctagtaactaataaccaatcattattaggttgcctactattttgcccagtgtacgaatcattttcatttcaattatagtcaatttatatatatatatatatatatgtatataagcacataatcacttgaaagtttcagaagtttccttaataattaattagctttaaacaatatgcatacatatatatagtctcctataagaaaattttgttggtgaatttgcttacgtgtcactatgttatttgtaagtgggaacaaaataaataaaattattacaatggaattgacaattcatcaaagagccaaatacaaaattaaaaattatttacatttaaaattgacaagtcttgatcagaaagctgtatagtctaattttcattctggaatatataatatatttatatataatatttctttaacaaattaatgagattgatctataaatttctagaacatcatttcttgccacatttggaaaacactatatatcaatatatacactaggattattattattgtgtagaaatacaaacaataatcaaagaaaaggttaattattactttttattatttatatatataccaattataaccacaacttttttttctcatgatcatatcatacaatatatcaagtggtagaatatccacgtggaaacaaactaatgaacaatgtaaaagctcaaagttgtgtatagtagagagaaaattattgtaaagaaaatctatttttattttatttttcatcaaaatacatattattaaattatactttttgaacttttagagacattaaaaatactcttaaactattgaaatcgttaaatttaataaagattttttgtccaattttagtaaaaaaaaaagacttacatagatgaaagttcaggagacatgatttagtacatatcaaaattcgaggagtatgatttagtagatatcaaagtatggagaacatagtttagtacataaacaatcattgaaatagtaaaattgaatgaaaatagacaaaagtccttaaatctaa

SEQ ID NO: 300349 - DNA, 3004 bp, Cannabis indica
cataagattacagtggtcttatctccaaggtctacaacataacttagggattaacttctaatgtataattcttggttcttacctaagatgggtgtacttaattactttacctaaagttatttatattaatttgaaagttgtagttcttaagcactcctacttaacgttataatttgttgacaggaaaggatattccattgtaatgaatacatggaaaagatatgatctgttgaagcagtcaatttctcattacacaacctgttctgggctcgattcaatacatatcgtatggagtgagcctgatcctccatcagattctcttaaaaagtttttaaatcacattgtagaatccaatgctaaagatgggcgacttgttgaattgaaatttgatatcaataaggaagacagtttgaacaatagattcaaagaaattactgatttgaaaacagatgctattttttcgattgacgatgatgttatatttccttgctcttcagttgagtttgcttttagcgtttggcaaagtgcaccagatacaatggtgggatatgtacctcgcattcattgggtcgactcaacggtatggtttaattccatgttatttttttttctccatatggcactatttgtttctgctattcattttccaagccatatgcataaaaaataataacttgtgaaatataatatgaggtgcaggtttgttgttggtcttatgtatgacttggcttgttgttgctctctgttttgtaaaagaacgcaatctccatgttggcaacattgtcctgtaacttaaaacttagtcaaaaatcatgaaccgagtacaatgatttgaattgattttttagctgcattctcattgttagaagctccacatgcacctttatgctcactgatctagttctgtcttaagaaaattgccttcaaaggtcttaatttttatgttgtgatattttccgtccttgtggaaacatgagcaaatacttgttataagttaatgttttatagatacacgtgaaaatgtaagcttggctttttgcctatgccactgatggaactatctagcttactcttattttgcatctcatagcatagctggatatgacagctatacatgtatcttcttctcagctaaacttggatttaagcttcatttaacttttgctctgtgtctgcaatatgattatagtagctccattatgtgatcaactacattctttcataagagttcagctacttgtaaatatttctgtgcaatatgattcaaataccccaacttgccatcatttttattaattttaattttaaatgcagaaagacaatttgggtagttacatttatggtggatggtggtctgtttggtggacgggctcttacagcatggtactctctaaggctgctttcttccacaaaaagtatctaagtctttatacaaatgaaatgccagcttcaatcagagagtatataaccaaaaacaggtcattctttggttaactttgttttttttttccatctttacacattatttcttttaatctaatgatacgtggtgttataattcataaacgtattctattcaccaggaactgtgaggatattgctatgtcttttcttgtagcaaatgcaactggtgctccccctatatgggtaaaaggtaagagtttatatctgatactttttttgagtaagaatatctgatacaaatttattattcatattttctacattttcttagtctttacataatgctctacagttctagtagtagtatcctatgttgttcaacgaactaaatttttggatttgtggttgttgtaattgaaatactatggaaatatgattactatcccaacgggtctgttgggaaatcatactttgtttaaataggcttgctagcatattcatcttgaggctacgcttttccttttggtttgctcatttgtcttcatatacatagattgatgaataggttaataagacattgctttcttcttaatataatttcatcatgagttaaaatgggccacatggttcatacaaattataagacatttggagctactattaaataaatttaactctcactatgctatgtagatttttcctggaaatatgtgaataaaaatacagtggttaatgggagttttgtttctagcttacagagttgcgtagttatactttgtttaaatttgaccattagaagtatcctagggagtttcattagcatatctaggtatcaaaagagtacaataatttttcggctctcctagaattttgttgctgcattataagattgtgtacggatgccttttgcattgagaatgttttatcaatttatcaggtttagaacaggcttcaaaccaacaaattgattgtgtttggcttcaaataaaaacaatgtttgctacattttgtacattaatctctttccccctttccctacttaccattgctggtttcgtcttttatgtacttgctctgatatctaatagtctgtaaatggtattggctttgtaggcaagatatttgagattggttcaacaggtattagtagcttgggaggtcacagtgaaaaaagaaccgaatgcgttaatagatttgttgaggagtttggaggaatgccattggtatctacatcagttaaggcggttgacagccgcaaaatctggttttggtgatgctagagagcgagtagcagctaccctttcaattgctaattgtagccttggtttggttttgcggttcttctggggttagacgatgtataatatggaaaatatctacgtaattgatgtatttttgagatagatagcttacatagcgtccttattggatttatttcttgtattcttaccatgtaacatggcagttgccacttaagatggttactttactactcacagcaatcactctcattttttttgttgtagttaacaatgtctcctactttttgatcaaatatgattctctgttaatatttttgaaatatcaaattgaatccttc
